United States Patent Application Publication US 2014/0057251 A1 - sequence listing, part 17

SEQ ID NO: 19144 - DNA, 8456 bp, Cannabis sativa
  modified_base (459)..(467): a, c, t, g, unknown or other
tatattgttcttaagaatggcagaagtaaaaaatggaccaaactgattgtgggtaaatattcactagccacataattaatatatatagatattaaggctaaatttttaaacaaaaattttatagcacataattaaatttaggaaagttttcaataatatttttgtatctatattattactattactgatgtgtttattcaatttaatctgcattattttgtttatagtgcatctgattcttactaggtgcaaatttcatatattggatcgatccaatctaatctacataataactcaaattcaaatcaatccaattcgcaaaaagtactgattggatcggctattttggattagttattttttaatattgaattattttatatttcacaaaaaaaatattttcacataactaacaaaaaaaaataaaataaattattgttgttttatgtctccaacaannnnnnnnnataaataaaataaaaaattcaaaggaagaaaaaaaaaatgtatgtacaaaaaaatgtttaattttatcttagattatatttttcttataagagtaaaatatatcatcgatctattaagttttgaaatataattatatcaaaagtattagatttttcaaattattattttttataacattgcggcctagacaataaagttatactggtttgaaaaggtcccaacactgattgttgaagtcttctcatgaatgtcttaatgtgatccaaatcacgttttttaaaaaaaaaatactatttttatataaaatatcaagacattttttttatttatacttttttaattatatacatagttttttaaaatatatatatgtaaattggattagatcaattacttatacatgtcaatcaatatttaatccgcacaagtgtagattttagatttccaatcaaatctaatccgcacaagtgcaaatatctacactttgcgaattggattgtattgaattgtgcgaattggattagatcgtgcggatcgaattagattgagtattttactatcacctctgtatactagttgggggtgaagggcatcgccatccttgataggttgtggctatgctccttcaatcagttgtttaaaagtttcaaccatccttcaagtttttcggctatcaaggtgtaaacatttcaattgaaaattttaactaactaagtagaatgttagagatcattttacaaaaaattgtcgaaattaaactaaaatataaaataaataaaagatatgaactttttttttatgatgttaattccaatttttttatacatacagttaggtacttcaacattgtcttcctaaagtacaaatcccaaatcatttttttttttacaaaatatatttttttttttactataggctcatagtacattttttttaaggccaaaatgtttcaatttttaaatattcactccctcatcacaattttagaaacataattaaaatacttacatttatactcgctcaataattttcttaatactatttttaaaacataattgtgcatcataattttttttagttttattatttgaatattatatattttttatacatcttaaatatgaaaagatgaagataaaaaagtgagaaattattagaaaaaaaaaatgtaagagatgaataatattctttaaatatttacacagaatatggtagacaaattataaaatgaaaaattggactgaatgttgtaaataaattttacaaattttataacctttctttttaataaaattcacatatatcattatagaatgatatataagacaggtattaggattgttcacaaaatttgtaattttgaactcaattaatccatactaaattattgagactgaaccaaatcaatttagtgttaatagtttgttcaatatttgaactgtttataatcctctagtctaatcactattttagaattctcctagtggttcaaaccaaaataataagccatataattctttgtatatacttgatatgtttttttattgttattatttgaaaacaatcctatatagaatataccatattcatttaaaattattttgagaatattttttattgttaatgtattataaaagcaaaaataatttagtaaaaaagagaataattatgtaaatatatatataataaatactaaattcaaattatggtttccaattactacactaatttctttattggttttgtttggtttaagcatttaatttaattggtttagtttagaaaccatagtttgaatttagtacttctttttatatatataagtagcataattttttgaaatgaagtagcataattattaatcattaattagtaataaaactagctaaagtaaactttgtaagtaacaccaaaactaattccacaagtaatttatcatacaaataataataaatgccttaattaaaaaaaatatatattttatatatgctataatatttacactatgttcacctgatactatgataatccacgtgtcactctatgaattaatgtggtagaggtaagaccacctggaatattaaattgttgcgtgtttgggtccatagtgtaataatcatttttttaaaacaaaaaataaattactgaatttagtaccaaaaaaaatctaagtgtaatgattagtataatttttgtaattgtgttccaaattccagttacaacgatagtaggaaaattagatataattgacataaataaaaatttgttattgaccataattaatcaattaaatatatattgacaatatcgttaaaacatgtatattaaaatcaatttttaatattaaataataatattctaaaaatatatgctaaatttggtgagcacatagtgactgatctcccaaaattaaaaggaccattacaagtgtgatccaactctcatttagccaaagtatgacccgaatcattaaggtctttcaaaatctaaacaacattataaatagaaaaaaaaaattaacagttgaaaaaaggaaataaacaatgagggatcttatccaacataaccttctcaatccttttacaattagtgaaaagatccacctcaccccaacccaatcgaagagccaatttaagaccagcaatagtcgctgccaacttgctaagaatagcagagttgacactcactttcgaaacactcaacgccaccactaccccgactgtttcacttctcgctttgctagcataatccgcataaactcgaatttttttaggtttaggaataccctaacaaatatcctgtattttgcccgtgtcattgttaaatttggtctaacttttaacaaatactatatttgatgtaatttttaacataatattaaagaaactaaaatatgatatgggcttgagattttttcactaggattactcttaagattttaatgaggcatttttgttaaaaaaaaaaagatatttgacatttcattatagatactataatttaaaagtaatataagatacaaaaatagtattataatgtttgataaaattttccaatacacctagaaggttattgcaatacactttatttgttttgggattcatcagaaatttttagtcatttttttttttcatgtacactataattatttagaaaatttttagaaaattctaaataattttaattttaaaaataaaattcaaatatttcattatacataatttttttttcttatacgaatggtaaataaatatttagactttatttttaatgctacaaattattttaatttttataaaaattaacgaataattttaaataattataacaaacacaaatatgacttttttttttttagaatgtacatattttcaagagtgtagtagattaagatcgagtaaccctttattatatatttatgtggatagacatgaaaaggtgatgaaaattgtaaagaacaacttttataagaatgtcaatattgtgttaaatttagcacaaaaagtgaacaaattttatatttagtacaatatttactatgttgttctatgcacaataatattttaagaggtaatttagtagtctaaaaaaaaaaatatttaatgaaataataaattaaatatttaaaaatttactaatatcaatattgtaaataaaatgtatgtattaaagtatttcattgattaatgataataaaagtgtaaaattaaaaaaaaaaaataatatatttattgtgtgctaaatttggcacaatattatatcttatgccaaatttagtttaatttttagcatgtgttaaatttaatacaacttataacacactattggagaagctttctattaaaaagtgctaaaaaataataatacaccacctatttagcactttgttggagatgctctaagatttgtattaaatttagtacaaaaaaaataagtttatattaatatttaactcattatttataattatactctaatgtaaagatataatgacatgtttattaataaacaatgagaatcaatagtgagggagtcatttccttacatttgtttatttaatttattaaaatttaagaaagaattaacttgttaaataagggagaaaagaaagaaaaaacttctcccactaattttataaggaacgtcattaagggtaatggattttatttatttttatttaagtttttaatattaaatttataatgacaattttatcttttaaaatatgtcttacaaaataactgtcatatactataatttaactcaaaagggtaatttagtcaatttaagcatttcgattacgttttttgataaagtaaacaagataaatcactatcattctatttccaaatagttttagtaaatttcgactattcttactttattccgctacatttctctattattttattctgattccgaatactgtgtaattaacgtgctataaataaatataattattattgatatcatttaatattgtattgaaaaaatataaacataattattttttttattgcttatataataataatatagtaaatgaagaagataaaattatgtaaaagtcaatgaatcaaaataatttgaaacattatagtaaataaaaaagatagaatttattgtgggctaaatttggtgcaatttttagcatgtgtcaaatttgacacagtttttagcacgtatcaacaaatttgacacactttttagattactattggagtagtatttttctttaagcatgctaaaatataacaatacactatttttttaacactccattagaaatgctctaacacatatgcaaatgcaacatttcttaacttatattgatcgatgaatgaaggtcctttcgaacatcagcatcgtggctagagattttaacactgccactcttgttgtcgtgttatatttatatttgtgttatgtagattgacatgtttaaatggtcaattttaaccgaatccatatatatatttttttgtcaataaatctcaaccctaaccaacatgtcgtgttctcatgtcgacatattatgtttgtgtatcgactatacttatgttacaatacatgttgattaacgtgattggtattacatatttaatttgtatatgtattttaaattatatcaaaattttgtagtcatttgaataatatactaaataaaaatatattaagttacaaataaataataagattaattaaaattatttatcacaaattatcaatacaatgaataaaattcataacatcaagtataaattagctaccttatattcttttaagtaattttatttctaatttatatatttttctattataataaataataatttaactataaattaatagttatgggtcaattcatgtcaatttcgtgttacacgtgttaaccttaatacaacccaaatataatcattgcatcagtgtttaactcaattttgacctgcgtttattttttatgatcataacccgcaatagtttgtatcgagtctgtgtcctattttgtgtcatgacttgaattgccaccccaattttaaatgatattatttaggccaacaactaattgatttttgatagtttttttattatttatttttattttaagtattgttattaggtatattaatagttcctaaatcaggaactacttataggttatttaactgtattttcagtttttgaaaatgtatttttaaaagtgagaataaaaaatatttttttgtcatattgtaatttaatggtatttggctaatgttttctaaaaattattttttaattttttttaccaaaaacaaagttacttcaatattctacgctataaaacgacatgaacctagcccaaccccgaattaggacttggcattggacccaacctagggacccagacctggactcggccctaggtgctgggttcggggccgagtttgggtcctaatctagttcgagaccggggtctgggtctgagttcaagcttggggtcctagttcgcattcagggctggggtcgaattgagtctgattcttaggtatgggtccggatccaagtcttgatctatgtctcgagttccaaaccctggacccaaacccgagtatgtgagagaaaatgtaaaaatgaatatattagacaaaaataaaagttgtttttgaaaataaaaaataatattttgatgttttttgtcttttagttttttgtaactcaatttttagaaatttgcttttaaaaaatttagttaaacacctcctattaatttttaaagttattttttatttttaaaaaaatattttatttatatttatgtaccccctagcaactaaagaaggtatttgtcccacctaaaatttagaaaatgagaaaaacaaaaaagttatataatattgttattgggtactaatggtgtctagtaccactagatatattatcctgtgatttactagtgataatcataatcctttccttaaaaattattacattaaattatgtggaattttatacttaattaaatcaataacaatattattagatgatactatgcataactacttttagcctttctaatttgcataatagtgtttagatttataaaatttatgtatagattaaaagttatataaactttttaaaggcaccctaaaatattgggctttgaaaggcaccctaaaaaattagagaaatgctaaagggcaccactggtatctagcaccctcctacgtgtcaatatcactattggtgcaattaagtatcgggtcccatatagtttaatataataatttttatagagtatcgctagccaattgcaagtcgacacatttagaaagtgctaggcaccactagtgcccaatagcaatgctcaaaaaattaagcctaaggcatttcccttttaaaaagagaaaataatatgagtggataattaatgcaagtgtgttgactattttagggaggtgtgtaggggtatggaaaatgaggtgatgagatatgaagtaggatgttgtttataggtaatggttttgattggccttaaatatgcagcatcttcatctctcaactgccaccctcttaccaataataataataataataataataataataaagataaattgcactataattatctaatgttttaaattttatatatttaaatactttatatttatttttagagtaaaaaatattcaatattataattctcttacatcggttactaccactttcattaacttataaatatggataggtggagggttcagatgcattacatttatttatttttttattttaaaacttaatattcttaatatcagaaactaaatgctacttgtttaaaaaaaatcgattttcataacaattttcacataatattagcagttcaattcgataatcatgttcgatatactgcactagctagttcactcaattatggtaatttggtattacatctctcttatttattttatttttttgaaacaagtagcatttagtttttgatattaagaatattaaattttaaaataaaataattaaatgtaatgtatatgagccatccacgtgttcataaatatgagttaacggaagtggtagtaacagtgtaagagaattgtaacattatgtacttttgtctcaaaaaataaaaataaaatatttaagtgtataaaatctaaaacattaaatatttataccctaatttatcctaataataataataataataataataataaaaatagcttactcttcatttataataaacatatatattcaagtcaatacttgaatatttgtttataaagcttagtacaagatatttggagtcgacaattacattttgcctttcatttttacgacattcaatgtcacataaatacacaattttttagttgttaggtgtgttttttaatcaaataaattattaactttttataaaagatatttgaataatgacaacacatttattacatatacttaaaatgcatattataataggattg

SEQ ID NO: 19145 - DNA, 2743 bp, Cannabis sativa
gaccgaaattccatgttatatatattattcaaatcgaaatttcgggtgtggctttttcgtttttctggttgatatgtgctttttcttagagttagaaatttatattaggagatgggcagctgtagtgacttctctctaatgggggtggagattcttcgatttgaaggaaaaatgtggtggggacggaaataatactattcttactgactccgatataaatatatatagtttttatttttatttttaatgtatatataatataataaatattttttagaatatttgtttgatttacatttaattttttttatttattttaaattattattttttttttctattttaccttgatggaggaccccataggttcctattcccctttatcttgaatttgctggttattagacgaggatggagcggagatgggggcataaacaagtagtgagaattggaacaaaattccattcctcgtatatatattaaccgcccaattgctatctctactcttatatctatttattatttttttgttggaaagagaatacttatatttaatttatataagattattatgagtagtactacgagtaaaatcttcgatcaaccattttgatttagttagcaaccatgttattattttttaacttgtgtccccaaaaaattaggggaacttacatatatagtaaaatgggctaaagattacatgtatactataatacgcaaaaaattacttttatactgtgttgttcttaaaatctttcttttatactgtatggaggctaaaacgaagtggaaggcttcattctcaaaacctattgtcaaaaaatgccaaaacagccgaaaaactaccattaatcccgacaagatgaagcagaaacattaaaattgaagtaaaaaacaaaacccaaaagcctcatcaatacaaaaattcaacggatcaaaaagataagtgtttaccgagtttttcggcaactgaataattatatagcttaagaaagtaataaaagcgtaaatggcaagaatacagacaacaaatttttacgtggttcaggcgttaattatccttagtctgcgagtcaattatattaggctctttggccggtgactggttatacacatacaaaaatgatggacttttactccgatccaccgtgctcctcttgaagaagaggaagcttagtaagaatattcaagaattcataatggagctacaataatgtgtttacagagaattcgtgttcagtctcaaggtgaagagttgaagggatcaaaggagaagaagttcaggttccgatcccttgccttgtgtctttggggggtatttataggccaatcccttcgtaaggaccaccgttgatgtatcctcataagaataaatccccaccatcaaattggtaggtggtatattttccatgtggtctataccgttgtcagatggtactggatgtactggtggtgctttggatgcgtgtcactctaaggcctttcttgtttgacttactcgtgctcctagtcgttggatcattttgcacaatacacgaggacatgcacgctctatgtggtgtgagagacaacctctatcgtacataggaaaggagcaagcggtgggccctcagcctggcacgtgcggaccgagcctccacgggtcaaaagagtaccccagaccaatacatcttgatggaaggtccatgatctttgcgggagcaaaaggtcccgccttgtagaggggagagagttgctaactcgcggatatctcccttgtggcctacattcgggaggacttctttcgcggaggtctattccgcaaggttagggcctttatcctccgggagcacagaatgaggcccttggatggcttaatgatttctcgtctctccttaattaaggtccacgtgttgtgtaggcaaaaatgcagataacatttaccccaagctttcgggacatgccatggttcgggagcttgtaatatcttcttctgagaatttttttgcgcacgtatatgatttctcccatttttttatcagagtgttaaatgctgatttttggatttttgcgcacgtgctgggcgggtgttcctgggaagcttgaaatggcggcgattcgacttaggcagtcttttcattttctgagtgttcttcacaatgcatgtaatgatgggagccatctgttgggaagcgaggtactctttcagcttctcacatccaatcaaatggtatctcttgggatgaattgaagcgtctacttcgtgtgaaatgtgccccttccagtcgtcccataaatacttacaacagccaattcatttatcactcttctttctcgtcacaccattgcttttaaagttccctttctctttgttgcgtgtttccaccgataacgctgcaccagagccttttatcctatcacccttccctcaatcagtaagttcttccgtttatatgtttaagagctttggaaggtgccttgggtggtgcacttgctacaaaatttggcttccagaaattttggggttaagccatgaccctttttctttttgttgagccaatttgtggataggtacaccatctctactccgaataaagctggcccttccgagacggcagggagtagctcctctaccaggaagacgtaaaaacttgtggtatcagacctcaacatgggaggatcaggggatcgccctgtcctccttatgctcactaaggctgggccagcctagggctcttccccgacttcgtcttggatgcct

SEQ ID NO: 19146 - DNA, 3245 bp, Cannabis sativa
gaaagccagtatctcgaatgaagggacttgattcaagcttagctttgcaagaggggaagacagataatgaagctgaagatgcagctaatggtctagatctgattatagatatgttgaatattgcagataatacgaactaggctatcgaacaatttggttccaaaaaccaggttatggaataggggcatttgaattgggctaaggaagtggaagataaagcagaatcagataacgatcaggttcaattccaagaatcagcgaggaatcattggaaatctttcaaggaggagaagatgtactatcgtgttcctaaattaacgtatacaaaacctatactcaagaatggaatcaagattgcacaactcgaccttaaggaagtgaaagaacaagctgcaacttgtaatacaacagtgatttatttgtatggttcttggagccaatcctcctatggctatttttgagggatttatcaaacggatttggggacatcttgggatagtacagatagtaaagatgactatgggactgattatagtcaaattcagtgatgaagcatctagagattaggtcttggaattaggagtgatccaatttgataggaaacatgtgattataaggccacggtccactgatttaaatgttgttaagcttgttcgatcagtgcccttttagattcgacttcaagaccttggcctccaatattgggaaaataattgtctgagtgctttacttagtacagttgggaaactaatcatagtggaccagcatactaaggatcgcacaagggttcaatttgttagggttttagtggaaatggacattacaaatactcctcctagatcaatacagtatattaatgaacatggtcagctggttgaacaaagtattgattatgaatggctcctgattaagtgtgaaagttgtatgggttatggacacataatgatggactgtcgaaaaggagaggctaagaagaaattgcaggaaactgtagttgttaacttagtgaaggaatcaagaaataatgagatagagataaaggtggctaacaaggtagatggtaataaatattcaggtcatttcaggaaggcaaatcaaaagaatagttctgatgaggttaaccatgacaaaaaatgggttacacctcagaaaactatcccccaaaaataggttaaagctgcagatgagacttttgaagttgtgcaaactactgctaatagtttcagggctttaaatgaagaagaacaaggtttgacaacaaaaatggtgtccaaagaagcagcggatttaggtataatatggataattgtaatgttacgtgttggaatgttaggggtgtgaataatagagataaacaatatattgttttggatttttgtagtatcaataaagttggtgtatgagccttagttgaaacaaaattaaaagagaataaattcaaagagatgatggagaataagtttgttaattgggattatttcttaagctctaccgttgaaggtcgtattctaattatttggagaaaaacttttgtcaaagtgattgtcattgctaaaactcctcggcttgtccattgctatgtcaaaatgtcagggaatgataaagcttgttgtattacttttgtctatggatttaataccagacatgagagaaaactctatggattgatctactaagtcttaagcatcttgtgaaaccgtagcttattcttggagattttaatgcagttttttaacttgaaaatagatcaggagggaaccctatatgtctcaatgatttggccgatcccaatgcctggttttctcaggctcatgttgaagctttaaagagtactggttcagtttttacttggactaacaaccaagatgtgactagtagaatttattcgaaaattgatcatgcattttccaatgaagattggcaagacacttttgataattctactactcattttggttaggagacaatctcggatcactgctcttgcattgtttctactaaagctgaagtgaaaattgggattaaaccattttgatactacaacttttgggcagatcaccctaattttaaaaacctagttttaacaaactaggagaaactgattgtttcctatggattgaaaggaatataccttaagttaatgagattgaagcattgtcttaagaaacgcaatcatgagacaataggagatataggaaagaactttcagcaagctagagatcgattcttggaagctagaatgaaggctcaagatcatcctagggacacttattttcaggatcaagagaggtcagctgctacaaatttagggtgttgacaagctatttatcgatagataaacttttaattttgagtctaagtcccccgaaaagtgatttagcgtatcactaatcaattttgcatatgttgtgacttaggggcctgtaaaccatcaagcagcagttccactcaggttgactggcacacctaaattcagaatcgaggtaagattagtataatagtatcatatgtgattacatgtttagtgtgtattatgaatacctattagttaacatatcagtaatagtggtatcagtctacatagagttacactagatactgattgatatatgtttggcataagtactgattgacgctatcacatcgatacggctagagtaccgagttaggttaatattattgtcaatagtactgtcgtatgaatgttctggactcaagacgtgtgggatgcaagatagggttataattaggtgtacgggcgtctagttataatctggtttatgttatgttatgattatgcttttcttattgagtctgtcgactcacagttattcttcatttgtttaggtaagggcaacactaaagctgagcagtagtgagtgcgagcagatgaatattgtacatatccaggcagttagagttggagtgtttaatcttcgaggcagcaggctttattttggcagtcgctaggcaaaatttttttgtaattatatattttgtaaaactcttgtaacttttagaatcgggatcccgaattatgtaatgtttatttactataagtttaaagtttaattatgaaaagttttaattgaacataattttcataaaattcgttgattagcaacgaattgaacagtcagtatttaaatcacaataatatgcctaatctagtagagtgtgatatttaatatcatttccttccaaaaatactcttacagttcacaaaagtctctctctctctctct

SEQ ID NO: 19147 - DNA, 3647 bp, Cannabis sativa
ctttattgatattgaataatctgatttacattgaaacagagtttgatttcgggcataaaacccaacagtgagtagatctaagatcctggtaaaataatttccaacactatctagtttatcaatcactccactagcagcataagagtctatagctccccaaattaaataatactgagtgtaaagagtcgttgatagagagctaacctatcaccattgacgatctagccttagcatcagcctgagtaatcgaaaaaatccaacctcaagttaatttttcttctttcttgggttcttctttcttcagttgagggcaatctttcttgaaatgccctataataccacattgaaagcatgccttccccttacactcaccaagatggtgcttcttacaaactgggcactctgggtaagtataacgacctttaggatcatcctgataatcgccttaattctggttccctatgaacatattattttgacccgagcaactagatgccattgaagcttttcttttcttatcattaaaggaactaccaccacctttaccaaaaatggaagcaagaggagcagcacatccactatcatttagagtcagtttggacttctgaataggctcaatagcacccttggccctaagagccttttccaccatctatgcataagtggtgccttcatcagttatgatcaccagattgtgtctaatcttggcgtcgagccccgccaaatactttgctttcttactaaaattagttggcataattattgaggcaaacttggcaagcatgtcaaacttagtagtgtactttgccaccaacatagacttttttatgagttacctgaacaaactctttcctcttgtcaatgcgaactgtttcattttaataaattacattgaacagttcttggaattcatcttaaatcatagctgccacattacggctcatagataccatctcccaccatatcaaggcatcatcttaggactgaaaagtagcgcaagttacttggtcattactggtaactctcataaaattcagcattttgttaatgatggctaaccactactcgactttcataacatcaagatggtctaggaaaataagaattccttgcttccggaacctttcatacagaggttccattctattattagttgcagtttggacaattgacaacactggaatgagaactggtggcatctgcttaggaggagcatgttgcctaagtcgttgtagctcctcttcttgcctctgaaatctggtttgtatttctacaaacctttgttcctaatctaacagagcttgtggtggattaacattgctgctaccacgaccccgaccccgatcgtgacctctaacttggccacgagcaggagggggattctgacctccccaataacctccagcctcaaccaaatcaccctgacttttatgattttattaggtgtccattttaaagaacaagcttgtgatttcataaatcaggtcggtcaggcggtgattgtaatcatacaatttaatgccgcataacatggatcttactcatatacttattcatacatttattacaaacatgcattctaactcatactatcttatttgaactactaaagcatattaaagcttactgaagtgtaagtcaagcttgtctttgatgatgattgtacatatatagtaggtcttcaaagaataaacttggtcgctctgataccaaattataacatcctagtagctattctaaggcacgttacaatgttttattaattattatgctaatctttggtaatcaaaggattttaacataaagtgtattaataaaaaaatttgtgataattaaacttcactaaatttgaacacttttataaatatttataatttaggatctcaaaatctagtcacaaagcatatataatgtaaagtatcaaaaattaatgtctaacaacataaccaaaaaggtgtcagtagtgtctcgaagatcataaccctccagggttagatgattgaatatgtataatctcaaccaagttcatcactcattgcttttcaaatttgcaaaaaatctcatttcttcctcaaaactaacccaaaccacctacaaaactccataacatctaattgggacaaatcaacataaaacaactgaaaattccatcatcaacctactgagcacaaaaccaccattaaagagctaaatatgagcttcaaaagctcaaacctagttcaaacttgatacaactcaccaaacagccataaaacatgcaaaacaaacttaattcaaccatatcaactcagctaaaacaacatcaaaccctaacaaccacaaatagtcaaaattgcatgttaagacctaactttttccttaaaaattcaaaaggaagagcaagaggcgagcttacctttggttgatactagaaatccttgctaaaaaccccttgatctaggtctaaaagaggggaagaaaaaaaaattggttttccttaagctttttcttagccgaacacaaagggagagaaagagagtttgatttttgttttttttttttttttattttggataagtttcaaataatacttcagcttacaattaataataaaattaagaattactaaacattccactcacaaattaataataatcatctagggtaaaatgacaatcttacccttacttaaccatgaagtaaactaaataatttagggtaaaatggttcaaaaccacaaccccggaatactctcgacattctaaatgtctaactattttgccccactaattctaagatactcaattgtatctaagtgactacaatggccaaatcgtcgcattccactctatcgcatgaaacatgaaatatttaaaagttcatatatgacataattaatacacctaaaatttaaatatatctctatagtttcgaaaataataattcaaaagtttatttctaacaataaaccctaattatctgttaattcccatgtacattatttagaaatcatttttttttcttttttcttcatcttttttgtcttcttcatctaccccgacacccccaccatagctccacccacacctcaccccccacgacgaagcctcgccgtaaaaaatggaggccactgattttccaatttcttgtttcgataagagctctctgggaattatctcaatttgaagacgagcctcgtcatgtttcgattctcaaatggaaagccgatccgacaaaattggggagcataatttttccattgccatggtcgtcattgccgcaggtgacttgttgtttatctcctctttgaaggattttcaatttctaacctatcgaccttttcagatttgaatttctattggagtctgattccttcatttgtgttggtgatttagcattgatttggttattgttcaagaaactagatgagattagattttggttttgttttcaattttattggttttggtgttctttgagtttgtaaatttggcaactttgagttcttagggcttattttgcttttaattgagtggagaagtgatttttgttttgtagggaagatagtagatacagaaaacaattttacttgttttactggttcgtatagaagccaatatatcggtggtgaaaaaccgtgttttttgcaaatgtcagttgtatataag

SEQ ID NO: 19148 - DNA, 3550 bp, Cannabis sativa
ccactcttgttagagcaatatgtactaataattaatcttagggtaaccagttaccttcttttctagtaattataggtaacaagattaaagtttctccattgagaaataattaatcttgaaaatagatattatttaggagcatttagattagagttcatcccaagttctttttcctagaatacattgaatctagaatgaataagacatgattaagattttaacaataacttgttctgaaatctatgcactatatttcatcaaatgaaagttatcagtgcaagtttacctcctcagaaggttcattagcacgcttagcttgctcacgaagtagctccagtcgacgagttctgcgatctgtctgagatgatttctttgatcttgaattcctcagcctgaaagaagaaaaaacagaatcaattagctcaacaaaataaactttcagccaccatataatggagcctggatcactggttttgatagcaaatgaaaattttacgagctggtggcttcccaaacaattcaaaatacaagctaatgaccatggtagtcttccagtcaaggtttttccttaaaaaatataaatgaaaataaacattattcatcttaaaatatattcaatactttgaaacttaaccttctattgtagcattctttccatatcctatattcaaatagaaagaagcatttaatgtgaaaggttaagttacaaagtaaaatacttcttttcattggtttgagttgcttcattctcttccgtgcaaataactggtagtgctgaaagttcacacgccaagggacttgtacaaaagaactgaaaccagaaagaaatagtataattgacccaagtcctttaaaaaatcaaaagggaaattgcagaagagtttattaacaaagttgtacttctatatgtggcaaattctttctgtatttataatcttcttgtttttcttctagactcgttgaaagtactaatgaaagggctaatcctctaaacaatcttcatgaactgacagattgatatgtttctcttcatattcaatagttgtctcaagcactatttgttcttctatcatatatacttatataaagatgtgattaacttttctctttttccatcctacttctcttacacagtttatgacaaaatcttccatctttcacccaaaaaaatggaaggggtaaacattctctgtactcacattactttgaagagcagaagcagcagtgcctcggtttactgggtctagagcaagaagttgagtcaagagaccataagaagagtcaggaaaatttctgaagacttcttcatgagtaggtttgtaatgctgaggtggcctaaaacttgttggtagtttcatttttttccagtaatcatctgacggtgcaccacaaagcttaaagatcttatgaagttgctcaacctgattgcaaaacaataaccaagacaaaatttgtaggtgttcaagaacatcttacgaaaaacttttatttgtggcttgaacagatatgattttcataaagctgatcatgaaaaataagcaagtaaacaaaagacaagaagcaaaacacagattaatttttagagagaataatgaattgatactaataacttccttacctgttgaatgttgatgattgtggaataaaaatttaagatgtttacctctgttctgcctgacatgaatggtcgtccaatgaacatctcagccaatagacatccagcactccaaaggtcaataccaactccataatccgttgagcctaacaaaagctctggagctctataccatagtgtcacaactcggcttgtaagaggatgcttttgtttaggatgaaagaaattcgcgagcccaaaatctgcaattttgagtcttccacttctatctactaacagattggaagatttaatgtcacggtgtaaaacccccacctcatgacagtgatgtagcccagaaagcaactgttgcatatagcatttgacctgtatgcaagacactaatgtcatgcctatctatgtgtttctttaacttctgaaaaaagtaacatatggatgcagctattcattatggtaaaatgtaaggagcatgaaggggaatgcaaacctgtgcctcattgagcttctgtcccgaacgggagataactttggtcaagtctgcttgcatgaaatcaaaaaccagataaagactatattgcattcttgatgtggcaagcccttcaagcttgattacattaggatgattcagcttccgtagtaccattatctctctagccatgaacttgatactctccggctctgatgtatcgaatcggaccttcttcaaagcaacaatccttctagtccttctatctcgggctttgtacacattgctgtaggttccgtggccaatctataaacaccaaaatcacctattcaaaccttatcttactacaaatttggaacaggttgatcatttttctatttttctacaaaggtagaatgcagaaaatgggagtaagaagtagggaattcaaataaatgaaaaagaaatctactattagaatgaaagttcttattcttctgttaatgctcatctatttatcttcattaaacaaagttctgatcagaattttgaccaaaaaatgtggttttgttctttctccgggacaaggagtagaattgataataaaaaagatgacacaaacatatttatacaataaaaaagataaaagaacatgtcttcaatagattgaagttcactaaatgacaaccattaaaagtaaatgaatactaaccttagcaagtttatcataggaatcagcactctttggaatcaaaccagccaaaacctctgaagctatattatctacaagccatttaggccatccattaacaagttcatctcctcctatattatgcttcttcttgttcttcctggcagttttcgtcgaattacttttgatactcccgccaatactagtctccttctcaaggtccgctccacaaccaagatcaaccacatttattttagcaccctcagtctgaaacaccacaactttatcaacctgttttgcagtaacaagagacccatcctcagctctactaccgctagcataaccatacttctctttcaacctctgaacgctgcccctgctctgtgtcggggagtcgccgtgcttcgcctgaatacaacccattttttgtagttggaaggaaaattctctgaatcgttcctgtttggcgggaagaaaagattcgatggaaactaagtagtggataaaagtgaaggaaaattgtttgggagtgaagtaatgtattcgatgaaatattagcaaggaaagtttgatgctttggcctgcactgcttggatttttgcttgagaaaggacagtcagttatcaccattttgtcattgtcattctcaacctcaatttttccgctatggattcaatgttgagcaactttctctctctagaggagactttaaaaagtagttgaattacctaactttggcgggtgtatgagaggagctaattaaatttaatacctatcaagttaaaaaaaaaaaaaaaaa

SEQ ID NO: 19149 - DNA, 2566 bp, Cannabis sativa
aaagtggagctctcgattttttttctattaaatgatgtgaggatttaatagtaattaacaaaaaaaaaaaaattgtaatttattgtaggaatcccaaggctggataagtatatatttaatatttaatataatttttttgatactgtgaaggattcgaattcgagacttctatctaatgtatgtaatggtcagacaatccacgggccacatatttaatataacttagaaccaataaaatataatgacatatatcacaaatttaaagagaaaatggatgtaggagcaagccattataatttgtaattactctcaagttacatttatggggaagaagaattgagaaacagctaaataaaagatgaaaaaggaaggaacaagttccatttatattcagattacgatctcctctaggagatgtacgtacgtaatcttttgctctataactaagatatgtatataactacgtacgtagctagccccaaatgttaaatataatatcatgtatatatttatgaactctgctgagaagacgtagaaatcttggacatctctagtggtcctcctccaatattgttagaagtaacactaacaacactaattggtctaatggtgtctgtgattggcaattgatcaatatttttggatggtgccgatggttctattggatctttgcttttgccccaaaccacagtgtagagtcccatcactatgaatatggctccaattatactgatttttcccaattcagaaggaaaaaagactaacacgttagaaaaaaaaaggcaaaaagtaggttattatagattgtagtttgtaactaatacatatatatatctatgtatacatattattatatgataatattaagaagaagaagaagtaggtaccttccaaggtggacttgttcagccaatacaatggcaccaagagcgaaggttatgatcatgcacagaggactgaatgatgtcacaaaaacggggcctctttctcttatcaccattccttgcacataatatgcaattccagagcacacaacaccctatattttccaacacttaattaattataatatttacaatatttatatatatgcatatataaaaaatttgtacgtatcaaaactttttatcttcattttgttttcttttctatttaaaatctctaacttcttaaaacgttagcatcaatattggctgtttacactatttcatctaaaactggactaaggatatgttaacttttcaaagctacgttgagatttaaaaacagaaacatttgagaacaaataagcaataaaattatagtgagaaagggtatgaaggtactgacagagtagacagcagcaagaagtctggaatcccagccaagaacccaaacatgcatgtcatgttcgaacacaaaagtgacaatgccaccttccaacacacccatcaagcatatccaggctgtgagagacagctccgccggatatagcttcaacgtaaatgattgtaaaatgaagaaggtggcccatccaccgcagctcccaacaagcatgagggttccgaggacccagtggtggtccccggactcggcgctggagctctgttgtccgctcgaggaatggctgtgtatgatgtctaggatgggacctttgtacagtgtcatcaccattgctcctgaaactgtaattgctgtccctatcacctttgcaaggctatgccactttttcacattcactgtctctaactgtataaatgtatataattaattacaaaaattactattaatattgtacctttaatacacatagaatagataataaataaaggtaaaatggaaaaaactaaggaggattactattagccacaagctgtgtatagcattaggtggcccctagcattagtataaaatggtgccttgtaaatagcttgcaatattccttagtagtgctagatactatatatatagttcgtttaagaatttcaaaagaaaatacctgaaggcgaaagccaatatgaaggtaatagcaggtaaaatgttcacaatagcggatgcaaatgttgcagaggtgtacttcattcccaaattgtacaagttttgatcaaacacgggcctgcagttgtagtcgtataattaattagttattgttattaattaaataattttgttatattacactgtaaatctacatgaaaattattgctaagcatatctggggttgataaagtaatgtgtaaatatacttaatgaaacaaattatcattacatgtataagatattaagtagcttcttagtgtgggttgttttgctgtgtgcttatagaaatatgagggtttagctaacttaattattttatatgaatataaataaattaatactgtttgaatattattttggcactataaattaattaaaaaaatagaaaattgatgtttacaatgtacgacaccagtatttataaattttagaatttcctagtccttatatgaacaaaatttgtcatacatacacatagtcgtattattatatgtcaataaaaaatgaatatattaaatggagagaatatatatagatatatatatat

SEQ ID NO: 19150 - DNA, 9496 bp, Cannabis sativa
  modified_base (27)..(27): a, c, t, g, unknown or other
  modified_base (286)..(296): a, c, t, g, unknown or other
agagctcttatttcagtaattatattngtttactaaaatatcatttataagaaactaagtattttaaggataaaatacattgaaggctagaatggtaactttgtccctagtcaatggataattcacagcgtatacgttcttggtgaatagagcattttgtgtaatcaggagtgcaatttcaaatctatagtagagccaggaagaattaataagataaagaattcacttggtaaattctaaaactacttatgattgagataatattgtcttgtagactcaattaatnnnnnnnnnnnaatcaattagaattctaaataaaatgttttgtaaattttcactaaaaaaggcttatttgagaataaaagaggatttacgatttatttattaattaattataattattaaatagatagatttagtatttatagagttagaattaaaatatgacatttttttaaaaataaaataaattttagtaaaatggcaaaattgaaatccactaaaggctcacatagagttcagcataataaagtataaatcaaaaacatttcaaatatgttggttctctctacttatcgcataaactttatacttcttataaaggcaagccctttgctttgccaatacactgcattactgattattcgttactgttttgtgaatttattaattctctcggtattttactacttgtaatttttttttgttagtaggaattgtaattttgtcgcccataatatggctaagtgggtctttactcacaatcggtttggctgtgtgcttgtctcttcgattctgaagaatatcttttgtaatgattgtgaaatttaatgacatttatgcacatttattttaaaaaataataaaaaaaagaatttgcactagagatttggtttgctttccaatcaagagtttatttgattggttcaacaacacactatacggtacttgtaaatattgagtcttccggcttccaaattcttgttgccaggccaagttcagttaagttgaacaggaagaatcttcttcgaacatggttcaaagatcattttcgacattaacatggtgtgctactatagtatatcgtggttgtgattgccattcagacttgggtgatttcctttctctctttgccaattttatgatagcctattttttcactccagtagggaaattcaagaatcaagagcaagactatatttctaaacctagaaagatttcgagcgattttctaggtcggtcttttaggtcttactacaactatttctaatttgggtgctcttaacttaagttttaaaatccaatcttagctaaagggaaatgctaaaagatatcttagaatgtctaacatcttagggcgtagtatatagctatcggtgtttagtttaaatatacgagacccgttgctcgcaccaatgtaataaccatatgtcatgtctagctcaaatattcaccttaacttagattattctcaacctaacaccaacctagacctccgtcatctttgacaccaacttgatcacctaagatgaccccatttcgaataacatcccaacacttacaccaaccttatcctcgttctgcttatgtcactgacctttgatcccaatcccaaactcgtccatatccttgcccctaacctactttgaccaaaacttatatcttcattacaaagaaacaaaataagaagagaaagaaaaggatagagaaaaatgaattatgagtaaatgttgagtgagaaaattaaaaattaaaacagcacaatatgattagtgctagatagactaacttatagaatacaaaatcaaagtttgctatatacaatagaatgaaatacaataacatctgatcaaataaaaattggcatccaatatagtgtttaccttaaccgaaatcacttcgatttctgatagagcttctgtgtaattaatacaaacggtaatgatataaactcgttgaaaaccaaagtgcaaactatttcaagtgagaactgccatcaagtgaaaaattaaataaacaatatattaaagaattcatatatgtactcaacaatgtcaacattggatggaggtaaaagtctaagaaaataatgtttgaacatgcataaacttttatatttctttaaacacaagcacttaaccacaatagctgtaacaaacgaatttctcctttcccttgtaaatcttatatgttaatgttaccaaaggaaaacaacctgcacttaaagaagctcaccattccattactcatcacgctttcttctcctttcgcagcaatgcagatttgatatacaacaagggtcatatgtcaaggcaagaatgttgaagctgtgcattggctgaactgatgagatcaacttgaatgagtttacaaacccgtgcatgttttagcacgtttcattccactcgaagttatcaagggagagacactaccacttggtcgagggctctcttctcttaagttggaatttagcatggctagttctctcaactgctgcctcttatagaagtcttgtgattcatcctgaaattaaaatatgaaagtaattatgtggaaactgacatacaaacacattgtctttaaagtcgggctgagagtatgatgcactatttgttctactttgagaatatcaagttggagaaagctggaattttttgttttgccaaagatggcagctatatattgtgtgtaattgacaacaaggagaaattttatcatacaaacaaatgagaggtcataaaatgtagcaacgaagatggtcaaaattaacaaacaacacgaataaaatcttggaccaccgaaaggtggtggtctttcaatattagacatgctgaaaaattgagacataccacaggtttgagaagttcttctatgatttcttgagcttgtctcaaccgtaattcaacgacattggctggtaattcagcttcaatcaaaacatgcaatggttcatttagatgctcatagcctggtcttcctcttaaggactcctccttttaaagacaaaaaagcttttatgttagcagagttgaatacccctaaacatgctcaaaatgatttgaaagaaataaaagcaataaataataattataaatggaacatggaaagcagaaaaacaagtgccacaatttggcatgtaaaaacataaagcagccaccattaatttcaatgtaatgggattcaatttcagtttatgtacagaaaaaatgttgtggaagattgtttgtgttttaccttgtctggatcttttattgaaccttttcctcttatataaactcgacaacctgtggatgcttccactcgcttcagggaattgcctctaggacccaaaagtcggcctacaaaattgaactatagatatagcagttttagtaccattaaaaataattgaaggatctaatcatctcatctaataatacaccaagaatttcaaaaaatgatttgtccctcaagcataagatagaacaactaaagaggtcagtgtcacatgttgcactctcggattacataacatgacttacatttgggaagttacctacaggaatatccaaccgcagtatcctcttcacagagtaggaacttgggctcggtggtgttgtttgccactccatgttcattccttgttgtccacttagtctctgtcacattattaaacaaacttcttagcatgtatgtagatagaaaacgaacagtagcagagtgaagaaatgcaaataatgatgaacatagaccagagaggagaccaattgcaggctaatccatttaaacagaggaaatctaaccctagatataaccaactactccagcgatggacatttgcagaatcaaatatcaaactaattattaaacaggttaatcggttctcaccactgacaaaatgtatcgcttggcgagctatgcctcacacctaatgaaggatgtaatctttaacatatattggatttagtagggaaccatcagaaaatctatctatacaataattgttaggtaaaaagggggaaaactgaaagaattttcttttaccttgaaaacaaaaaggaaataagatatgggatgaggatgctagagtgtcacaacaaatgttccaacacttactccaaagttcaatgaaacattggatattgacactttttacccataaaaaaataagtgaacattgagattttcaatacttacatcctgggacagcccatgccagctactaatgctcgttcccctgtaatttggcaataaatctgaagaaccaacagggctagggcttccacgttgcattctatcatagtcgttaagcccttggttggggatcatcccagaaactcgcaatatttctggcagaaaaaaaaaaaggagtcagaactgtataaacattcaatttataaacgattgcatattgagaaacaggtttacaaaaccattttccccataagcacaaaaatatttggacaacaacagagacagataaaaaatggaaatgacagaagatgaagccgttcatggcattaaagaatatgctatatacaagtcaacttcaaaatggagaaaaagggttcagtcattttatacattagattagctacaaaaatgacagcaccagacctcgaacccgagccctctacataaccccagtctgtcctcaccgctacaaggagtgcttaatgaggttaacataaagatgtttcctaatcctgatcctaatataagttgtgttggggccatttagtccccatctcttcacccaggccaaagctcttattgttatcattgagtaagcttccttttttttttcttctaattattctatctactcgatgaaaagaaaatcctcaagacattgattggcaataatattttcagtttctttatcaaacaaaatagaaaaaaattacttagcatactatgcttaataatttaactagtagtcatggctagatagtgtgtgaactcgtctcaactgagtgaaggaaatataaataaacatattagagtaatggaacctcttccaaaattgatgagcaaagcaattataacacaccaacaactaaaattaagaattatatcgaagcaattcatcaatcaatcaaatcaaattacaataataataataaaaaaaagtgatctgaatcagaaaaatcccaaccttgattcaagagtcgactacatatggggagaacttgaacaaacggaccaagcttctggcgctctgttaaaagttctgtcaagtactgactagaaaagaagagaaaccaatcaaagaaataggtattatatataaacatacatccatctacacacgtctatacactgaactgagcaaaaggaaaagaatggaaggtggggaaggaaagtgaaaaatcaacaaccatacaggatgcatcttaatcatcatggagtagagaaatcacctatcgacatcaggtggggttcttatatgtggtgaaagagctctggctgtacccgtacccgtagctgatgagaaattctgagcatataaacccgacattgaatcccgaaaattcttcaccaatataaactcaaaaacccaataaacaaatcccagtttgtgaatcgggagagagctcaaaagggtcagaacccaattgaaaaaatcatatataaccaaaagaaagcttgtttctttctctctctatcttattcttttggcgttgggttcaatagtaatggtggggttgtaaaagggtaagaattttgatgggttttctgttctagtgggctagctttttatgaaattaaaactagtataaacacagttctgtatatcatgggataatgagttttacgaagatgatgaagaaggaagagaaggagaagacgacgacccagagaccatacgaaagagaaggaaggaaagaaagaaagaagggactcggactcttttgttgttgctgtaagattttagattgacacctgacactgacagcaacagcgccaacgtataattaaaaaaattaacaacaattaattaattattaaaaaaataattaaaacttttcaaagagaccattgctaagataccttaagatgctactcccatttttctttattaaataagtgtaaagtgtatagttgtagaagttatttcacctatttttttaaaaaaattataataatttttagctaatttctccagttctgttttagaagcagtaatttgttaaaaaattaataaatatttattataatattataatggaggagtgttatagttaaattctagttagaaactcttattaatctccacgctcgaaaacacatattgttggtataattttttttcaaatattttttcacggggtgtttgttatgcttataacatcatttttgtaaatttttaaaaaatttcgaaaatatgtttaaaatttttgaaggcacgtgataaattggaatatcatatactgtaactataacgaataccactatgaaaaaaaaatatttcgacatttaatttcagacgtggagattgattaagaagttgtaattagcattcttctactataatgtaaacttccataaaaaaaattaaattataatttgtcaaaaatgatgataaaaattatattaatattatttatgaataactatttttgatcctagtaagtagtaactaaactatatattgttacacacaaataaaatgtttaatatttcactttctaaaaaaggtttcaagttttttaaggtgtgttgttcagaaaaagttttttaaggtgtgaaaaaaaaaataataaaagcagaacagtacgtacagaaaacagcagaagattattttatttatatatatatttatttatttaaggggtaaaagagaaaaaagaaaaaggaaaatgagatgagatgaatagtgaataatggggtagggtttagaggtgggacccaaattgtatatggccagatagtcggtggaggtggcaccagatcaaccacgtgaatgtgaaaacacgctcttccaaaagggctgaggaggagacttcaattgtccttttttgaatattcgcattattgaaggtgaaccaccattgcttattacacttatacttacttactcactgtactatcatactacgtcgttttgtatcctctaagtctaccaccacaacaactaccacgatctataatctactactacacttatctataattttcattacgtaatttcttttctttttttcaactgtacgtacggtccattcccatctgctacacttcatatctatttcacatctaattttttttctactttctagtagtagttatttagagcattctcatcagatttctgttatattttttaaaatatattataaaaattttaatttagttttaattgagattatatttttttttaaagtaaatatcattttaaatcttgtattttataaaaataattgattgaaccatatattttattaattgacaaaataaatcttatattttttaaatagtacaaagaatcttaaaataatattttgttaaaataaaacttaataataattcaatacgataaaattagttatattttctacatttgttcgtgccaatagcaatcccaataaatgagctaaaatagctcaatctttaaattataaaaaaaatttacaaatttgagcttttaagtaaacgttaactattttacatattttttagttcaataaatagtgcttaaatgtagagataactattcattgagctaaatatattttaatatcattttctttaatttttctatatatgtgtaatattatatgaattattaatataaaatgaataaaatatattaaaaatataatatttaaatgatataaagaagctgatttatgatataatgtaaaagtttaaggtaaaataaataaagtggagttttggtgatgtattttaaaaagatagaatagaaaaactattgagagtgctctaaaaattatcgtcaattatattaaaaaaaattgtcaaaaattaaactcatgtcgtatttaacaaaatatgagtaacttttacatatggttatttaaatatttaaaatatatattttttattttgaatatgtgatttataattttctaaaaatttaaaataccaaaataaataaagatatttttcaatgaaatctaagtctcgcaagtaatacttacctaattaaattgataataatgaaattaagtcttataaatttaaataaacaatcaatcgactttgaacttgttttataaatggaggcaagtgggactgacttattacatactaatagtccagtattaattatttaaaaacactacatcactctcattaattgattaataatcgcagtaacagaatcagttaataacaacgctgcaatattctgttataataatctgaattcatttattattactataattcatattaatttttgaatggttgacgaaatgaaattatgaaataactcaacaaacttttttattataaggaccattcagtttacctgatgtgatgacacactgattattcactgaactaatttcctagatattatttatttggttctgccctaatcactaattttcttttaattatgatatttaaagatcaagtactattcagttacaactattatacactacaaaaatttgaaatttttaataataattttttagtcacaacataataaatgtgatttttagtaacaaaaaaatattacttgtgactaaaacatagtatttagttacaaattatcacaacaagtattgtgactaaataatacatttagtcacaaaatacctttagtcacggagcttttagtcataacatatgaataataatttatattaacgattttttttttacttttagtcacaaattttgttgtgactatcagtaagattttttgtattaacatgtatgggctaagaactctttggtataacgctaaactggcacgaacacaaaagatataaacaaaatgaggtacggaaaaaaatacacgaggcaaaaaaaaaaaaatataagtttgaatactatgaaacacgatactaaaaaaagtatgacccaatatgaaaatatgaatttacaagcaatacgataagctcaaaaattagtagtgtaaaagttaaaaccttataaataacaatcataatactaaaatataacactttctatcttaatttatcaaaaacaaaatattattatatattaattttttaatttgaatatttattgctaaatatttaaaagggaattaaccatgtacggtaattaatttactttaaaaaaaaaattatgtttttttaattttgattgctacatggattgtgatataaattgtaaattaagttggaatgctgtatgaattacgattatagggcatttatgaaaaacacctcatatttgtaatttatacaaattttatagtataaatgaaaaaaaaaaaaactttaaaatgtattaatgaacaaactctatatttaaattctaataattgtagtaattattttataaattgtct

SEQ ID NO: 19151 - DNA, 3083 bp, Cannabis sativa
ttatcagtttttgtatgcaagagacttttttgtctgatttttttcatgtaattatagttatttaaaacattttgcaaacatataaaaaatttagaaaaattgaacgcactgaaaacaaggttcaaactatttattgcaagtgtgactcttttattttatatgcacgtgaaatagattgtttgaacattgcaatctatattgtaaattatttcaaatttctcaaaattttctaaaatgttttaaacaattctagtacacaactataaaaaaaattagactattttaattgctcaaacagataagaatgaatcagtgcatattataaaggttcattattatatttttgaaataatataactgcaattctttcaaatcttagataaatatatctcaattatatatattttcttttatttattgtatagacactagatggataaggtctaaaagatgataagaatattatttttaggcccaagagatggaaagtgacattactcaaagaaagatgaagaagatgagaatggtccaactccaactaaatcataaatcaatttcatgtgtcatttcattccctttgaaaaataaaaatacatttatattatttgcttgcttgcacattacttaacaaagaattgttcaaactatattcaatcaatccaacacaaaaagtttcctcacaaaaaaaaaatgcaattacaaattacttattcacctttcaaataaatctgactcaattcttagtactagaaattcactaaatatgataagaacatcaattagtgtcatgctttgttagcacctctcattaaattggtgttgttcttgtatttaattgggattgagattggcctaaaactgatttgttattttctttcaccatctctccattcccatccgatgtttttttcgggtaatcttgtgaattattttcgtcgggaggaacaagcccttgcaagaatctatgtatcatctcataactcgtaaaggttatgatggcggacggggttgttctcaatagattggtagcgcagcctcggtagaagccgggaataccttctttcctaaacaccttcttaacacaatctataacccctgcatatcgcacctcagtatttcgggaatgcccttgttcttgcaacctcgagcgcacaaccttttggcaccgtagaaaaacaaaacataagaacattgtttgtaaagaaaattctcagttcgaagagaggggttatgaccgaacatacctcgtgagggtatgtcaataccgatgcaactactttcgatattgatgaggcaattgcaaagctgccactgtttagcttatcaacagttgtattatctgagaattttcatatttaaaatcagcaagctttagaaaacaaacgttaatttagtagaatcataaacataattactttttttagctatgtaatacttgatctgctcgtatgctggaaactgaatcgcgacatggcttactcccaccaatgagggcaggactccactgttttcaaaccaataagatatagtgtcatgatttcttagaagagaaaaattgaaaaggaacataactgttacaatcattagctcatataaaagttcccatcaaagaaatacaagaactaacctatataatccccgaaagccctcctcgtgtgcaatcctggttaaagcggaaaatatgcttttgtatggaattacatcaggcctcattccctgtgtctatatgaaaatgaaaaagaaaaataaatgtacagagtgacataaaattttatatctgaatcgattagttaagcacgaaaccaagaatctgtagacactgttgttatagcaatgaaattgagctaacagtaataataccgaaaagggcaacttttggacgaggtatgtatgcaaatcaattagtaatccctgtctcttttttcatacaccacacataaagattatgctttgcctaacatcatttactattttgtatatgaaaatacttggaatgaacaggcctataatctggtaatggcataccaaacataatacgatcaatcgagaaaagaaagaaattggcattctctgtataatgtatgccgatgaatcaggttaaaaatataagactgcaaaacttacttgaagcctagtctttacaacccacaatggatttgttgaaatagctgtggcggcccctgcaccagcagccgctaccatgtttgcgcctattgtgaggtgatggctgtcgtctgctacagctacaaacacaatagtttgttaaaagaaataaagccaacagacccaacaaaggcagttataaacggctcaaaaccgagacaaaagatcaaacgagtaaataacaccattaagaaaccaaccatgtgaatgaagaaggtgctttagtcgctcatatacagtgaaataaacctgcatatgaattaaaagaaaaaaatttgtcaatgggaatatacaatgcgctaatacgaaaggatgaaacaataaaaacaaatgatatcagaaagaaaaagtttcagaaaaacattctattgaatgtgaattttcaatattttccacgcaacatgataaaaatggttttactataaaatcaaggaggaaaaacaaaactcaccgcccaattcggaagtaaggctagtattgttggtgaaaggccgcgatacaacccccgcaaaccttcagtttttattatgttctctaaactggagacaataatactacctgtgcaaaaaccaaaacagaagaagaaacattggtaactcactatgaatttaacaataagcaactaacactgctaacttgacttcaaattatgctagtatctaccacatatgtccaagttcaataactaaaatctaagcttataagatggtattcaaatatagtaatccttaacacaatcataaacataattctaataggtccattcctcttggaaagttgtatgtagcaaaactaatttgaaccatacaatatcggttttcgatgattcgaaaagagccatgtattgtatcattaacacagtactgaatacagtcatacacaaagcaatccattgtatgaacagattatattcaaaatta

SEQ ID NO: 19152 - DNA, 3370 bp, Cannabis sativa
cctatttttggcgccaatggtatgcattttgtttgttcttatacaaaattaaatattctgtagttattatttttttgaaggaattaataattctgttaagagatttccaagttttgccgagtatgaaaagagttcttgtgttcttccatacaatcactttcattccagatagtacccactgttttaaaagcagtgtcacattcactgtgtataatgttctggtgcgcatacaatgtaggagtgtttcttcctttcttaggccaactccaacggaacactaaaatgtcaaatttgttgagatttcacactaaatttattctaaccacactctaaaacctatccaatatataacattgtctatagtgtcccactattgtgacactataggctacaccaaatctttttttattagtgtttatatttaaataaatatatttataaataaacattttgtatgtgtctatttataatttaaataaaataatataataataaaaaattatagttttagtataatttttagtgttgtaattggaatagaaaagatttagtattagaattctatcatttttgtattgatttcacaccaaatttatacatctagaaatgatgtaatattgggtagtgagatcaatgaatgggtaattttatcttaaaattccattccatttcttgattgtattgtaagctacatagctagagttatgcttagtttctaaagaattcttctgctatatgaaaagatatatgaactaggttggaactgggacagtttagaactactagcgcaggggtctctggctggccatcttctagagtgtggttgtcaacttactgggggatacttcatgcatccaggtgacttgtgaactcagtttaatcaacctaaaaatatggggtatttgaaggcaaaaacgtaacttcttatataaatataatatatatggtcatagtgctttgttttttttcttttgtttaggggacaaacgacgggacatgtctttgtctcaactccttgatttgtcacatccttatgctgaaataagttctgatggaagagtatgtgtggcaaaggcagaacatagtggtggggtcttaaatttcagcacttgtgctcaacaacttctatacgaaattggggatcccagctcttatgtcacccctgatgtggtaagtttgtgtacatatagctctattccgaatgaaataggagaacaataattgacaggtatggttgtctgtttgtccttgaatgcagattattgatcttcaaaatgtttcattctctcccttatctagttgcaaggttctttgtgctggagcagaatcctctgctggtttggttcctgaaaagctcctgcagttgattccaaaggtgaatatttttaaatttttcataagcagtaaatggaggaggatcattctctccatgtaccatgcttgtgcttaaaagttttatttggagctcgggtgcatagttaatcactaaagactaaagagagcttatctttctcttgctaccaatgaaatttgatttttaagcctatacaatgatggtagccacccttgttatttctcattgcttgctttggtcaaagaccgctctaagctccaacagaatatcctttggtggtactaatatcctatggtctttgattcttggttaatttagcatgaataccgtatcttgtgtatgtggttgcatgtttagaatgtttctgtgcattttttatttaagtcatttaaagtgagcgattgtttttattttttttacaatcttagccagcgtcatattccataaggttagaggagttgaaattttatcagtgtttttgccttcactatttgagcatagtgactagtgatcttgttttttctttacaagattaaccatattttgactctattggaaaccatttttgtgttccttggtctgtggttatactaatgtgctgtggttatactggtgtcataattttcaggactgtggttggaaaggatggggtgagatatcttatggaggatatgagtgtgttaaacgtgcagaggctgcagagtttctggtagatatgtttcaagattttgccactgctatttatgtatatgatagcctattcaaatgagggaagaaaaactgaattttgaagcgtttgttatagtcttaatattcccttgaagatacttattaaagcctcgaagtcataattgatttactttaatttttgatgatttattaggtcagatcttggttagaagaaatattgcctggcatcagcagttctgtattttcttatataattggcttagatagtctgaaagcaactagcattgatgatgagacttcatctttagcggctcgtaatgatgtaagattgcgtatggatggattatttgagctgaaagaacatgctatcctatttactagagagtttacagcattatatacgaatggaccagctgggggtggtggtatcaggtcaagtcaagttcttatcagcttctgaacctatttcccaagttactttgaactttgacatttcttgatgattaattatacttagattcatctctagtactagtagcaataaatcttggttctttattttcataacaattggtttcctgtgctaaaaagcgaatgagaagtttcttgaactcacatatgttgctcttgacgctcatgaagttagttacttactgatcagtgtccttgtaatatcaaatcctaaagacatatttaatagggattgacctttttgtattcaccttatattatgagatttgtattccctgatatctgattgatcattttccactgactatttttatatttgcttctcattacagtgttggacacaagagagaggtcattcttgaaaaacaattggtaatactctctctaccatatatcatatatcatatgtcattctctcagtttttaaatttagtacttgatatctcctttttccacaccacaatatgaacttccgagttgtgtttctctgtttccgatcattcaggtcgatcgtgaacatgtttcttggaggacatcagtaaagcgcactgtagaaatgaaatcaaatcatttaaaagttagctgtgaaaaccatataaaaactcctgtttttcatggatccatagcagatgtttcactttctgaaagtgacatctctcctgctccctcaggccaaaaaattccactctatgacatagcacatagcagggccggagacaaagggaatgacttgaacttttccattatcccacatttcccttctgatattgagagattgaagttaatcataactgctgagtgggttaagggtgtagtctcggctctccaaaactacccttcttatctaaatttgga

SEQ ID NO: 19153 - DNA, 2885 bp, Cannabis sativa
ttttttttctggtgtaactctatttagttataacatcccaattagaatataatttacttagtcccaaatgtattcttagatagagattctactgtaatggttgtttcagcgagtgagatatttctatatttagatgaataatttatattattatgcatgagaagtattttatattattaaataaaaagtgaactaaggcttaggcaatatgtaaggtgcatgtgtgttagggtcttgatatccaatagtgagttatgttattgtgcattgtatatttaatagcttcaatcaaaaaataaataaaaagtgttttttttaaaaaaaaaaataataaaataataagtgtatattgttaattatatttttttttactcaattaatcaagatacttaaataatttgtatgtataaaatatgtattatatttattttcaaatatatttatgtattatggtttaacaaaaatatatataattatgtattaaatatgatagctcgataatttaaataaaataccttaatataattttaaaagaattatttaatttgtggtcataggcctaatttgtggtaaatacaatgtcccaagttcaaattctttctaaaatcaataaaattatttaatttacaattcttgtattttttagtgacgtgacaaaatgtattgttactaagatttgttggtatttttaaaatgaatttaaaattttaagtatatttgaaaaaagaggtgaagtccaatatgggctcaactgataatcaatgctggcaattgaagaggccaatattaacgtgcatttttctttcaaggcattcaaaaatgttgaccatcataataaataaatggacataaatttatctatttccaaaggatattaaatatgttgatgaatttggtcttaatttatagagaaattctaaagggtattcatagtgcaattaatattgaatttcttttttttttttttttaatttaataaatattatagagatttactaactaattataagaccacatagaaatcctaggcacttccaatggtaggcaacacaacactcataagtgacatctttttttataaaaattactctaatagtgagcaactttaaaaatttctcgttatgatcccacaaaccactttttaattaaattttataattatatcttctctaaaaaattgattggtgataaaataattttttaaaataaataatgctacatgatcattgcttattttaataatgttcataaaattagtttgaaatattgatcaaaatgcacatgtgccacaaataccactctatgggcaagtccatttgagatgctcaaacaatgctctaatctatattccattgtttttctttttcccaacttcctagtatataggagaagagtttttttttgtcctttttttagagagaaagtataaagcaaaagagttaggaaattggttatataccattgaaaatatatttttcaaaaatatcactatataccatttttttggttagataataaaaagagaggaaattacactctatactctttttatgttgtcctattttatttttattctcttttttaaagtctattatttttacctatttttttaaacattgtaccaattttgcccctgtcactttaagatactctctacgtgactctcttatgtcaggctatattgagtacaatacaaataaaaataggtatgtttcaattaaatataaaattagaggtaaatttgatcaattgattaataaaagtggtattttttaacttaccccatttcaatatgataaatattatggggaagttgttatatagcttttaatgcatttcaatattaaattttaaatattttcatttaataaataatataagtaattaaatttcatctatttttaaaatttttgaatgattaaaataattaattgtacgattatttaagtcatatttttaatataataaattattcagaattttgttgtataattactataatgaagggaaattaacttattataatttcttcatatacctaaaataaaaaatacttttataggaacgacaaaaatgttgcctttacctaagaattttcttgaaagaaaaatatttgagaattaaatgctaataatggcagatctagaaaaaaatagaagatacaaaagaaatcaaatgcaaaaatattaaatttgcaactacaaagttgaccattgatgcatttaaaggaattcaacaagaagaacttatattatacaatatatatttaacactatttattatattatcttcttggtaatggtactaaaaatatataaaattattagaataatatactataaaataaacaagtagaatccagtgatggaacattcatgtacaagtaaacaatgaccaatgaacatgtagttttacttgtattcattttataattactaggcaaatttgactttgtttgttatgacgatgttaattaaatgagtagtgttattggctttgctaatgtaatttttgtatgcttatcaatatttaattatactaataataataatataataaggaacgataaaattaaatatgcaaattatacatgtatctcaaattataaacgcataaaatgaaagttttttttggaagacataaaaaacaaagttattaaagacatgaaccaagatactattggtaaaatgaatgtaaaattgataattattagtttctcatcatagaatttgataaacaattttggttgatggcatgatgagactacttaaacttatattatatgttgattaatttataattttaaaataacttttataatatttgaattattaaaattatttagactaataaaaacacgtcacatgtatacatgtgtatacact

SEQ ID NO: 19154 - DNA, 3556 bp, Cannabis sativa
  modified_base (44)..(44): a, c, t, g, unknown or other
cgagagaaacactacatgtcttcccatatatatatatatatatntatatatatgtgtgtgtgtgttttgactatgctattatctctttaggtttcctgcgttgtgagtatgttatatattcacaactcaaattgtttcacaacatatatatctatgtatgtatatatgttgtgactatatgttatatgctgttaaggtttcccgtgttgactaaatccatgtttattatgtgatgtgtcattattttaaatggtgagagagccttttgcttgtttacatcattccagtcgcacacttatctcgcatatctattatgagttcttatgtattttattctattgttacaatttcataaactccaattgtttcaaaacacgacatccttactcaaattagtaatgccctttttcctattcttttttgagactgcacttcatctgatagcaagattaatcaagatccttagtgaattgcttcgaaacaaaatttataattaggtacgtaccatgaaatatatagcaaaacacgcgaaccatgtaacagaaaattatgttgtgttctttacttcatgcttacttaattatatctgaatatttcaagtacttggtacgtaatctcatcttaatataatcatccaagtaatggaaagaaaaaaaaaaaaaaaaaaactcaacttcaaaagagatgtaaataacaacaacacaataatatcaaaagcaaaaacaaagtagccaaagcactggttggtgtagtacgtatagctaaaagaaggccatggtgatgataatgatattaaacgttctccgttgaagaatggagaagtggctgagtgagagaggtcttgatatgggcgggtgtcctgctgctggtgtgctccggtgtactgccttggatcgcagccttttcaagtgcaataaacttcctttcttcacttttaccccacagcaccaagtatagtcccactatgatcagtactgccccaatgatcctatacatataaattatatatatacacaaaatatactttaattacaataacataaatgaagccaaaacattatatatccttgtatatatatatggagccacttagtacttaccctcctaagtagaactcctcgcctaaggcaagggaggccatgatagcgacaactagggtctgaacaggttgatacacagccacgaacacagggcctcctctgtcgatacaccatatctgtacagcgaacgcaatccctgatgccaccactccctgcaaatattaatccaataaattaacaacaagttcttttgtcatttgattatacataaagagttaaaactaaagatttaatgaacataaacaaaaaggttaaattataatattaattgtaggtaccaactctctatgtatcaactagatatgtcctactactaataaactggttagttttactgttaaagtgaaacccccttttgtttatgacctggctatctgctgataataacaaagttagcagaccacatcattacacacatatatatagtttatactttttcagatctaatattcattaggtattataaagtcttaaattgacatttttgagataattagtaattatagttaatgttttcctttaggtaaaagctgattctgataaagagcaacactccactcatcatggctttactctctcatcatattattatttatacaagtataaaagtaggttttcttaattattagtcaaattgacccgtgcttcagctggagtactagtaattataaataataataagtaaaatagtattattattattattattaccgcgtagaagatggtgaaaacttctccaccagagtgaaaaatccaggcctgagcgtctctctcaacaatggcagcaataatcacgaactgaataagaccataaaaacaagtccaagacgtaactgagagacgagctgggtacttcttcaaaacaggggcttgcaaaacaagccaacctgaccacgaaaggcagtgaccaataaggtaaacgcaacccaaggtccagctcttgccgttcgcaccaatatcaccacctccaacaactggaacagagtagtgttgtagtaatggtggagatgggctgtagattgttggacccttgtataatgttatgactgaggctcccgccacgcagaaaatggttcctatcacctttgatataccatcttttctgtttagtctcacttgttcaatactgcataaagttgggatttttagatgtgattaaaaaaagcatatacaactattgtgttaaaaagggtatttctacaaaccggagtagaactgccataagaaaagttatggccgggactgagttttgaattgctgaagcaaaggttggtgatgtgttttctaaacccagtaagtaaaatccctggtttgctgttattctgtaagagaagagaatatttattattatatatatatttaactcaatcaagaatattctcaaacagttgttgatctttttatatatgtagtgtatcatccgtacccgataagagcgaggaagaaaaactgtatagtaaaatttaggttcatggcaggcctctccttcctgagacaattaggaaataaaaaaattactacaccatttggaagaaaatgagattaaagatttatatatataatgagtgatttacttctctaagaaataggcaaatggaaggagcaaaagcagggcaatgatgttcctgtaaactgggaagacgagcttactaatgcccatattaagggcagctcttgaaacaacatgaaacccagcataaccaaactgcaaggccaacatggctccatgcagctggagcctttccggcaccgaacaccacattctccttgaacctaaatcagccatgaggctcagtatgaacacaaccaataataataatattaactatataacatacacttcttaattattatctgatattaatcgagagagaagggaagtgaagtgaagtgatgatgaaaaactctagtagagtagggtggtataaatacaatgagcgatagcgagagtgtgcttaggtatgaccccacaaagggtcctaaaaagacgttatgtcaactgttgctaagcttcagatgttttcggttgtctcccacattctctctatataaatatatatccttggctgacaaggtatatgcaggccccactatcccactatatacaaccccagtgaagaaaattagaatcaaaaattttggtggtaaacatatcttgcacaaatcaaaactgtgccagtgcctggggttgttaattagaggtttctctaattcttttttttcttttggttatttctctacactcaaagtttggtcactctattatcagaactatagcccaataaagtgagaaaaatgctaagcaatagcgaaaataacataaacaaccttttaacaacttacaaggcaccatatagtgcattaattctctcacacatgtcatcttattatcagaacgtactacagcgaatagactaaagaaaaaaaaacatgaagaaaaatatttttcttgtttt

SEQ ID NO: 19155 - DNA, 4814 bp, Cannabis sativa
aaggtgttttttctgcaactttgatgtagaaacagtgcagcacatctttttcaaatgccccttctctttgggctatttgaagaagattaaagaatggctgccaactcccttcacagaattgtaagttggattcgaaaagccaagattagcaagttaaaaaagtgatttttgctactgtcattgcagctcttgtatacaatatttggcatgctataaatgatattttgagggagaactcgacaacatgtatagatagcctagttagaaaagtaaaaaatgtttctaaaaaaagaattacatgtacatggccaaagaaagcaaccattagtgatactgaatggttagacaccttataaagtttatttttgtataggctctcctattcatggagaatgttgtttgtttgtacaaagagctttgagtaatgaaacacacttgattcattaaaaaagatagcttctattcttctatattcaatgtcgcgattgatattttaatcttatttagatgatcactaaattacgttttactttaatctaatttcatcttaggattactattcacctaatagtctagggttctaattagtgtttgtgataaattgcaatttctaatattatcaaagatatttttaattgtgatgaagaatataacctaaattaaatgaattatatgcttcattactttattacctagattaatctatctccattgaacttgaagctttatctaagttaaataaattgcatagttcgtggatttattgcttatgtaaaagagttaattattgagcgtttcactttgattacatgcaatagggagattaggataatcgactccttcaacgttatctgtgggattaagaatttgattggaaatttgaaataacattcattattaggaattaagaatgattattgagaatgtagattaatcttcaaccatttcttgaatattataatatctcattctatttgtttttttttttaatttattcatgttatttaatcttcataattaaaacgtccctttttaattcttgttacaataataaattgataatagtccttgtgagatcgacctgtatttaccgttatactgaagtaattagtaatataaaaataaaaattagtaattttgttgtggtaaaaaacacgcatcagatacctatgcgaatccaaattcaggaagtaactgtcaaatcccccttggtctcttagagacatctggaataggctaggggtgcgaatttcacggaagggtgctttacctcttccaaaagtactcactccagaagtttttttgtctggatacgcaaccaaaaacctcgcctatatctcttcctcttcggcgagggaatccagatggtggctcaccaatgcagctggaagaagttcctcatcctttgctaccttattgatcagaacagacaagtccaaggcaatttgttctttgagatcattgggagcctggcattggcccctaccgcttacgccatggatactttgaaaacttgcaatcaagacatgttggcgcaacaactctgtggtaaccaaatcctttaccttcagtttatcttcaaaaaagtctagtagagggatattcgtcgcttcagttcgtccgacaacaaagacctgaggacaggttctacaagacatgaatcaaagtcaggtacaagctgggactacaactttaaacttttaggacaaattacaaaaagatgagtttcgtacctgtgagaagctagaaaggtgcaattcttgttgtcacgcaaaactgggcaaagtatgttctcaacagaaggtggggtccacatgaaatatgtgaccaactccatgtcccaaaaccttccacactacgagatggagattcctcgatgatggacatcctatgccacatgagtttgggaatattataaacgctgtcttcattggaatacgccttcaacaagccataattcctcaactaattgggtcgttccatctcctagacagagttattaagtgccaaaggggacgaagaggtagctttggctttacctttgcctttgcccttagctttcctcttagcctggataccttctggagacatctctcctggggctgagtcttcaagatcccaacacgcaggagatgcgttcgctgaagacatcccctggacctcttcaaggtccacgacttccacatgaaagtcatcattcaaactaaacactaaaaagtgagaagaaaagagaaaacccaagcagttaatactccatatctaaatgacgaatatggtatcaaggagagcctctctcaaacttcttggagaggtccccaccagactcgtcacttaaaaggacaccctcacgaagaaatctattatggtgacgaattgggaacccaacaatgcaaaagaagcaaaattccaaatttttccttcaaaaaaaaaggataaaaagagaatgggtttttcccaaaaaatttcctaaaacaaaagatccctaaccaaaacatctaaaccaattttttttccaaacaaacacagtaaacaaagggaaaaaccctcggcattaccctaattctagagattttcccccaaggtccttgcgaatccattttacacatagtaaccctaatattcagaactaaatcctacgcatgcaaaggtgtatatttctacaaattcgagaccacatttctaaattaaagcaagaaataacagttttggtagaagaaatacttacttgcagaaggtttaatgaagaatcactagttacttatggttgtttgaggtcctacgggctgcttgatggtttggccatgacttgctttaatggagaactcgtcgtctgtatgagcatcggttgttggaatttggtgacaagattggaaaaagattcttgccctaaatgcaaggttagacggtcgcgacctacgcaaaatcaccaaaagttagcaaaaggaaaaatgaggtctttggttcgagaagcttataaagaagatgagtattcttctaggtcaaagatttttggagatgttctgtaggctaaggcttgcaatttgaaatgagaagggaaatgagattttttgccaagttttccatttatatgggtggcaacgacgtagcatattttgaattggacggggaagatcttaccgattaaaaactactccatccaacggttggggactcgaagagtttgcatttaatgcaccttaggagagagaatgaggcattcattacttatcgtttcatggcaacaaacttaatgcgccataaaccagccatcttttcaaatcctgccgccattcactttccacaataaacgcacctaggcctggcgcgtaagtcctacagacccgcataatggacaccacgattcaacaaaataacagttgtacaacgagaaatgttaacccttcagttgtcctataacatggaagactgcatccgcatttcaagatgtttcttgcgtatcatagtaataactcaagcatccgaggggaggttgtaagctcccaccactcgagagtcctaagagcttaggggtaaatgttattcgtgttctcggatgcctaatacgtggcaatcacggaagggtgccactctggacattccatgattagtacataattacaacttaaagatgcgaaagagactattatattttggaagccgatcaaatgttcttagtgttggagagtaaggatagagattcaggagtcttactatcctttcgcgactggaaggaatcagagttacctgatgcttcaagtatttcaaaaaggtaatggactagtgtgaactgggaaggccttggctcgttgatcctggagttcattcacaagcatcatatttggaacccgaagcgatggttatccaccctctgacacagaatcagatcctatcccctacgtcagaccatggtagtgcacttatgtgcctttgaagctcccttttttgtctgacgacttgtctaggcaataacttttcaaggtgaaacttttgagtgacacatgtcctcgtctacgtggaatccttcactgtagtcgtgcaccacacgatggggaggtttattaccaacagacggtcaaatcttcatgttgtagtacttgcccttacaacatgctttagtacaaaaccctaggtgggtaaagggaatgcccttacccacataagtgcctataaataccctaaatttttaggaaaaaggggttaagcacatttgctctactcgaagctctactaaaattcctataagcttttttcttctttaagataaatattaggaatacaaagctagggttttactgtagacatatattgtattaatcaaacacttgcatgtgaagccaataaaactgactcgtggactaggaatagttaacacccgaatcacgtaaaaatcatctattcattatttattgttttataaacttttgaggctcttaatatttagttttcgaaaatctcaataaacatataaattttcttttaaatgggtataatatgcatgtgtgggcgggttggtagtggctgatggcaggttggtgatcgttcatcgttgatgattatcgtcataagtagccgaaaggaggaagttccctgtgtgggtctgggtgaggacgagagttactttgtttaagtaaataagaagaagatgatacaattagagtttattttatttaatttcatttgagggtataaaggataataacaaaagtttattaaaaaaatgtcatttaactaaatagttttgagagtaggccacaatgcaaatttaactataaaattaggcccttttgcgagacacacaaaaaaaaaaaaaaaaa

SEQ ID NO: 19156 - DNA, 4830 bp, Cannabis sativa
ttcatgattgtaaatttttagtggtctacttttatagactactctagtgcgtcctagttatttaagattacctgtaaatttttagtggtgtgtttcggtagattttttatttgtttcggcattttcagtccaattattccaccgtaatagttatttaagattacttgtaaattttcagtagatatttcggtagactcttaatttgtttcaccatttaagagagtattttagttcaatttcttcgttttaaatatttagaatcacctgtaaattttgaccaattttttccataatttttatattggttaaaaagagttttagattattaaagattgtttctttatgaacttgttttttcaggtatatgaacaatcaatttcagctgtttgtcaacttgattggccaaaagaaagacttttgattcaagttttagatgattctgatgatgaaagtatacaatggttaattaaggctgaagttactaagtggagccaaaagggtgttaatataatttataggcatcgtttggttagaactggttacaaagctgggaatcttaagtctgcaatgaattgtgattatgttaaagattatgaatttgttgctatctttgatgctgattttcaacccaacccggattttctcaagctgacagttccacattttaaggtacagttataagtttagctgttcttttatgtttccttaactaactttaactgttacttatgatgataattttgataataggataatcctgaattggggttagttcaagctagatggacttttgtgaacaaagatgagaacttgttaactcgccttcaaaacatcaacttgtgtttccatttcgaggttgaacaacaggttaatggggtgtttcttaatttcttcggttttaatggtaccgccggtgtttggagaatcaaagcactcgaggaatcgggaggttggcttgaacgaacaaccgttgaagatatggatatagctgttcgcgctcatctcaacggttggaaattcatatttgtcaatgatgtaaaggtagctccttttttcttttctttgtaagctattttagggttcgagttgttatagtttcctggtctcgaaatattgtagggttaggcgaggattctagtttcagatagttcgattacaataacaaaactcggtttttttatttctaggttctttgtgaacttcctgaatcctatgaagcttacaaaaagcagcaacaccgatggcattctggcccgatgcatctttttcgattatgtctcccggctatcattacctcaaaggtagttcaaacaaacacaaacatccatttttttaccttacttttgaattctattcatttgctcattgttgattttatatttcagataacatttttcaagaaggccaacttaatacttctattctttctattaagaaagttgattctcccattctattcattcacattgttttgcataattctccccttaaccatgtttgtccccgaagccgagctacctttatgggtaatttgttatgtcccggttttcatgtcattcctaaacattctcccatccccgggatcatttccctttatcgtcccataccttctcttcgaaaacacaatgtccgtgaccaaattcaatgccatgatatccggattgttcaaactaggtagctcgtacgaatgggtcgtcaccaaaaaagccggtaggtcatcagaatccgaccttttagccgtggaggagcgagaatcaaaagcgatgaatcatcacactcaactccttagaggaacttctgatagtggtctctccgaactaaacaaattaaaagggcaccaagaggctactcccccgaaacctcctacaaaaaagacgaacaagatcttcaaaaaggagctaactttggctttcttactactcaccgccgcctttagaagccttctttcggctcaaggagtacatttctatttcttgcttttccaaggggtgacatttctcttggtgggtcttgatctaattggtgaacaaatgagctagttagtagtgaagttaagctaagttaaagctcaaaaaataaaggaaggagaataagctaagctattcaaggtgtcaaaaatacaggtaaaaaaaaaccaaaaaaaaaaaaaacatacaaaactacctaaaatcaaaataagttagttattattctcaattaaatttctcttaaatagattcttttctttctttgtccttgtttgcaattaatttttgtcttagagatattagcaagtaaagtgtttaagttagcttcatcattcatattcctatataccatctttctttattttttagtttatttggttttggtggttcttttaattttcaagtgagagaaaagtgaaagaaaaaaaaaggggtaattgttgattgttttaatttaaatgtaataacttgtaatctttggtttattattgatatatagctcaaagttgtatttcaataccaaataggcttgtttatttggagatatatttaggtgaacattacattgttatgaattctaagatttttacacatgtataaaactagttgtatatcttgcatttgttcaaatttttactatacatatccaaagtttcactatgtatttacatatatagggaatgaattttgcccctttattctcaaagaacaaaaccattctaaactttgtttgatgtactctaaactcggtttgatgtactaattcaattttgttatttttgcgacggatgaaatccatttccattttgatgtattctaaattcgattggatgtactttggttttttactgttagatcaattcaatcttaatctaatagttgtatatgtttgtttgacacacctatatatgtatatgtatatgttttgttatttgatgttgttatagtataattaaattatacaaaaaagtgtcggcagggcaagggagtgaaagaagagtgttaaggaaatgggatattggaagtgcaatgatagtcagacgattttcaatatttttagtcccacatcggaagggacccataagattttacaaaaattgacatatatatatattttattatatttatagtgttttaggtatgcatgtttatttatgttccatgtgggattcacttaaatggtaggcctcaaaccaactcatacctcttctcttattacgagtagtattggtattggataccagtggtgtttaatactttttataagtggtgttttatgattggttaacaatattttttttttttatgttatatgagacttgatatttaattatactaataatagtatgataccagaaagatgctaagtatcagtgatgctttttagtaattttttattatgaaacatttccatatggatttaagtttgcctttttgaatttctttaataatttggacacttttttgactatgaatctaaccctttttatttttttaatatttatataaaaagaaataattttattataatatatatttttttaatctatgaccaaagtccaactagacaatgcatcttcccttgtttttgtttgtttattgtttctttatttaaatatgtatacattatttgtcgatataaattttatgggaaggtagggatttgattattcatattgttatgttatgataattgaaaattctttggcacaatttaaggaaaaattataatatctaattgtgtttatataatgatgtttagtgttagttatttatgggattttgtagattttaaggaaatatgaaacattaagtgagagtcgaaataagagtttaaacagtttattgtacgtaaatatatattgttttaaaaaataattatgcgggtaacaattgtttaattttgattttgataccataaataattttaaataactatttgaatattgtaatataattttaaaattagagttataattgcaaaagtcctattggattgggaatatagttttaaaataaacatatactcttttaagataagattaataaagaatgtccaaaactaagttttctatttaaacaataaaagtgaattagaagtacaaatattttctaaaaataaggaatctcttggtattgacatgtgagccaatgattcaaatttagttgaaatctttcaatcatggtctataaaaattgttctatttcaattaattactttttatatttaagttttaaaatggttattttcaactatagtccctttttaatgtttttttagttatatgaaaaaatggttactaaaaaagaaatgagtctatttggaaacttttttagaacaaaaagaacatttttagtcacacaaaaaatgtgagtttcttgttgaaagaaaaatcatgtaaagaagttcaagaaagtgatactaataatcaataataataataaaaaaaacttctcaaaaaataatatgaaataaattatgactaaaataacataaaatattacttaaaatacatattattattcaaataaaaagctaaaattgttaaagtaggctcttaatgagcttacttttttgtgtattggagaatattccaccatgtttgttgattgatattgtacttgatgactaaaattaattaagaaattatataataacaatagtaataataaaaagctaatttgccaactatataatttcttttttatattaaattttttaaaagaaaagtaatgtgaagacttcaattaataagaatgacccatgtatcttgtgaccttgttgtatgcaataattgagggagggacatattaaataaaaataaaatatattttaaaattatattacacttcaaaatcttat

SEQ ID NO: 19157 - DNA, 11942 bp, Cannabis sativa
ttgtaaatttttttctcggacaatacaaatcattacaaatatccctttttagttacattctgttctttttaaaaataatttgcttatgtggctatgtgttatatgtataattgtagtatcaagattatttaataattttaagctacttaaaattccgtttattagtattaaatatacaaacagttgctctaagaatgcacatacctacttttataatttattagtagattgttatttatgtatttatttttttatctagattcttgaattgggctagattaatattatgttagtctgtttaaataaatgaccaaaatgcaattgcaataggatatttgtaataatttttatagtttaagggaaattttcgtaacagaaaaaaatttaagagacaaaactctacaaaaatcataattcgatagataaattctatttattcttaaaaaattaacaaaaaatattacattatttatataaaataaaataatcattaaactactcattactcattcacattaccttctaaaacaaaagattataatattatcccattcccattactattcttaatataatcgttattattatggctatgccattctcattgtactacactaataaaactcaaatgcgaaagagatatatcatcccattactattattattatgattaaaaaatttaatgtaaaattgcaattaaattatatattatttattaaaaataattaaataaaaggggggttggaacttagattgatgagctggatgagcaagaaagagatatatgtcaaagaataatagcccaaacaaagactttactcccaaacacattcaaagccttgatgtccggcctcttcttcacacgtgtcagtcaaactcatctcacggtccaatcacctaccgccacgtgtcatgtccctctctctctctctaatcacttgtttaaggaattttaattagtgagtgaataatcaaaaagtttggaaatttggcttttgaataataataataataacaatcaataaaaatcacatctttactcttttgagggtgaaagattcctctaaattggaaaaaaaaaaaaatatacaaacaagtatttaaataataagaagaatttatagctgttaagcaacaaaagatgttgacttttagtatatatatcttcttaatactctcattttgaatggacattatatgaccctcgttatttatttatttttattttgtggagatgtgttttctaagacttgggtttgaaaggaagaagaagaagaagaaaaaggataaggtttggaaaaacaaaaaagcaaaccccacaacataagcaacttgggttttgggtgggttcccttagaagtagggcatcaatggtggtggtggaccattctattctattattgaataaatgcctattctaattctatacaataaccaatccaaatatgaatgagaaagaagaaaaaagaggggaaaaagtttctgaaaatgccatgaccaaaaagaccataaggctattaaagtaatcacaatgctcaatcacattaagccttgtgtcacacttcaataaacaacaattattattggcttattagatttgtaatgtaagacattataatgataatgagaaaaggaactaaaataaacatggcttataccttagatctaattctcaatcaaataaagatcaaatactaaaccaccttatgttatgtcaatataataaagcattactatttgacactttaaattattcaacattatactaatatggtatcttataattgatcagtgatttacccgatattgaaatgcaccaataattaacagcataccatctcttgtggtgtttgacccttaagatactccttaacatttcttccaacagagacaccttacctagaccccacaaattactatttactacagataaccaatcgaaaaaaaattatatatataattaaatagtttggcattggtgccaacagttaactttctttcttgttttatctttataaaatagtattttacgactccatttaatcttgacaagcaccaatataaacacttataaagtagtcctaataacctactatttggccatagtttagaatcaaatcaccattttcaactaaggattgccatgtggcaagagggcaatgatggtagtgattatcttatgatgccacgtgtcataagaaggatagtgacatagtcacatggttgatgatggatagcttgggagaagaatcaatcaagttccatgtatgtatgaatgtatgtaacttaagaaaaaaacaaaaagaaagaacacaaaacacaaactacaatgtgttttttatttggaacaagattcatgagcccaacaggggtcctctatgtctctttggaagggagaaaatcaagtaaaaaacatgactaaatgttggtattcatttagagagagagatgcacatgcattagggcattacacatgccatgatgccaatggttacaaattatgttttcctactctttttaaataatacaaaaccatggaaaatgggaccaacttcaattgaataaccattaagaactcagaatcaaaaagcatattccaaagatttaaagggatatcaaacattatcatgataatggcaattaagcttttgatcatatcaaaaggtcacattatagaaaacttaatctaaaagtctatatgttgtggttagtccattgatacacatgtaatgatagaagaaacactctaaagttactttgaaatcacacaccttcaattttcactactcttatttcaaaatggaagcacaacatgttgagagtcactaatatatactaaattttcgattttcaatagaaggagacggtatataacaacttccgccgatgctgtttctcaaaagcaatcacaacatcatcaatggaatcttcccacatttcatgtgcttcaatctatatgtacgaaattcaatcaagaggtatgtattaatcacttatgaagacagacaatacatggcatagttccttactataaagtattgcatagcagtataagtacctgttgacatagttccatagcaagcctagctcctacggctgcctcctcgtggttgtctttgacctctaagttgattaccaacacggctttcattttaacgtgttctcgagtgttaagatctgcacagtgatcagattgtgaacaaagatgacattccaagcaaaacaaaaccgaaaacaatcaaaagggacgacagtgacagattctatagaaaagtaaacatgtatgcaccaccagtcaactacgttccaacaaacaataagctctttttgaatttgaaaatccaacccacatgtaaattacagacagaagtgtgtatgaattcaaatcaaaagggtagtcagcactcagcaacaaaaagacagcaattacaagggaaactcttttgcacttttctactttcccaaactcacttaacaacccttgaaggcaggcacccaacatagggatcctacaaagtaatatatcttatcagtccctcattgataattattctcagttctttttctttttctctggttattttctgatacattagacattaaagcagtccaaatattctaaagttcctccaactgttgtcgttttacaaaccgttatccttttctaaaagttcatacacttataaaagacctttactttcataccatacaactctaagttacaagttgttcagagattagtttcagcatggaaaattttgcatacttgttatgcttttgaaactccaacacaatagattatttttttattttttagaaagggatggagatcacttgtctcagactgatcccactcaaatttatcgaaaaacctcacttgtggcaaaggaaaactgtgattacataggtcattcaagttaaagcggaatatatctgctgtctaacaacaggttacaatattttgggaccacaaaactatagcaattgctatgtaagtacccaagagggacttgaactaagactttgtgcgagcaaagcaaaccaccatttgagagaccccttataaagacctttactttcatacaaaagaaaatttcgcttgaaaagagatagagaggtcacttgtcttagactgatccccgctcaaatttattggaaaacctcacttgtagcggagtggttacacaatagattacaatatttggagacgacgaaactatagcaattcctatgtaggtacccaggaagacacgaactaagactttgtgcgagcaaagcaaaccacatgcctgaccatttgagctatctcgcgtccaagacaatgtattattaagttctagacgataccaacaggtaatgatggctaactccatagaactaaacacactaagatcttatacacagcctaaactctaaactaaaggtctacattatcatcaaactagctcaaaatagaaacttggaaaaggaatcataacaatggcaattggtaaaaaaaaatgaacaacatcccaattcatagcaaatacaataccttcaatgaccatatcaaaaaccttttcctcaaaggagaaaacgacatcaaagcagccatcagcagcgttgttctgccatctctggggtgccgttttgacacctgcgtttctcttaagcattggcaaaatcccattacgcttatacctgaatacaagaagaagaaattacaaacaaagaaaaaaaaaacctaaaaagatttagggaaaataattaggggaaagaaagaaagaatggatatttattacaattcgggatctttgcggcgaagatcgtcgtacatctgcttgtatggagttccgaaatcgtagacattgggttctcggagggaaggacctgggagcttgacatgggcaccggtaccgtaagaacagacgtcgaagccttgccttttgaggagggcgtgagcctccatgcttcgattctggttcgacgaacacaccatcgcgtaacggtacttcattttctcccaaaaatccaaccttttttcttacacctttcttataaaaatctctctttttttctcaaatttatgtttttctttctctctttctaataacaaaccaaccatttcattaggaaatatggattttgtagaatctcctctattcaatttggttggaacaaattactataattagtatcattaacacatctcaattctcttgtttttaaaaatttgatctttgggtttctttttctttttataagattgaagatttgagatcttattagtattattacaaaagtaaaaatttacacaatggggatttcaaattagtttgttttcgatatcacgatagattgtattcattaataataacagtctctttaatgagttctgacattacaagatttcctatgcttcttatataactaattcagcaattcagcaacacacatatagatgtatatatttttgaatgattaaattcatatttcatagactgagtagcttacattaacttcaaaacatgtctaaaactgaaaatctgaagaataacctatagatgatgctgatgatgatggtagtagagtagtatagtactggtctatatagctttcaagtaataaaaaatcattataacaatgaaatagaagggaaaaaaaaacatccttttaatgctacaaaatggaattgacattgtttttgtaagaaagcaaagcaattgagggtagttttgttggtttgtattctttcttgttattcttattctgtatccctgacactttcactggtcagccatattttcttttggataacaaaaacagcctcgtctcctacgtcttgctccgaatctgaactagaatcacccgttgccactgcttcccaatgtagtgctgttagatgcttcttcacaaaatctaccaccgattgtttgtctcggatgattaagaaaccagttggcctgagtatacgatcgatctcaatcagcagatcctcgggactgcaatcctttttctccatgtcagagaacacagtccaagcatggagcaaatcgtaggttcgagggtatgttgagtaggcttcacacctgtaaaaataaaaccaacccagtaatgtgaatatgaatgagaagttgattcttttgcattatgagtttatgttttttagcaactaaaattggcataccagttatggatagagcctataagacctctgtcatatatgagcttaagtgtgttcgggccatcttcggggacaacattcatcacccaaacatccttagccttgagagcagctgcaaacgaccccatgtttgctttcatgtccattatgttcctcagtgtgtttgattcaatctttggactcaataaatcccaataactctccactcttcgtcgccaaatttcctacacaacacaagggtgtttattaaaaccgcattacaataatctagaacatgtgttgcaacattcacaatttatttaccgtgtccttttcaaacatatcatttgaatagccaaaatcagcaagtcgtggaggaggggcagtcaatcttgctggccaaggagctaatccactgcccttaactttatcatcatctgaaaggacaaacagagattcatatttcatacactatcacaaggtggttgtacaactgcaatgaaaaccgatgcccgaatgttgatgagtaagctgattggtactatcaactatcaagtagatatgaaaatattaaaatgacaattatcatttcaattttcgaaacataacaatcacaataagattgcaagtagctctgaataatacaatcatacctatttttggtgttgaaaatatgtcaaacaactagaaacagacaagaataaataattaggagaaattactcacggtctgagtacggcgtaatgcaagcttccatcgagacaccccaagttgcatctggatcttcatcagttttgcatagaggcggcaaagtaccaggtgcccgttgcttataacagtcatttgttagtggtttttgccaaatgacagtttgattcttctttgcagctattctccagcacatgcgacccacaagatcactcatctctttccatatccttagatcctcttcatcttgcgcataggcttcgggagaagagtaggcaaaataacctccaggtctcagcaacctatcgagctcgagaagaagaatcccatctctttgaagccaatcaattctacaacgggaacaatgtgcaagctcaaaagatctgcttggatacggaagtctcttggtccctaaaacaccaagataagcaggaattcctctctctagagcaaattggatttggttttgatgcacgtcatttggtgccaaggacattgcaatgatgtcagatgaaagaaggtatgctccaaaacttgcaactccgcagccaacatcaagaactgttcttaatcttcctccattgttcaaaacattgtttgaaaagttgagcatctgcaatttcaaatcatatgtattctaagtaaaacacagctactcaatccttaagtaatatatgtagataaaagaaacgatcgatagtcttacatttgcaattaacgcaatgtacttatcagctccatagtgaaaatgtgtgcctccacccgggaactctatcttttcacctttcacaaccatccagttttggtctgatttctcatgagcaaggtgagtgtgaggtatgtttgctttccacacttggtctctgctttttggccacttgattgggatctaaacagcaagaaaagtattgaacattagatatttactccatcttaactatttttttcacagaagacctacaacttaactttactacatcattaccttgtaccctggtggaggaggaatcaagcaattgaacttccgctctggaggagggcaatgccgttcatagtgctccatcaaagacagatccagcttcaatctcatctggtatatgagatttctatctaagcatgggattaattccgaatgtcgaccatcacaaaccttaaagtaggcaaagcaaaatttgtcagcacaaaaacttaaaatctttcaggttaaatctcgatttctacaaaaataagatgggttttggaggagagagcttacagggtaactctttggtgtaatacgatcatctccatcaaaaacttttactaatgattcctgcttgtcatcagagccatcatccccacccaagtatccaagttttctcaaagatctgctaccatattctattgcagatgcaccatgactttgagagccaaagatggatccataatatgcatataggaaacaaagaaagattgccactacgcaaagagaagtaattaaacgcttcttttgcgttccatcagatcgtcctctcatcatttacgcaggttcccagttcctcagttaaaaataatattcagtacctcttaagtactaaacaataaaatcacatttcacaaagacataatttgtgaaaaacaccagccaaagccaccagttaaccttgtcgtcccacaacttctttaccgaaatatatcagcacaaattattaaaatgctaaagagaagagagtatcagacctgtaaagagtacaacaaaaaacatcataatcaaaacttaaagaacattaagcacatcatcgtgggcataacttatcaacaaaaatccttgaaattgtcaaatcaattcaacaaaatcattaactttaagcatacaattatcgtaaaagattaaagtcagactatccgatcattaaacaatctattcaaatctggtacacaaccacacaaatagtgttgccacaatatcacactaatgataatactaaaaaataatctccccacaatatgaaataattccacatacatgaataatggaaatcgaacaaaattcagctgtaatcaactctaattgaattggaacaacactacttcaaattctcaaatcaattcaacaaaatcattaaactttaaacatacaattgttgtaaaagattaaagtcagactaactaccaccaagttctaaattattaaacaatctattcgaatctggtacacaaccacacaagaaatgttgcaaaagtccacaataggctaaacctccactactgaaaatctcaaaactaatgataatgctaaaatatcaatctccccacaatataaaactaattccacacacatggataatagaaatgaaacaagattcagctgtaatcaactctaattgaattggaacaatgtaaaccgattcaatcaatgaagcaagaaaagactcaaagatctactataagagtacaacaaaagcatcatacataatcaaaacttaaagaacatcaagcccatcatcagtggtgttacttatcaacaaaaatcctagaaatcaagtaagcatgtgaacactacttgaaattctcaaatcaattcaacaaaatcataaagtttaaccatacaattattgtaaaagattaaagtcagactaactaccaccagttctaaattattaaacaatctaatcgaatctggcacacaaccactaaaatagtgttgcaaaagtccacaatatcacactaatgataatactaaaaaaatcaatctgcccacaatacgaaactaattccccaaacacacatggataatggtaatggaacaagattcagctgtaatcaactctaattgaattggaacaatgtaaaccgactcaatcaatgaactaagtgaaaactcaaagatctactacacagagatccaaacaaatttcaatttttcccactagaaaaagaaacaaatcaaccaagattcagctcatactaacaaagacccatgaaatttcatacaacacaacaaaacccagattgcaaaaatgagccagatccaacaaaagaatcgaagattgaaagaaaacccagaaaactaaaaacccaaaatagtaaaaattagtagaagaatagaataaagaatcataccaagtaagtgaagtgtgtgtcggcaatgggagatgagatagaatagagaatgaaagaagatgagatctgagattttgggtttactatatttggatatggaattggaaaaatgataaaaaagaagaaactttagctttgtttcagagattttcacacactcacacagagtctctcactcttatacgtccagttcgttacttacagttcattatcatttattattattattattatgtcattctttttctatttctttaatttatttatttattaaactaagaaaaatgaagaaaattatttcattctcaattttatccatctattttttttatgtataaattagattctaagactaacaaactttaaatggtcaaacaaattggaaacaagagtaatctatttttatttatttatttatttatgaatttatagtattttgtcgaatatttcatttggaaaatactatttagactatatactttataaaaattattgatttaactttttatattgttaaatgataattgataaattagattttttattttttaaatttatacaaaatagtatacaaagacgagtgtacataaatcgatctaatttaattgcaatcaatcaattcaattataattgacagttaaatattaaatttacaattgtgattggatcaaattgaatattttttttaatatccaattagattatatcaaatcagattttgaaggtgtcaaaaaataaaatacatctaatatctaatcgaattaattattattttcatttagtttagacgagcgtttagatttcatgttattatacttaaaatatatatatatatgtaaatataaaaaaaattaagattttacttttttttttttttggatttgatggttactgaatctaaaataatagatggatctgatacgatctaaaaaataataggtctaaatttttggatatattcgaaacaatgcattgtgtatacataaaatacattcaatacataaaattaatccaatctaacatttaatggaagttggattgatcgaaataatgaaattaattagattagatcgaatggtagaatctacatccaatatataattagatcagacctaaaaatattagatgtgttctaataaataaccctacactgagttgattttggtcaaaacaaaattttataataacctaaactaaaaatgttatgacaagattgattatattttcaaaatattaaaaattacatttaacttggttatactaaaaaaaaaatatatattattaaaaattaacctcgaaatattattttaaattactttaagaagtacatcatttaatttatcattttacaaaaatacataatcatattaaccaaaacaaaaattaacagcaataataatatttaagttgtagaattaataataagaagaatacttatattattatcattattattatgtatttatttcttactataattatagtctccaactgtttattgtttaaaataaaaaaataaaataaaaaactcagaacagtcttaataaccacttgattcaaatctagatatgattagctatgaatgctgtattgaatttattttattttattttagagctatactttatatattaatacaaatgtaattttttaatggtattttcctttttcttttggaggtatgaatattttgggccttaaaatttaaagcccataatcattataacctagctttagacacgagttagattgggctaggaatttagtaaaggccaactttttagatggtagttcgttttccattacaaagtatagtatttttctaaacatttaccggaaaaatgttactattataattaaaatggaaacacaatgcaaaatatataagtgaagaggtttcttcttcctaaaataaactaattatctaacttaagtgtattttaagcatatccatgaatatttatgggaaattaccttatatactattttt

SEQ ID NO: 19158 - DNA, 7329 bp, Cannabis sativa
tcagaagtgtggattaataatcttatgcagtttagtttagatttttaaagtaattaaaatggaattattgaaaaaaagttatatatcaaaaaaataattttctaaatttggtgatgtacaattttggatccttttgccatgcacaaggtattaaaaagggtgttctttaaataatagaatgccttgtcaggttctaatataagacaaacaatatagtactaaaattatttatccttttaaactattaaattattagaaaaagtatttatttttcataattttactaaaacatttgtattaaagtatataatatcttaaaatcttattcaatgtaaatatatttgttatttaaacaattttatattatttgttttaattatatatatattaaataaaagtgtgataaattatttcattatcatttagtcctatatgcaccaaacacaatgtaatacttataaaatctagtgtaagctagtccattccaaatcccattcccagtcccatccaatactcaagtgcaatctaatctgttggccaaacgaactattaatgatactttattttctctctctttttttttttttttgtatttatgtttttctttaaattgtggattgtctcattttcttaacttttaccaaattacatgcgcgatcatttttctttaaatagtatcaaacttaacaagcgaaattcatgattttctgttttcaatttgttgagcacttttcttatggtatccctcagctgtaattttcttttattattaaacgagaaacactttcccttatgggaaatgtcatttattttcataatgttgtgcagaatgacgtttgattttaactcaaacttaatcataagagattgtggctttgttgttttcaggttgaaaagtgtgaattcgcaatcacgtttgcttattcagaaagctaatatactgagaagaacaggtgtgctttacaagcagaggcttgaccgaagatgttctgaccttcaaaaggctgaagctgaggtatttttcgctttagattggtgaaatttattcttggtttgattttctgcgagaaagaagttgaacacgtatttataaactatcgtaaaattgctgcataaacagtggatttagagctatttttattatagaatgatagtcatgttagacgcatgcatttatggaccaagggagggacataatagatacccttgtgtattttcttatataacaatgtatggttcaatagaagtattacttattgtatggtcttctagagtaaaatttacggaaatattaagatacgaaaaatcaagatttgtaacatgttactgaactttggaaacactatgaaatgtgatatgttttagattcattattggaaatttagggaatcattttctctttctaaagtatactttcttttttactttcttgaaattttggtgtggctttatcactatttgtgtatatgtttgatggatttatcttggatttcaggttgatgctttgggggatgaagtggaaaatcttttgggtcttcttgagaaaatatacattgctcttgaccattactcaccgattttgcaacattatcctggagtaagatactttctcaaatgtctagttgtgatgttacctctatatttatatatactcattttaaaatataaagaaaacaaatttaatcatgtgaaacacagaatgttagttaagaatgctagttagttgcctgctcgtgacacacacctaatcttacactcagttacgccatggatgcacatgaaacgagtgtttacacaagcacactaactcattgattcataaatatgattggtcatgaaattaaagtttgtatttatttttgttattttcgattccctttgtaaattctaagctgtaacagcttagtgagtagaaacaactttctgtgctcattcatatgaagggttaagaaaaacaaattagtttaaatataaaagaaataacaatttgaatgagttgtttagatatcacagaaagtgctaactcttgcttactttatagtatgatataacgagcctttaattcttgaatacatcattcatggcaagtttacaatcttgttttgcaaatttgttatttattgctatctatataattccactttgttcactataatgcttatcttccctctcagaatttcaattagatgatcctaagcaattatttaacaaagtaactaaataattttttattattgcaccactaaaggggctgaaaagtatttttcgaaaaaaaaacagactaaaacttcaaaatccaacagtacttattaattccaatttaattgttattatttggttttatggcaccatgtcaaatacttctaaacatttttcaaatttgttatcagattatcgagatcctgaagctggtgagatcagaattaagtggggtttcgtctactagatcaatttgatctgcatatctgactgctaaggtaaaattcccagcttaatatcatctactctgaaaaccctttgttaatttgactctaataccccatttattttactcattgaaagctgcatagttatataatatgttattattacagctttgtggatgcagatttcttttgctatacctttgttaaaactagtaaagaattcaagaaaatacttgcacagttgaaccaaagaagatataccataatgtcacatctctggtgttttttggggtccgtacaaaaagaaaaactgaagagaagctaaaatggtggtgggaaaaggcttagagacctcggtttttgtttttggtttagatagttgcatatttttgttctatagagaaaaagcctccttatctccaatatccatgagtttctttctctctctgtctgtcttttcttttcaagtagatttttttttttcagttgtttatatagaaaagcagaattgtatatgtccctagagcagataggaatttagcttcttacagagtaagtaatgttcagattcaaatgccgttttgccttttccctttgctgatgtgattgtcgtttcttgctgatatgcttgttagtgaatgcagatatactgttttgtcatatatttaaaaaagaaaagaaaaaagggaataggtaaactatacataagttacaggggagtctttaatggagttctttgcaaaagaccgtatttttttaagggtgtttataaaataatcgatctaattcaatctgcacgatcagtgcaatccacaaagtgcaaattgaattggattgaaaaattccaaatccgtacttgtatggattagatattatttgatatgtaaaaacaatctatctgatttaatctatacatttttataaaaaaaaaaaaacagaaagttatatatacaattaatattttaatataaagaaaatagcaacttaaaatttaataactattatatttcaaaacttgttatttgttattttatttattttaatttgttattaaagacataaaatatcaataatttattttattttcttactaattatgtaaaaaaatatatatagtttttataaatattaaataatttattattaaaaattaacaaatttaaaataatcgatccaattcgcttgcggattaaatttgaactattgtgcgaattgaattagatccaaaatatgagatctatacttagtgcggagtagatgcactatgagtaaattagtctagattaaatttaatgaatacccttaatatttttaaaggcttatcaaattttattatttcctaaaaataaatgaataatacataaaaaccatcttaaaaataatgatttaagtttttctagttatattaactttatagaaattatatgtaaaataatctttggtataaagtaaggttctttagtggctcctatccataaacaaatatgatatgaggctcaatttgatttttggattatgagattacccacgatggttgattaccaaaatacatcaaaaaaattaaattatgaataataacaattataaattactatttaaagatcgtaattgagacattacttcttgtttaacttgttctcttattacttttccagttgttgtgagaggaaatggcttattccaatgcatgaatttcttaggtattttaaacctgaaaaaaaaaaatcataaagaaagtgttgtcaacaacatgatcatatagtatagccaaacacaccttcaacatttctaaggtatggattccaagaagagagcattaccgagctaaattcctttctctacaatgctgttgtagaatctcatgagatatgaattgcttttgtgttccaattgagtgctcaaaacttccatttgaccaatgccaatctcttctcacttgaatacaagcaacaaccatctctgtaagccgagtgtcgggaattccaacggtaacaacgccttgtactcctatatgttgagatagaactgcctctacctaaagatcagagatttttcagaacattaaatcaactttaagtacttgtaacttgcaacaaaagaacattaccaagcttacctcttcagggtaaatgttctcccctccactcttgattcgaccttttgttcttccaatcagccaaagattaccatactcatctatataacctatatcacctgtgtcaagccaatcttggttgatggaacttgattcatttttgggactttgatcccaatatctaagcattacatgagagcctctagttaaaattttcccaacatgagaggacccttcagaatggatctttacttcgatgtggggagctggctttccaacacagacaccttgttgtttgtgtgctggaatggtctttgagatatcgacagttttgtgtactgttggatcatgcagggtcatgaaggttagggaagagcatgcttctgtcattcctttccaaataaggacacaaaagaaaatgagtgaggcagctgagacattattataatatgagtacatctagttcaagattttattatgctagagtggactgaaatagattaacccaccatatgctgagagaagcttagctcttggaaataatttgacagcttctttggttagtgcaattgacaaaccacctcctccatttaatatcttcttgacactctctactcccttccagttatcctttcccctaacatgtttgaagatatgtacttagaaactattagtgtatttataaacttttattattaaacaggacaatgtgggtgatacaacattcttgagagtgacaatttcatagcaccatatccatttcctaactgaattaccagcatattcttcaaattcacgatatcgatttgttcaatttaaacaacaattctcaaatttgcctattgtcaatttccttctaccctcaatctctcattgtttctgcataatgttttgtctattgaattgaggatccctattcgggtctatcaaacaaatatgttataccttgttgaagaactcaaatcagccatcattgcaggtactgtgattagagaagtgacattgtattgctgtatgacctcaagggctaatttggcttcaaacttaggcatgaagacatgacaagctccaacgagtagcatagaaatagctgaagacaaaccaccgatatgacaaagtggagcagtatgcaaatacacctgtatatatatgaagcaaaagtcattcagtaatacttccttcatttccttttgaactttgcttaaaccttaaaacataattatgaaagacataaacttgatattgcaaactacaaacattggagtaacagaaaaggttcatgagaaaaggcatacatcatcctcactgtaaccaacgatggcaattttagcaagggactgtacgatcaaatttaaatggcttataataactcccttaggccttccagtggttcctataaacataacataaaatcagactattaaaactaaaaaaatcttccttctagatctttatgcgacttaattagaagctgaaaagctataaacatagtttctgctcctatcatacacatgtaaagattctctttctcagtgaaattccttagacaatgttgaatggataatcggatatattgtcagaagaaaatacagatgattacctgaagtgaagcatataagaacagcaccatcaggtgcccatgagtaattcaatgatgaatctttcaccaaattcttccttagtgtttcagtagttagtgctggacaaaaataagaatatgaaactaaatttcatcagcacacatttcaggtcatagtagaaactaaaaaataagaaaaatgccatactattcttcgaatttgacaattctgagtctgaggattccaaggaaacatgccaccttagaaaaggaaaatcatagttttggagcttcgaagaccataacttgcagctttcatcagtcaccagcataacaggtctcactgcttccactgccaataatgcctcctcaaagctctgtgagaaattatagtaaaggaatttagtgtaaaagatttcttttaatttatcagttctccccaaagtttaaactaaaaaaacatggttgacattgctactttttttccaggtttctcctttatgcgttgccaacaattcatacacaaggcctaaaacaagttggatggacaatcccaacagaataacaaagagagaactgcaaattcaaacaagcaacattgtgataaatcagatccaggacaaaatttccataagctttaaggtttccctttttaaagatggctaaatacagagaaaaaatgcagacaaacaacgcatacttgactatttgaagctcttctctctcacacacactcaatgttatagtctgtaaaatccttcataattgcttccatatagctatatatcagtaaaatcctcctttataataacactcaatgttctttactaattagtgtagtgttctaaattctgcatcaaacttgcttcaaacaaacaaggaggatttcactgaaaatgatgcataacctttgagtggagcaactattttttttaaaaaaaaaaaaaacaccaagacaaaatggccacaaacaaacaaggcacacttaaccattataacactcaatctgaatcctgctaatctcaattggctctagtattacagcctgcaacaattcccttttccatttatctcattaactatattcagtgaactcttacccaatcatttgataaaacttcatgttcgttttcagtttttccctactcaaaatttgtgtctatagttcatagtttacaattgaatcatcatcagcacaaatttacgcataacagtaacaatatcaagac

SEQ ID NO: 19159 - DNA, 6174 bp, Cannabis sativa
  modified_base (6138)..(6140): a, c, t, g, unknown or other
tgttttatcgatcactttagctaaaattgagttgatatttttattgtcaaaataccaactatgtagatatatgcatatattattttatttataatagattatgtagtaggaagaatatcaattgagggttcaataattaaataaccaatctcataataatttattgagaaactggcggctaagttattattctttaataagagactgatttccttaatatattatcaattatctcattaaagattgaatttcattgctcttaatttgatatgtattatgtaacataatcagcctctggactatctggtgataaagaaactgcacaaaggcaagtctcggttgggatgggactcttagctggctcaaatgttatgcttctaacagttctctggggttcctgtcttatatttggcaagtgtgacctcgaaaattctaaggcacttgatcacaaagacacaaaaggattcaacttaactggtatatattttaatagttttccatgtccaaagttattctaatgatgttatagtaagaaaaataatacatatttttaattacagctgactaatgcttacacattatgtttcttgttttattactttatcagaatccggagtgagtactgatatatggaccagctatgctgccctgactatggttttatctattgttccattcataatagtccagctaccactagtcttcaaagcaacttcttttagtcgcttatcagttttgatttcattaatcgtttccatttccttgtttattggatacagtctctatcaggtaccaaatattttttaaagcaagaattgattaatgccttttatgaagttaagaagcaacaaaagtaaaaaatcgtcttctcttcgaaataatgatgcagatctttcagccttggattcagaatagaaaacttgcttatgcaaagcacaagcatgttatgtcaggtcttcttaagtacttgagaatgaattcatttgggaagctttttacagaggatggtgaacctaacaaagatgttctaaaaaagttggttttcattttaaattcccagcttggatcttattcattgcacaatgaaatttttctaatagaaaaaacactaaaatgacaggttatttaagacagttgatcagaatttggatggaagcttatcaatgaatgaagttcgagctttaatcattggattccaacttgaagaggaagatatgaacattgatgatgctgtttctcaagtgatgaatgatttcgatacatctcgtgacacacaaattgatgagagtgaatttgttaaaggattcacaagatggcttaacaagattaagcgtgctgcaataatgcaccaaggaagggctttccaatctcttagactcttgaatgattttgatatggtatattatgagagacagagtagttatcaattaattatcctcatctcaagtattggttaaaatcaactatataacacattgcacaatctaagaattgaatatataaatgtaatgcaggaaacaaggaaagaagcagatctttatgaggatcggattgatgagaccgtggagaaagttgaaaatcccaagtgtcaaataaccaaagcagttctcatgctgattcttggagctgcagttgctgctgcttctgcagatcccctggtggatgctgtcgagaatttctcgacagcaacagacattgcgcccttctttgtgtcctttgtcatccttccttttgctagatccagtgagatagtatccactctgatagctgtcagccagaaaagattgagaactacatctttggcatattcagaggttggtgtaacagaatagtactaataattagttagcattgtttaaacattattacgatgattggagttttaacaaattaattaaagtgggttttgggttttgcagatatatgggtctgtgatcatgagtaacatcctaacagtgggagtgttcatggggcttgtttacatccgcagcctgacatgggactttgcatctgaagtgctagttattttgattgtgtgcagtgtcatgggaatcattgccggattgcgcaccacctttcctctttggatgtctttgttggccattttgctatatccattttctcttttgctcgtctacatcttaaactatgtatttggctggtcttagctaaacaaatcagaccatatacccttaaattcttccgtatatcatagcttcaatatatagtttttacatcattttatatagatatatagcaattatttttgctctcacaaataagggtaattttatagccttctgatttttaatttaattgtaataatttctttagttaggaaggggtatcccatgtaaaaaaattattaactttttgttatgatggggtttctttagtttctttagttattttattttttatgtattataaaagatagcacattcaattttattttattttttaaagaaaaactgtggtataatttttttaaatgagagggtctcccaaagttattcctggaaagttatctgtctcctggaagtatgttcttgcataactaatctgttcatctggaagaagtctcgtgaaatgatagttgccatccgaaagggagtttccaaatgactatcatatccactctgggtgtgagcttcaagaaagctggtcttcctccagaagggaggtctggatggctaactgttcctcctagaaaggagtcccggatagttgactccagctagctctttcctatcagggaagctccttcagcaagtactttggtctgtttttcgaatctcccggatgcactcttacttatgctgacgtagagatctcgatcatagtagagttggttaagttagttattacctaatttcttgcagcgacggactttaagatcttaatcataagtctataaataccaccaacactaattaatttcacacaaaacgatctgattgagttgagagagagagagagagagagagagagagaaaggtatagattaaagagagattgagattgggttttgcataaaaaatcttttgttgatgaaaaaaattcttagggtaagagtgtgagagctgaaacactagagaatctgttatctcgaattttggtcgtgacgtggcaaattcttttgggtgacacgtatcttcaccacgaggcctggacaaataaaagagtctcaagggttgaccacccaggatgtattcaaggttggtagaagtaacagacaaactaagtgtaattagccgcacaacatcaacacgaataggcctaggcagaaggtagtggtacgagtcgcatacaaaccggccagggagaaaacgcgtgacataaatagagttaataaagcttcccatttattatgcaatcaagacccagccaaagtacaatcacatttatatttccaatattttaggaagaatagtgatcttccctaaattggtgggttaacagctaaagggaattgaatcctattttaagtattgttaacgcatattttcgttaacaaaaaaatattagtctttttataataaattaactataaaagtaattatagcaataaataagtaacagaaaatttttaacgtggttttaaagttaattcttcatagtccacgagtcaatcttattagagataataatacctgaatatggaatacaatgatattagtagtaataatatcttatttttctctagattggtcgtccctttttaccctaggttctgtccctatttacaggtacatagtgtgacagttattcctttgggatctattcattcataaccactcatgaaacgtggacattccccacgctccatttttgtgcacatgggataatattaaacaactgttcaaccgctctttgtctttatccatagacgattatgctaactgtgctggatgattctcgccgagtccatgttatctttctttactatttttgtaggaaaaatactaagtgtagagatacaatacttctcacggttctcttttgtcatttcgaattagcgagccagttactttaacgcgtaaaaagcgaggtgaacgaatgttgttgtcattctttgaacatactcacgaatatgtggatcaattagcggtaagctcttactcacaagtatgtgggtcaatgagctgcaagctctttgtatactcattctgaacaactttcattgtgtattctatttattccgagatgaacttgttgtctcgccaatcttacatgttaatagttattattcttatcttacctctgcttacatggtagcgagtttgaatatttttgttaactgtaattcctgagtcgagttatttaatgtacatttaatgatacacgactttgggtggttggtatttggtacacgtgttaacttcttaatattaatacaaatacatcacatttttttttccttaatatccaaaatattttcacttccgacatggaagagtgaggagctaatgcaattattgagccccttttttattttattttatattttactttaaagaaaagaaaaagaaacgaaacaacaaagcctagcggtttccaattccgacacttgaaacgctcaactgttctgctgtctctcgccaatctatcccctgaatacattaacggtcacatttcctcattcattattataagaaagaataaattcacttcacttcactacaccccccaactcccataaacgcctacatttttttctctcttcacttcactcccatcccaacttttatattttcttctaacaaatggcgaaaggcttcgattatcgtcggctgattatactctcactcctactcaccacccagtgtctcccactgtccggcgcctcgatcaaggctcagaacggcgtcgtttccatggagctgtggtgcgtagccaagaacaacgccgaggactcggccctccaatcggctctggattgggcctgtggacctggaggcgccgactgtagcccaatccagcaaggcggtccctgctatgacctctccgatgtacagacaatggcttccttcgctttcaacaattattatctcaaaaacggcatgaccgacgatgcttgtaactttgacaacaccgccgccctcacttccttaaacccaagtaagtttttcctgttttctcaacaaaatgatttttatttttttctttctcctgatcactattgtgggagtttgaactatagatctttactttcggaagtgtcaaggtatgagggtttttagatctgaaaagttttgatctttgcggttttaatttatttaatttttaaaattttgtttcaggtcatgataaatgcagattcccatccaggtattgattaattaattgctatttatttggttgtttggtgggtttaattccttttatattgattcaattattagctcaattatcaaacctgttagcttactcataattcctgatccagcattattatattagtgtactttgagctctttgttttttttttttttgaaatgttgagctgaaaacattgtgattaatagatctcgtgattgtgggtctcaaaaaattatggaatttttgacgatttatgatcaaacagtttggcagtgagcaatggaagtcgtccaagtcaatcaacagcggtcgggttggggcctagtgaagacatgagtggctgcgacctagtgactctgcattggttttggccacttttgataggcagtcttttgtttttttgcaccacttactactcatagcttgagattgatcttgttaagcatagttattagcttagcataagagaaaagcaaaggcttttttttaagttaaggtttagttttgatcttgggattctccctcacttctgggatctgttttcaactttgtagaacttagttgataaagtgattattaatttgaagatatttatatttgttctatcttcatgaaataaactttgttttaggtttttttttttaataaatcatagaattttattaatgataattaattaaaatagtagtttgcaatctaatcggaatatcttctttattgtagacacaactatattattagatttttttttaaaaaaaaaatcaaataatcagtcgcttaatttatagatcgtttgacaaaaaaaaaaaaaaaaannnaaaaaaaaaaaaaatcagattaaaaacccacaaa

SEQ ID NO: 19160 - DNA, 3170 bp, Cannabis sativa
  modified_base (2077)..(2078): a, c, t, g, unknown or other
caaaccaacacgagtgtttccaacatgttttgtcctcactcgcacgctttctggaaaaacttcccaagaggtcacctatcctgaaaaaccctaggccaagcacgcttagctatggagttctttcacttgaaaacaagatacaccttgttaatataggtagtaccaatcaatccatttaagtcattttcaaccgtgtagtcccatacctgcacggtctcaaatcatcccacttgaccttccccaggcggtgtgggattgcacagcttacccagtgtttccccttacggatcacgagactactgactgtcacagtgttggtcctttatggtgttatgatcataattgaattatcatgttcttatttttgagcatgattgtttttattgtatttttaatgagttcataatttactttttaacactaattactttgtacttttaaaattcataaatcttattatatttcctctaatggctagtggcattgacgacattcagcttctacatgggtctggtttgctgctaaccaaacaagatctacaacctttctattcttctctcttcgttttgtttctctatgccaaggtggttacaactcatctttgcaagcctttggagcagatcagctagacgagtaatattggttacctttagcatctttaggtttagctgttattatgggcttgaatcttgttgaggtttcttgttattataagagaatgtgctcacttcatttattttgaaaattatgacgtgtgactaatcttaatgtaaattttgtagataattaaattgcgactttcatcttttttcgacaataacagtatttgcatttatggatattgcatcggttacaccaaccgaagcaaaaactttatatgtcacttaaaagttgaagcaaaagattatttttacagtagtgttaagagatattaataggaatttttgttgtagtattgttggctttgataccaagagaaaatatagaatttagaaattttgtattttgttaaatctcagttcccatcagagcaagaggaaaactttttataataaataagagtcttttacagttgtcaacaatcagacaaagaaatatccaaacagaaaatattcccaatcattacatcataaatgataagggaccatagaatatcttgcaatatatgccagaatgaataggtactaaatggacaccttaccaattccagaatttcttacttctcaacaatcccacttatcatgccgccaataaatcccaccccaaagctaaaaccccaagaaaattttgaaagtgcgctctattaacacttgaagccatctttgtttatttttgaggtctttctttggttttttgaaaaataaaaatctacaaattcttttaagattttctggttttctaaacagtttctaacttaatgaaggctacgcctgtgcacataataagagtgaggctatacgtacattatgatatatggcattatctatatactactatttaagattgggatgcatgtgatccctatggcaaggtagctaataatgtataaaagagtgtgtcttaattattattcatatgcatatttaatgcatacataaatatatattaacaactttacgtaattaaatttaaaaactctgttattataatttaattataaatgttgtttaatataatctaaacatcaatcatacgtaaagtaccgccagctagcttaatacatatagttttatatatagatgatatgtattaaataatatatgtacaaatatattactcagtaacgacgtaatactatcttttttccaaacaatattatatatagggtgtgtttattggaattgagtacaattaattcagaatatcggtaactatctaataatttgattaattgaagtttctcaattagctaggctctctaattttatggcctctattggagaatattgtccttcatggatcaaatgtaagaatattgagccatatataagaacatgggttactccactcatagtcaattggttttgagatggaaccccatgattcacaacatggtatcagagccatatccctaacnngctttcgatccacacctatcaaagagttaacaagcgagcaaatggaactcccagccgcaaaataaaaaaataagcgagcaaatgatgggttactccactcatagccaattggttttgagatagaacccatgattcacaacagcctccaatatgagaattgggtgtgtaattttattgaataattattacgacgtattaccagtacttttaaacaattaaatattgttatttatttattattttaatgtgttaatttttatataattactaatttgccaaacatcaaaatataagactatattttacatctaaatatatgtacattaattgtatttcaaaatagattataataaattattatgttgagtcagtactatacagttgctttcaaatctatgtaaatatatgtaaatttttaatatatatatatagtagtagttgaccttcagtttttagttaatttgtgaatgtgatctatatattaaataaacatatattctttcattatgttagatactttttcagttataaggaaattaattttggtcataactttatgggatatcatcatctccaacttgccacattaagaaaccataatatttgctggctttcttcactaatgtataaaaaaaatatataaatataaatcaaataaaaaaaccttatctccattgctatatatatagccttgcatatgtagctttcaattcataagaaaacattcaaactgtgatctctctctctctctatcatcgtaagtcttaattagaagtactagtattacgtactaaatatatatatttaagatgaagatgatgagaggttataagattactgttattcttcttgttgtttctttattactgctggcagttgttattgatggcgctgctgctaaaaaggtaaattacaagaaagtgaaaaataatgataagaaaaataatggaggaggaaaaggagtaggaggaggtaaaggaaaaggaaaaggaaaaggagaaggaaaaggagaagtgggaggaggaggaaaaggagaaggaaaaggagaagtaggaggaggaggaaaaggaggagtgggaggaggaaaaggag

SEQ ID NO: 19161 - DNA, 6444 bp, Cannabis sativa
gagagagagagagagagaaatatcccttgactttcttcaaatttacgcaaaagaggaaaatatagggcacatctctgcttacaaagacagtattatataaaaaattaccagaaataaagacattcaaataatgtataagagacctgtaatgatataaagccattacttttattttagtcaatagaataagtcatacttagcaaaaacaaaagccattagaagaagacagtagagaagaagaagctcacaatgggagtgtccttgatgctaagatgtggcaaaggatcattggagctaacatgaacaggagcaagaggagctcccatcactcccaataatagtctcagatcagacctcttatacgccattgaagtgatcgaaggagccctcgagagttgtcccttcatccactgccctaaaccagacccaacacgctttgagtcccctacttctccgccgtctggatcaggaccctccatcaacggcgtaagcgcctcacccattggcctcagactacccgatctcgcgatcaatgcatcgggttgtccataaaggttgctgttgtggttgttgttgttgctactgctactactgtgcttcttcctccttagcaaaccagatatggtgggagaagaagacctcgacggactgtttcctcgagacctcgacggagaaagaccccgaaccacctcatctttcagagcagcaaagaaaccctgtttcttctccataatgaaaaaagcaaaaaagggaaaaaagaaagataatggttgccctagtaagtaattctccggccgccgcgtgctgttctccggccagagaaagtagtcagaagtagaagagggaatgaaaatgacgggtttttaaggttgtgggctaaataggtttgtggagtagagagcgaggagagtgtgaatagtactgcaagttcttcatggagagagaaagaagagagagagagctgagaaaatgggaaagcggtttggaagaagaaacgtttttgaagagagagagagagagagtgactttggtggggtggctttagactctgattctagagagagaaaatgaataaatctatatagaaagagaaaaagaaaaagaagaaagaaatgaacaaaataccaaaatcgtatctcaatacttttttttaactaatttagtaaaaatatacttggttgtatattttaggtgaattaaaattttggtcccctaaattctaatatatattaaattatatcacttaaattaaaaaaaaaaaaaactattgagaatattaatgtaaaaaaatttatcaaatttcatttaattttacttatgatgtgattatttaggataatttacgtcataaatatttaggtttaattctcggttttaaataaataccttaatttaatttttaggtacttatagagttccaaaaatataacttaaatattattaccataaaaaattaaacttaactatttatttacaaccgagagttaaacttagatatttataccgtaaattacccaatattaaataatactccttaaattttgatgtctcaaaattatgtccctcgaattttgacatgtataaaattatgttatatttttttttttattaaaattgaataaaattctataaatcaaacaactagttgagagaaatttttaaggccctcaaaaatttaaaaacatgattttgtatatttggaaaaaaaagattgtaattaacttatattttattttatttttctaatcaaaattaccaaatttatcctttttcatgttatggtaaagaaagaattcgtgcattaataactcagaaaactaagaaataaatatctcctcagtattaatgaaatatttatttttttctctttttaatataaccaaaaagatacttttcagttttcacaattaaaaattacaattaatccattacagtaaagaatgagagtgagcaattatatttgtatttatgaatggaagaaattatgaattagcttttgagttcatacaattaaatttttttgatttacataaaaaaaaattatgaagggaagaatttttattcaagaaaagttaagacataattaaaaggttaggcagaaatttagacctatacatagtccatttttaaaaataaagacccgatccttataaaaatatagatagtattgtatcatatctatactcgaattattcttgttgtgtaaaatatggacctaaatattagctaaactatgagtctaaatactcataaatatgttagtattagtatttttacattgaatatatatatatatgggtgcatttttaagtagtgtttggttatcataaataaaaatataagaatatgaataaagtaaaataaaattcaaaatacataaaaaattattaaattttttttcatgttacattagaattgtcttttttgtagggataaattgaaaatacttatttcatttatcaattaaccaaatttacctctaacttatatttaattaaaacaaacctctttctatatgttagtacccaaaatacattgatttaagagagttacatgaagagtatattgaagtgacagaagcaaaattggtaaagtgtttaaaaaaaaaaagtaaaaacgatagactttaaaaatgaggataaaaataaaaattgacaatataaaaaaaatataaaatctaatttcatcttttttttctatttctaagtttctagctaaatcaagtcattttctcacttaaaatgggtgtacactgtacaaagagattccacgccgtataagcaaggaaaataattagaataattaaaaattatattttattgtgtaattatttataattaagtttttatatttttttaatttttatttattgaatttaaaataattgataaaaattaaaattaaataatattataaaaaattaaattataagattttacaggctcattattgcgctgacaaaagtcaaatatccatctatcaaaatgacttttaccagcgcgttaatgcactggtaaaaataatacttctcccagccacatttttgttggcaaaagttaagacttttctcaacgcgttaatgtgccggtaaaagtaaaaaatttcccaacgcacatttttgttgccaaaagttatatttttgccagcgcgttaatgtgctgggaaaggttagactttcgtcagtgcatatttgcacagacaaaattctaacttttaccagcgcatttatacgctaaaaaaaatcatttttgccaacgatttttattttgtgctagcaaaagttccaataccaaggcggattggccaaccctttttgtcagtgcaaaaatgtgttggcaaaaatagaatatgttttgtcagcgcaatacccagcttttgtcggcataaaaatgtgctagcaaaagtcttatttcttgtagtgaattgacattccaaatttagaaataataatctcattattaataaacttaaacggactttaccaacacacttggtagatacttgtgctccattccccacgcgcatagtcacctccccatcagccagctcccttgacaatttaagtatctgcatagaagaataaatatgattagtggctccagatcaacaatccataaagatttatcatcttccattaagttagcttcaagaataaataaatcagatttaccttttttaagctcagagagatactttttacagtttctcttccaatgtcccattacgccacgatagaaacacttgcattaagccttcttgtctttggacttggggctgactttgttcttcttggccttttaggtgacttggggttgcctaaatgtgatacaataaggccaaggcaacccgaagtccttcttcaagcttcttttaaagtgatggaggtctttgctcggttgacctcaccacccccaaaaaacactccttggtatgctgattttgtaaattacttagtaagtgggttgcagcctactgatttgaataggcagcaactaaaaaaattctttcatgatgtgagattctactattggaatgagtcttacttgtacaggcagtgtgcggatcgaataatgtggggttgtgtcccggaagaggaagttgcaagcatcctagagcattgtcattcatctccctatggtggacactttggtggacaaagaacaacggaaaaagtgttccaatcggggtactattggccctcaattttcaaggatgttcatgattttgcaagaagttgtgatcgttgccaaagagttgataatatttcaacaaggaatgagatgccattgaattgcattcttgaagtggaactttttgacgtttggggaattgatttaatggggccatttataccatcttatgacaatctatacatcttgttggcggtggattatgtctctaaatgggttgaagcagtagcaagtcccactaatgattcaaaagtggtgatgaagttcatccaaaagaaagttttcactcgctttggaacaccacgggcattaataagcgacgcaaattaaaaactaaaatccaatctaaaaatgtatcttccatagttgctgcctgtttttacaatttaagaagttctcttttaattactaagtacaagcactaagaaaagagaaagaaaaagaacaatattaagataggtaaaagaaaattcaaacacaaaagcttggtcccccttccttcgtctgctgtacttcctgctgcagttacttcccttccaaaaattgcagctccttacgtgatagataagatgatggtgtacttgccttttttcttctttttgttgttgagtccttagggtacaaaaatcacaccctaaaaatagaagcccaatctttttttgccctttggcccactaggtttagtccttcctttacaaagcatccagctggtctaattttaagcaaccaacatgctcctgctgacgtggacaactcaatttcgtgttcccacgtcactgccagaatgctgaattcgtttcaacattgcttcagcaatctaccccaatttcagcttttgttcccacttcttccttgcttctttttctattcaatatcaatttaattctctctttttcaacaacaaacaagcataattaattagaaaaaacacacctaacaatatcaattcaaacaagacttaaaagttagcttactaaatataaaatgaaactaaaactaactaaaattaagcaaacgaatacattttcactactcttctcacaatacttttagtttaaaagcataaaaaataactctataccatagagttatcagctagccaccgctattgtccttattgttctacttcttttcttatcagaagaaagagagttggattttgcttcaatgatatttgatttccctttcttggatttatctttgttaaggctttcaaacatagtcaacttattcaattattgagtcagttgaactatagtttgttcatcacacattttggtgaacactttgaagaaatgagagagtgactcaagaataatgctcacttgagtcctcttgtctacgatagatccatgtgtctccacctcatgtattagcccaatcatgtgcaatgcatgaaatttgatagagacactactcagtaaggaaaatttttgtggttctcacaaaccaacatcatattcagattaaatttctatttaaggaaatattcaccattcaatttttgtaatcgctagtaaagtaataaggaaattttggcatggtagacatttttaaaaataacataatgattatacttaaataataaatatcacttcaaaattttggccaaatatttattgttgtgtcttttgtaacaatatcatttttgttgtagatgcacaatagaagtaaaaatttgaaaattataccacaatttacttgaaataatcttcgtgtctttgagttgtgttgggaaattgtagatttctaacacatggttattataccttgtcatttctggctctccatatagtatcaactacgatagacacatataaaaataccttatcaacattcacgtctctcacatacaaattctgaaagaatttgatcttgtcccacaacctagtccctgattcatgtacagtaatgaaatcccaaggagaaactctccgtagatgagaagccatgttccaatgaagaaaaatatgctctattatttcttcctctcacccataaatcgggaaagaagtcttcaatgttcattcattatctaagaatggatcgaatagcaagcgaattagatagaatgatccaccaaagcactttatgtcgttcatacgctttgctattccaaagctttttccacaaagaaggagcgacgtgacagtgttggtcttttttcaaatccaacaaaaggtaagctaatttggtggagaattttcctttcggcttcttagtccgaattcagtaatttatcccttgctttggt

SEQ ID NO: 19162 - DNA, 9869 bp, Cannabis sativa
  modified_base (7402)..(7404): a, c, t, g, unknown or other
tttactattttaaaaaatatagggtctattttgtcatttaataaaacagaaaattcaattgataacctttacaaaatacagagtccaaatgtatttaccctgagaattatcaagttctatcttaaatttaattgataataagtgaagatgtctactctatatgttcttatagagggtactagctatctgtatatttgcagatcgagaggatcacctgtctacaagagatatgaatttgatattatgttcagaatcatgagttccatctcaaaactaattgttaataagtggagtaactcatattcttatacgtggctcaatattttactatttattccatgtagggcagtgtctcacattaataattctacactaaagaatttgtttgattgtcttcactacatacacaccaccatataagaataatcttcaagaatacacttatttcggttgagccaaacgccattcatagaagctgcaatggccgcgttcacaatcaaagcatcccttgcttgcttatagtcaacaagtgggagtttattgcctgtcaaagcataaatctatgtttaggaaggcttaaacgactccacctgattgcttaaaaaacacttatagctgttgcaaaaggttattgtaaagcttcccatgttgttatattttgcttactaaaaatctttctcaagtgataagattttaattaccagcaccaactacagtcttgattaagataaataatactttgaggtaagataaatatgctcttctagtagttcttaaaccctaataatactgagttaataagcgatataaaataattttattatcacaattttagtaattaaaaaatccatgcctatatagcactttttatgaagtgtctaaaccctaaataatttaaaatcgagtcaaatttaaagtgagacgatggtccccctacttaagctctatgtggcttcacccatatatatatatatatatatgatacaaaaatttcattaaaaatcaccaagaacctaattaagtcttatctctatatatcaatcttatttcttgttttcgtttctcatcaatttggctattattatccaactccaatccccataaaatctcaccctaatcctaaataaatcatttcctacattgaattaataataataaaataatgaaaagccacacatgcattcaacaaaaaaaaaaaaatcagtcttgatagggaagcaagattaaaacacagcttacattaaataaaatataagtaatgaaacccaagatattaattaagcattaattagcatagcttgataatatttaattatttccactttataattgtggactaattgtactaaaagtagaaaaaccgatcattactataagtggcataaattacatttaattaattaattaattataccttttaatatatgtcctaattccacattaaactctttaatataattttacttttataaaaagcataaagatctcactttgtatcttaattaattaatgataaataggttatgagactaaaaattaaaattattaattatcaaacactagtaatgttcattttatataaataattagcaggtttatattttatatactataattattaaattaaaatatgtaatagctatagagatattattttttatataagtattatttacgtcttttaatattaattaatttctgaaaaatggttaaaacttttttttaatatatattctaataaattagatttattccgtaaaaaaatagatttatatatattctaataaagtaatttttaaataaaaaaaattaatgacctgaatcaatcagagactgtcacaatttacttgacacttaataattaagtacttacataattataacttaggtattattgccgtctaaaattaaatttaaatatttatttacaacttgaaattaaacttaagtatttataccgtaatttttttcacatggcatattatatgagacatttactcagcttattacaaatttttataaaaaaaatctcatataattaatatatagataccaaaattgaaatagtgtgttacaaatttatatactattatttataattttttaatttttttaaaggaaatatttattcatataagaaaaggtttgatgattgggataataatattcaaggatgcacatggtgtgagattctttttcgtaccagaaaaaattcacgtatagtatcttaattattaacatatatattctcaatcaatcatttattttatttttaattaaatttaattttttaagacatacaattaattgcatgttaggtggaattcaaatcttgttattagtttataaatacatataataaaattagaataataataacctccatataccatacctaccaaccccaaattaacacataaaaatatatattagttgatatagaattaattaaggataatgaatatgttcgaagctaatagtatacacttactacttactctatatagtattcagaattcaaataaattaatggagaaatataataaaataattaaaaaataatcaaaataaatatttgtaatatgttgtttactaaaattatttagaaatcaaataataatgatttatcttttttactttacgagaaaacctaatcaaaatatttaaattgactaaattacccttttgagttaaattatagtttgtagttattttgtaagacatatttataaaggataaaattctcattatatatttaatattaaaaaataaaataaaaataaataaaattcattacccttaatgatatttttaataaaaaatttagttttctcccttttttttaattttaataaaataagtaaataaatgtaagagaataactaccttaatatacaagaaactaaaagtaaattgttaattttacacattttttttcaggaataattttatacagattaattagtaattggtacttgccctgccttaagcataggtgggctagacctgtgcctaagctcacctaattcagaagccaaaagaaatcctcttttaaaatatgtatatttttttattgattttgaaaaatactatatgttttttaaataagggcctgaatttatttttatggtctactaaatttcagggcggacccatccaccaaattaccattctttaaatattaatcagttaatattgaacttttaattaatctttggattttgaacttatatgtaacctagatttgccctcaatgaactttccccttttaaaaaaggaataataattcatgattataatataacacatgttataatacattttttatgagtaaattttgagtatttacagcatcacttcaaatttttagctatcccaatatatttatttcatattttctctctcacaaataaaatgatgagttacaaaactattttttttactgatagatatatatgtttataaattttactttaatcatagaaaagattaaatatgtaatattattgattttcaaattatattactagtttagttttactctattaacaatataatagattgtcatttcatgatttataatttaatgatgacataatatgatgttgatgaatattaatactaataaattgtaatttttacaattaatttttaacgataaaaaaagtatataatgatgctttttattataatttaattatttctagtgaaattttattgtaagaaatataattgatttttcataaatttgtaaggtttattttttcctaaactattacaatattttttagcttgaatgtctaattgaaaatttatcaattgaaattaattatgatttagctacgaatccaataatttatttccttataattaaattcgaatctatttaaacacccaaataaatataatatgtacattggatagacctgtattatatatatacatgcaaacctatatatatatatataggtagttagcaaacaagattctaatgaaagctctctcaaccaaaaatcaggtcacaaaaatttttaatgccagaaaattataaaataattattgtactttaagaaaaataaatgaggctcttaactaattaataagaaagaagggggtgtagttgatttggtattatattatttttttcggtattttattgttattggtgtaattaagtagtgaatctcatataacttaataaaatatattttagagaataccgataaccaattaaagcgctacctataaaagatattgaacattactaatgtccaataataatattctattatatatatgtatctacttcaattatttattttctaggatcacaaaattggttgagattattttgtgaagctaattaaaaagtcataattatttgtcttattatatattaatatattaatagtgatctaccccagaacttagaatttgtttgattaaaataaggttaaaaattaattaatataaaatgtacgtatacacttagtctactcttttttgtattattggtaaaataaattaaacctcacggtcattatataaaatattttttggtataaaagagatatctactatatactaatcctggtgtagataaacgcttattttaccacattataggcaaaacattataagttcttacaattttagaaaaaatacaaccgataaaagaagaaaaaagtcttttacaatagttagcatagttatcaatctctcatttagcacaaacaccattaagagtgttaataactacactagacatcgacgctttccacaattacaaaatggtggcccgctccaccaccgtatctagagccaaacaacaagttgaagcctcgccgcaaaagaggtcaatgaaacataatctcttattagtcatcacccagaccacctcaccaaagtggttacgacttacgagcaataatcgctaaacatatatcttccatctacacacgaacatcacaactcagtttgatccaatcgaaaggggatggcatatgtatatgtataatacaattcattttcgttggtaagaataactaatttttataaaattttaactaatttaattttaattttaaatacaaactttaaaacaacttattatgctttgtgaaataataaatttcggcattgaaaaaaattattgatgtgttgaaattaaatataaaattacgttttttgaaacttaccttatatgctaataaacaaattattttagattaatattcagtgtaaattatttaaaaaaatttaatagttaaaaattaaattatattttacctacttatcaaaaaatagaaatacaaaaaatttgcagctcataatataactaggtgagtttttggccagaatctaactgttataattgacttatcattattaccggagaaaatatatcatttataatgatcgagaggtctaattttattttttaaaaaatacttaaaaaaacatataataaaaaaacatgtcctatatattgagggtcgacctgagatgagacgagccagttatatgctttaggcctccacacgctcagagcattaaaattgtaaaaaaaaaattaccagtatatagataaaatattaaataataataaaatagtatttaatatagtagtaattttaaataaagaagtaaaaggcctcaaatttaattttatctcaagcccatataccttaaaatagaccctaccaaataaaattccaaatatttatataataatttatataatctttttatgatctaagatctaagatctatgatcatgatcatcatcttctttgcttgtcattacgatctcgaatatttcattttctttctttctttctttctttttcacacatatatatatagatatatatatacatatatatataattgtgtgagtgagtgtgtattgatatgaatgttacatttttaatttagatgaaatatcaacacttaacgaatccccactggattctatctctcttttaaatctttctttctttctttttcagatatcaaaactactctctcactcactctttactcactttttccttttcttctctctcttttgaacatctccatctacaagactacaactacacccatacacatatatatacacctatatatacatatataattaattaatgagagaattatatcaagtactgcaatacactctttcttattcaacaaagtaatattagaaaaaatgtatggtactatatacacccatacttaaaaggctatttagatattcagaaaaacttttaagtgatcacatatgcttaatttgtagtttttagaaccatgcaaacaataataaatagtttatagtataccggaaaataaaatttaaaaagctataaattatcatgcaaataataaataatagtcacttatgtaatataatatttaaactttattttttgtattttaaattatttaaattttttgaaaaatttaaaaatattctaaataattacaacatacacgattacgaaagaaataataaatcaaaatacttcttagataccaaaacaaataaaaaatatacttaagagggtcattgatatgaaaaaaaaaataatacaagtagactagtttacaattaataattttttataataattattaaattaatatatataaaaaaattttataattatacaaataataatataatatcgttgtatatatttataattgcttacttataattttttaagaccacttgtaaattctcaaaaaaaaaaaaattaaatagtttataataatattaaaaataagatttacatattttattattagcacaattatttttcccttatactcatagtaggtaactagttaaacttaatttttagtactgtaaactatttataattttttaaaatttataagtaagtctaaataactacaaggtacacgatcatgaaaataaaaattagactaaatttttttgtgataccaaaatagataaattaaaaagatgtactaaaacgaaagtctactatataaattttttatatttatatatgtaatttaaccttttaatagaacacatattttaaaaatattcaattagtatatatttacataaattttaactataatatagttttctttcaactataataaatggtattttttaaaaaaatacattatataagataaaatgttaaaattttgtaaattcaattatctaatttgaccacataaaaaggaaaatagaattgatattggacgtatctagtattttgtataagtgatgttttataattattacgatattctttaaaaattattttttaaatttatataaaacctgacacttaattacattaataataaaaaaaaaattaagtatcaataatattttattttttaataatttttnnnaaatatatatatattttaattcaaaacattagccaccattttggacttctatgcttcataacccatgattgtaatcatttcacaacatatctctatacaacaacatatttagatgctatataatatatgaaatataatatactataactatattattaatgtaatttgcatataaattttgtatccaaaacaaactatatttataaacataaataaatatcaataatgaattttgtcatattgtgttaacacaaaatcaataccatttatatacaaaaaaataaaataaaatataaagacaagacaaataaaaggagtgccaaaactaaaatttatttatagaacaacaacaatctgtctatattctctatatatactctataccataaataacattattaatttaaaaaatcaacaaaattaatttaataataattataatttaattacttaattaattatcggccaaaagaaatgactcgatttttattattaacacgagtagtttcatacacaggaagctcttccaaatgatcaagctcaaaaagatccgaacttgaacaacttgctccgtcgtcaaaggcggcgccgccgtcattttcttcaccggaactaaccaaaacgacatcgtttcctctcttaacattgtcgtttttaatacccttttgttgattttgtctgtactctttaagaaactcttttgccacgtcactaacaactcgtcgacttttctccaccggcgccggcgaaggtccgatcttccacgccgtcggtactcgaaccgccgggaaattttcgtctttttttttacggatatcttcgtcagggcagaaccggaccgatctcttctctcttctactcgccgaagaattcttgctcagacacgaccttgaaaacgatgaagccgaagaacacggcgtcgtttcatgggtttgttgtacggattttgatgaactcttctttccgttgccggaagtgaagagagagttgatgaaagtggctaactttcctcccggcgaaatgggttgctttacttttttcagattactgtaaatccttaaagctcttgactttgacttaatcaaaacgtcgtcgttttcgagtttagaagtttcgtaaaacgtcgtcgttttattcttctctgtaattcgaaccggttttggtagtgctgggcccgggaaagagtttgatgctgacctggcgggggcattaaagtaaattgaatcagaatcagaggaagaaaaaccaccggagcttgaatcggaagaactcgaagttgaactgaaaaaaatcccatcttcaaattcagaacacttgttgtaatctcttcttcgattatttccaacttttttctcaatccatttatcgattaaacaagctcttctcaacctatctatttcatcttcttcgttttcaccggctctgtaaattttcactttgctctgttttctcgccgccattgttgtttctctgtaaaacttcaaatgctgattatctgatttcgttgtttcggccatcgttgtattattaccttcgtcgatcgaacggtagattttttccagaagagtcgatgagaaagatggagttttttctctgtatctatacatttcatacatatgtagtaaagattcgattttttagtcttgggaatgaaagaaaagctcgatgattgtgttctgtatatatatatatagagagagaagtgattttagagagagaaaggctaatgagaactaaactgcacgctggtgaaacgaaggggagagagagagagagcttttatagagagagaaagtgagagagagtgtctaatcacgcgcgtgcatttcaatcctagctggagtaggagccaggttgtaatctgctgacgtggattttgttttataattatacccctggttttatgggaaattgagttttagtccctgaagttaaagtttcgaattttaaaccgattttttagttgggtttttattgggtgtggttaaggtgtatgggaatatgtgtggagtctgtaataataggtggtccaaatgtcggcatgagattcggaactagctcgagttaagggcattaattagtcacagaggaattttaccttttttttttaattctatttttaaatttacgaattcaacacttatttttcatattaaattcagttgatgaattttattggtggaagaaattgaagatgttattaaatgtgctacttttttttttttaagaaaattgttatgcgtctatatagtatatatatttttatttattttgatatttaaaacaatttttaattttttttttataattatatacgatatagatatttgtaaatttttagagtttaaatattttgttgcataaccaatggtaagtagctgttaaattttatttttaacactgtaaattatttgaaatttttaaaaaatttacacataatattaaataaattaaaataatgttat

SEQ ID NO: 19163 - DNA, 3912 bp, Cannabis sativa
catctttattcatagatatataatattgctgaaaattgatattatgtcattaaattaaatatgtgtagtgtaaaattgagtttattgatcttattgattattgcactccagtatacaaagttaaccaagcttattaatataatcaaatgaaattaagaaacaaagaattattactatggcaatctttgtaactttttggtcctcatattcctcttctcttgtggaatggaattgcctatgggatttgttcctgaatgtacttcatgcaatctttttctgctcggtactatttcaccttcatcctgcaaagaacatcatcaaagataaacaaaaaattagttcatttagatatatatatatatcatgtatggatgaatatattagtgtaaatatataggatataaataaatgagatacttaccatgactttgagctgaccctttacaaattcaggtctagttttgtgaattttttcaacatttcctaagaatatgtatatgaactttcattagccttgaaatttcaaatagagagaaagagaaagagatagagagaattagagtacctatacctttgtgttgtagtgcagtagccatactggagtggggaaatagaagtgagagtagaaagaatgagaggagaatattgagtaaagttacaagttcatagtgtctcattagtgagggaagaagattgaggattaagttttggtcaaagatataagtgttgatgggaattttaaaagagaggaaatggtaacgtggaaaggcaaattaaaaatgaaattcaatagtaatgactttgctagtgggagaaaagaaaaaaactttggcataagagcccttgacaagacataaaatggggaagactagcgtattaattgttaccatatattaaaatagtctctcctagtacacaagtttatttgtattaaataaataaagttatatatcttattggctattttaatggatgaagtcatctgcaacgattttggaagttggcgtagaagcatgcatgcttcttcattcaacacaagccaagtcttttttcttgcttcgtattgtgctttgtttatgaagtaacaacaagtaaccttttatataatttaggcaagttactcttaaatataatacttaatgaattgcataccagtaatacagaaaagctggcaaatgtagaatagtatgatccaaatattattacaaatttggaaagaaataaatcattcttgagttaaggtcgttttattaagttgaattccattgtctctttacaagcttaacattatagtttacttattggtcacgtcataataaaagtaaagtccaaatttgatcatgaactagttatttggtcacttctggtggcttgcatccatgcttgcgtacggtgaaaatttagagtgccggtcattggattcaatatcatctcaaccaaactgaagaagattcaaaactgatgttctgtcaggcatgctaggaatggctcccttgacttgaacacataatgaagctgccgcggctgttgaaaagaggaggcagaaaataaaagtcatgatttgtgagaaaagcataatcaaggatcattgaagggttttcgggaatgccatacctgcaaatctcaagcattccttcatggacttgccctccacaaaagctacagcaaaagatgcagtaaaggtatcaccagctcctgtagtgtctacaactttctcagcagatatgactggttgtttgattggttcttctccttttgtaaaaagagcagaccctttttccccaagcttcactaagacttgcttaacaccctgagaatagacatcaagaacttgtggtaactctcaaacttgaatgttccagcacatcaaatgcaactgagtttgtgtgtgtgactccaatatcagttaaactaatatgatttcacaaatatacaataccgtatcaggaaatgcctcacaacaggaggggggttgaatttaatgagaacagaaaaactccttttaaaaaataaaaaataaaaaataaagcctaattaaggtgtgaacaacccatgtaagctttggcttcattgtgctcaagaaataaacttttatttaaaattcatcataaaagaagaaaccaaagaaatgacagattagtgtctaaaaatgcctaaaaagttgagaaactaaatgcaattttaaggcatgattctatattggatcaagtctccccttttcaccaaaacttaccatttcatggcatttaactacagcttgagtaatctgttcaaatgtttcagttggcattccagtcaaacgacgaagttcactttcatttgggctaaagatatctactaaattcagcagttcctgcgggaccggagagtccactcctccagcatccaaaatgactggaactccagcacttctggcagcctatatatcatgaaatacaaagcaatgagttttgctttgaacactgagaaaatatgatgtctcagaatacaaggaagcaagaaatagaccgtagaattgaaaatcacatgcaacaaaaccaacattgttaagttcattaaatattcaaaataaatgtagatggggaaaagaaaaataaacaaagccaaaggataattaatgatatgggaaacagaaaagagagtggacacaagaatatggtatccaaatttggatgaacactttcaaggatagacgttagcagaatcgtagcaaaaacacaaacaaggtcagttgttagaaaatataaatgtatcttcatgaaaataaagacacaatcctgcatgtataggctgtacagtataactattcattagttacattgttaagtggaagtataacaaaatctgcatgtataataagctgtttgaaatagttgtctttgggatgggaattcaaaaaaaaaaaaaaacatatttctaatggctgctgtgtatatgaacacttaaagtacctgtcctgttctgaaaaacaggaatgcaattcattgagaaataacattgtaaacaaaagcctaggaacaaagagtttctaaatcaggaaaaaagtaacactaacagtattttttttgcttaacaacactaacagtattgggaagtctaattaccaatcatttattagcatgatctccttcacagaaaggaaaaggcatatacatagaacaaactactactaacgatgccattggatatctagattcaaagaataaaggacatagattacaacagtaaaacagttttgtggctcttttcataatgctacaaaactgtgtctgagagggctgagtacaccattaacattttcagaattcataattagcttcaaactcaaactcataattctagccaattggagaattttccagctatttaccaatagatcaacttcagagcattaatgaatcagttgaccggcagccaagataatatatcatcaacttagatgacatattcataacataaaactcacaaattatccacatttctaataagctcatacatagttagtttacttactcccaacatggaacctcaaataataataataataattataaaaggtgaaagttttaaatccttttaattacctgggcaacttgaatgttgactgaatccggaatctctctctgaagcaaaacaatcccagcattcctaacaagctcagaatccttatcagaaagagtctcgggccaacaactcatgttagcaccaccaacaatgatgatcgaattctgaccgtccgattggagcatcaccacagcatgcccagttggcgaagcatccacagtactcaaccgatcaagacaaaccccgccatttccaagagcctcggtaatcaacttaccatgggcgtcattaccgacttgacccacgaagtacgtcggataagagagcttgccgccgcaagcggcctgg

SEQ ID NO: 19164 - DNA, 2140 bp, Cannabis sativa
aaaaaaaaaaaaaaataatgattagaacgtactacgtagtgcccaagtaattgagcgtcgtataaatttaacagacaaaccttcctttcgttcatcaaacaaccgattattacatgaaatatatctgctattttcacagctcagctcaactctaatcgaatctttagtcttcacggcggccaaattgagaatggctcctccaagccttctcggtccgccagagctctacaacaacccaaccccatcacgaaaatcccaagccagcaccggcgccggggacccttttgtagatctcttagtgaccaacttcaacaacttgcgaccagctgaaacaattccgaggggtttaactgaaaatcaatcccccacctttctctcctccggcaatccttgccttgacttcttcttccacgtggtaccggacactccagctcagtcactgaccgagaggctccggttagcctgggctcataatcccttgattacgctaaagctcgtttgtaatcttcgtggggttaggggtaccggtaagtcagacaaggaaggtttctatacggcggcgttttggcttcacaaacatcatcccaagactcttgcttctaacgtggcatcattggctgatttcgggtactttaaggatttaccagagattctataccgacttttacaaggtcctgatgtgaggagaattcaaaaggccgagtgggaacagaagaaaggtgttgggtttcgatttctcaagtctaagaagacatcgaaaccgtcgatcaaaggggttcaatccactgtgcctagagagattagattgttgaacgacgtggagaaagcaaagaaggagaagcaaagagccagagtgttgagggaagagaagagaatcgccatggctaaaaaggttgtggacagatatattcatgaccctgaatttcgattcttatatgaaaagatcacagaccatttcgcggagtgtttgaaaattgatatcgagaatttgaacaattgtaaagaaaaatcttttacgtttagtctggcggccaagtggtgtccttctctcgattcttctttcgatcgttccaccttgctttgcgagagcattgctaagaaggtttttccgcgtgaatcgtgccctgagtatgaaggcgttgaggaagcccattacgtgtacagagtcagagaccggttgaggaaggaagtgcttgttcccctgagaaaggccttggaattgccagaggtttacataggtgccaatcaatggaactccatcccatataaccgtgtggcttcagtagccatgaaattctacaaagataagtttttgaagcacgatggcgaaaggtttagagaatatttggaagatgtgaaacagggcaagtccaagatcgctgctggagctctacttccccacgagatcattaactcgcatggcggccaagtcgcggagcttcagtggaagagaatggttaaagatttgtcaaaagaaggaaagttaaaaaactgccttgcagtttctgatgtttccggaagcatgagcggtactccaatggaggtcgctattgcattgggattactgatctctgagctgagcgaggagccttggaaaggaaagatcatcactttcagcgagtttccaaaactgcacattatcgaaggtgacaatcttgaatccaagactaactttgtgagaagcatggattggggaatgaacactgattttcagaaggtgtttgatcaaattttactagtggcggagaatggaaagttgaaagcagaggaaatggtgaagagggtgtttgtgtttagtgacatggagtttgaccaagcgtgtctgaatagttgggagactgattacgaggtgataaggaggaagttccaggagaaggggtacgagaaagcggtgccggagatagtgttctggaacttgagggattcaatgtcgacgccggtgatggggaatcagaaaggggtggctttggtgagtgggttctcaaaaaatttgatgaagatgtttttggataacagtggtgagattgatccaatgggtgtaatggaggttgccatcgccggtgaggagtaccagaaactggtagtcgtggattaaattgaaatgtgtatattttgatgttttgtctctacaaagttttaa

SEQ ID NO: 19165 - DNA, 8571 bp, Cannabis sativa
caaccaacgccgcaccaaggggggagtatcgaccaccgagaatggagattcccgtgttttcaggagacaacccagaaggttgggtatatcgggctgagagatactttttgatttgtcaattgacggagctgatgatgttaaaaacaatcattgttgggttggacggggatgccttaacttggtttcagtgggagaatcagcgcagaccaatcaactcgtgggcgacattaaagcaactcttgcttcaccgattttgggtagttccgatagggtctccgtcagaggagtttctctctatcactcaaacttcaacggttcgggattaccatctgaagtgggaagctctggcatcaagagttcccggagtacctgaacacatattggaaggcagttttgtgaagggactcaaggatcatattaagggatctcttcacatactccaaccaatgggattagctcagatcatggacgctgcccagagaattgaggatgggaaccaattattctctatgggaccacccacaaaacacagcaaaccgcaattgagcccaataacaccatttcgacaaaatccgatttccttccaaaaccgtgccatatctgctgctcctgcaccaacagccccgcatggcatcccaagtaatactaatgaaagagccccaaccatgcgacgaatgtccgaatcagaataccaagagagaagagcgaagggaatatgtttttgatgcgataagaaataccataggggtcatgtgtgcgaccagaaaatgctgcaagtgatgttgttcgctgatgaagacgaacctcatcccgctgtggagtcaccaccaccgtccccagcagcagatgaaccagccgaggtagaggagaccctagccactttgtccttgaactcattagtgggaatttcctcagctcacacaatgatgttagccggaaaaatcaaccaccaacctgttatggtactcatcgatagcggtgccactcacaatttcatttccttagaagtcgtgacagccaccaagttacccatcactcaaactaatggctatgggatcttgttgggtacgggtgatagagttaaagctgagggagtttgtgccctagtgaaattggagttaggcgcactacgggtggtgacggactttcttcccttggagttgggaggagctgatgtgattttgggggttaaatggcttgaaactttgggcaacatgcaagtgaattggtgctccatggttatgaagtttgaacgggatggaacttgggtgacactacagggagatccaagcctttacaagtctcccatatcactcaaagccatgatccacacggtggaacaaaccggttatggtttttgggttcatttgggttctttgcacactacgggtagcgattcggagccctttataccggctgtggtggaagaagtgctagagaaatacaccgaggtgtttaacatgctattgggattacctccggagcgtgccaaggcacaccgaattatcctcaaagaaggagtggggccaatttcggtacgaccctatcgttatgctcaaattcaaaaggatgagatcgagaagatggtgcgagaaatgctcaagaagggaatatgtgcccctagcacaagtctgttttcgagcccggtgttgttggtaaagaagaaagatggaagttggcatttctgtgtggataatcgagcattaaatcgggaaacagttgcagacaagtttcccatacccgtcattgatgagctccttgatgaattgcatggagccaagtttttctcgaagctagacttgaaatccgattatcaccaaatccggatggctgcacaagatatggagaagactgtgtttcgcacacatgagggtcactatgagttcttagtcatgcctttcggtttcacaaatgcgcctgcaacgttctaaggcctcatgaattctatctttggggatcttctccgacatacggtgttggttttctttgatgacattttggtttacagcccatccttggagacccatgtggaacatttagaggaagtattgcaaaggctgcaacaacatcagttgtatgcaaatagaaagaagtgttcatttgggaaaaatcgggtggaatacttgggacacattattttagcacaaggtgtcttcgccgatcccactaaggtggctgccatgacaagatggccggttccaaagacacttaaggaattgagaggattcctttggttgacgggctattatcggaagttcgtcaaagactatggtctcatggctcgtcctttgacgaaccaacttaagaaagatgctttcggatggactgccgaggctgaacaagctttcaatcagttgaaggaagcaatgtgttccgtaccagtgttagccttgccagacttctctaccacttttgtggttgaaacggacgcttcgggggttggtttaggggctttcctcatgcaacaccaacgaccgatcgcctatttcagccaagctttatccccatgagcccaagccaaatcagtctatgaaagagagttgatggcgatcgtgttggctattcaaaaatggcgtccataccttctggggcgcaaatttgtggtccgcaccgaccaacaaagtctcaagtacctcctcgaacaacgtttggtggcggaggagcaccaacgatggctcactaaactgttggggtatgattttgagatacagtatcgcccagagctggaaaacaaagcggctgatgcgctttcccgtgtgcaagatggcagtagtttacaagctctttctgtgccaaatacggtttcgattcctgacttacaagcccacataaaggctgatccgttgctgtctaaatatctcttggctctagaaaaaggggaagaaggagaaggatatactcttactcagggagtattacgctttcgggggcggctggtgctcccaaactcttctccgtgcatcccacttttacttcaggagtaccatggggataacacggggggacattcaggtgtgttcaaaacgttccaacgtttggcagccgacctttattggccgggaatgaggaaagatgttcaaaagtttgtcaccgaatgtgtcatctgtcaacataacaagtatttggcacaatctccggcattgttgctccaacccttgccgatttcggagcaagtatgggaggatatctcaatggatttcatagaggagctgcctgtctcccatggatttgattccatcttagtagtggtggatcgtttgaccaagtatggccatttcattccgcttcgccatccttatttcgccattacagtggctgaagtatttgtgagagaggtgattaagctccatggttttcctcgctctatcatttccgatcgggataagattttcctaagtctgttttggaaagaattgtttcgcttacatggcactaatctgaagcatagtacggcctatcacccacaaaccgacggccaaaccgaggtggtaaatcggtgcttggagacatacttacgctgttttgttggggagaagccgactaaatggctcaaacggctggcttgggcagagtactggtataatacatcctatcatagctcggcaggaatgactcctttcagagccctttacaatcatgatcctccaccgctgctccaatttgaacaagctagtacaagggtctctgaagttgagcatgagctccaagatcgcgatgctacactagtgttactcaagacaaatcttcagcgtgctcaacaaaagatgaagttgcaggcagataagaagcgacgtgaggtgcatttcaatgtgggtgacatggtttatgtcaagctgaggccatatcgacagcgcacagtagctaagcgcatcaatgagaaaatggcaccacgattctttggtcctttccctgtggtggctcggattggacctgcagcctaccgcttacagctccctgcagatgccaccatacatccggtttttcatgtctcgttattgcgtgctgcccttggtccgcatcagcaggccactccgcttccttccggtctggctgcagatctcgaatagaagctcgagcctgaagtggtgttagccatccgccctggtactcacaatgttcaaccctaagcactcatcaaatggaagcatctgtatccatttgaagccacttgggaggatttttctctcatccgtgaccagtttcctcactttcaccttgaggacaaggtgagacttgtaggggggtattgataggcctccactaacctttgtctacagccgaaggaatatggtaagtaatatagacaacaccacagagaagtaaggggtgagttggcaagttagttgtgtgagttttgattgtgtgtatgcttttgagggtacactcggttgtaggaataaaggggtttttgtttgtatgtgagaggtgtgaagaatttgacttgtttgtaacctttgttcggagatatctaggctctcgaattcctgggtaacgaatagaaggctatttagccatttttcatcaattctgctctattttcttcttctttttgcttgttgttgctactggtttgacaggaattcctatcaaaggcttagccaagtagaatcaggatttatttatggggagacttcctattatgaatcaacttaatttatcttatttaacttgactaaaaaagtagtttggattattatattttcaaaaaagtgattacaatctatttttcaggaaatggtcatattggtcactgcaaccagggtaacaacatgtcaccatgtacatatttccagggtaagttttgtcaacttatgccttttaaaagatgaagataaataacctaaaaagtgttaccattttagttttaatcgtagaagtatattattcaacacaaagaattgggcctggtattcttctatctcgatccaagatcatatttatttgatggcaaccaacggttgtacgatattttcactacctttatgaagttattttagtcgatttactcatgtttattacaggattgcaacttgaatgtactatacaattcttgggttagaaatttgaaaaggaaaaaaaggaattttgactgatttatctaagaagtttgattaattagactataatgtaaataattacaaacaatatgttcgttgcttttatcaatctattgggattagttttagatctttgcaatttccttttaataatatttttgatttttttatcattaatttatgatatggtgtgcaatttgcttttgacatttaatccgtgtctatgtgtagttgtatattaaggtaatatcacttttttatgagagtagtagagaaggggagcctatctactgtgcagagaatacaataatgcaaaatcaaatgtgcatcaccatatttttaggcaggacaataatgccaaaagtgaaactgtagaatgagttacaatttagaatgagttttagattcttattttttttcaaattactattatgttttttacatgtaacaattatttattttaaaattaaatatcatacaaaaatcaaaataaaactaagtatacctggtttggctttgcttctagctgtttcaaaggtatcttatgtatggagatatatctgtaaaggcagctcacatgttttccccgccgaaagtaatatgtctaataacatatggaaactttttccctacccctttaaactagcgtagctaattgtaatgcagattaacagttttcaaaatttacatcaatccctttgtttcttacattcgaatttctgatttcttcacaaggttaataccaaggggtttctccaaagagttatcaacaagcttttggggaagtttatatgacccaaacatttctagaaaatttctttggtgatcaggtatggtttataaacaaattgatcatttactttctatatgttaggagaaataaagaaaggaaaataatcttgttactttgcatttactgaaattagatgagctgaagttcacaatttttttaataggtctttgtctcatataaatgagctttggtacaaaactatactacaatatctattcttagtttttctataatggagtcttagggtgatgtgtggttcggagaataaatatgtcattatattgaatcaagttgattttattactttcgtcgaaagtctctccagctgttttcaatcttttaattttattacctcctattgatcttgtaggttcgttttctagcaaaatcttttgttgtgcctggaaatcatcttggacagcagagtcatggatttcgttggccttacggtcctgtatgctattctattagaacaaactttatctgttacattttaattatataatttgatgtctttaagcaatttttttagtatatagaatttatttgcaggttgcccttattaatcctttcaattttccacaagaaatacatgtacttcagttgatgggtgcacattatatgggcaacaatccccttctcaatgtcgatagcaaggtatatcattgtatgaacctaaagatatactgaagattcatactatagtctattagtatcatgtttcgggttgatcatatatattagattagtgtgagtgaacacatctaaggctgggatttactacaatttttggagaaaagggatgggttagggtagaggattcatgcatttaaacatgttcttagagtaaattctgatatatatatattattaaatgatttctaattatgtttcacgaggtatattttcatatttaaatatatatattttttatatattttcatgaggtatattttttgtcattttggctttttaaatactgttgcaagaatgcaactgcaaatgattgcttcggcgttcataaaatttaacttaaacactggatatctctgttcttggaaaattacctttctctgaaatataaaatgtttatttgttttgtaggaaatacatgaaggtttggatttttctgccgatgatgatggaggttattccttgggtattttttctgtgaaattttcgactgatggaagagaacttgttgctggaagtagtgatgattccatatatgtttacgatcttaaggcgaataagcaatcccttcggattcaggcacactcggtatataaccatatcatagatgtctttattataccccctcacttattgtttttggatggcatactactttttatcatagaaaacttaatgtggaatctttgactcagtttatgtgttttttcttcatttgtgcttcatctacccattaatgttgaaactactcattgttttccaagtcaatgttttcatattttgccccattataggtactgaataatgtgtaataccctttttcatgactttcattttgcagtcagatgtgaacactgtttgtttcgctgatgaaagtggccatcttatatatattctgggagtgatgatgctctttgtaaggtaaatatagcaaaagtgtatctttttttgtttttcttttcataccatatgtttatttattagttttcccttgaaaaaagaaaatgcatgttgcaccaagaaatgtagcatcccatttatgttggggtttggcctggtagagaaggtcattaccaattctaataccacttaaactgtagttatatttttgagataattaatatttttttacattttacttgtattgaatggatacgtgacttgcacgtagcaaatgtccttaaagtcttggaagatggatatctgaaaaacactcggcctgctggattatgacaagcgattgacacattcattcacagctcatctgaaggttgatctatttacaggcgaggaaactttcacaaaatataatttttagttggcgagtcttcactttgctcattacaaagttcctaatgcaggagagatgtttacatttggctatgtgcacactcctccatacataattaaccgagttatttcgaaggatggtttcatgcatgagccggttcttataacagtatcagatccaatcatgatgcatgactttgccattactgagaattatgcaattttcatggatcttctcctgattttcaaaccgaaggtatgttcattcttgatttgtagctgtatatcaattgtctgaaagcttgcaatattatattaatatataaaatgactcccaattaattcttgggtcattaagtgtatgcatggaaagaagtgcagtaactcataattttaacaatcgtataagtttgtatgaaattactaaaattacatattaaaataactcataaggagcgcacaatataattatctattaaaattactaataaaatcttttcaaagaaaactctaaactccacactcataaataattaattaagaactgcactccataaaacatgaacaaaacgaatctttagtttcaaatatttacaatgataattagctacaaaaataatgaatgtactttctattagacttttatttgggcttacattaaattttattggttttattaaaacttgggttgattgaatagttctttgctgtgttagcctatgttgttggtgatcaatt

SEQ ID NO: 19166 - DNA, 2320 bp, Cannabis sativa
acaatctggtttagacatgtcctactggttgcatgcttttcagtgtgctgtgtactccatcaacagaatgcctaccacattgattggcaacatcagcccatttgagtgcctgttgcataaaaaaccagattacaacatcccaaatttttttggatgtgcctgctttccccatctaaggccttaccatcatcacaaactagagtttagatctgagcaatgcatttttcttggatattctcccaagcataagggctacctatgtcaaaacttagctggtagaatcttcattgcaagaaatgttgtcttcaatgaaactcacttcccagctcaaaaggcatctactcctgcacaggtatcttctaaactctcctctcagtttcctactacacagttctttactactaccaataatgatgtcactcactctcttgtttcatctcctaatgaaattgagtcattaaacacattgcttgctgccccaactgaacaaacacctgctgctatgcttgaacctgttgcttcatccttagaagcaacatatgttaatgacaactatgcttctgctacacaaaatgctacagctctgttcatactgctccttaaatgcctgactctcaacatgatagtgcctctaccagtagatctgctgagtctgttctcacacctgtcacacaaactcagcattcaaacacatcctcatcgagtagtatctctgcaaataatccaactcctgctactgctcctctcagaacatactcaatggtaacaagatctcagcatgacatttataaaacaaatgcctatcttgccaccaaacataaactaccagagtccttgctacctagagaacccacatctatcaaaactgctcttaaagatcctgtttggaatgcaactatgaaaaaagagtttagagcccttaaagacaatgacacctggacacttattccctatgagcctcgcatgcaccttattggaaacaagtgggtacacaaaatcaaactaaatgttgacggctccattgacagattcaaatcaagactttttgtcaagggatacctacaagcacttagaatagactatgatgagacttttagttctgttgtgaagcctgtcacagtgagaatggtgttaacacttgctgtgtctttcaattgggaagttaggcaactcaatgtctctaatgctttcctcaatgggacgcttcaagagagtttatatgactcaacctcaaggatttgaagacagttcaaagcctaatcatgtctgtctattgcatacggcaatctatggactaaaacaagctcctcgagcttggaatgatagactcaaatctactttgttggcttggggttttcaagcttctaaatctgactcatccttatttgtttatggctctacagacacactcctaattctcttagtctatgtagatgacattctaggttactagaccaaatagctctctcatcacaaagcttgttaatgatcttaatacaagttttcaaatgaaagatcttggccaacttcactatttcctaggtgttaaaatatgcagggataacaatggaatgtttttgtcacatactaggtacatactagatttattagtgaaggttcatcttgagggtgccaaaccttgtaccagtcccacaagtattgcccacaagttatctttatctgaaggagttccctttgaagacaatacattatatcgaagcactttaggtgctttgcagtaccttacacttaccaggcctgatgtggcttacatcatatacaagctgtcccgattccttcatgctcccacatatgtcctttgggaggcttgcaagagactacttcgatatctaaaaggcaccatatctgaaggcttactattaaaaccagcaattagaatgtctctcacaacatactcagatgccaactaggcaagtttcatagatgacagaaggtcgataggaggatatacagtgtttcttggacctaatctcatctcctagtcagcaaagaagcaacaggttgttgctatatcttccactgagtttgagtttagagctttagccaatgcagttgcagaaatcaagtggatcacttctctatcatccgagttgagcttaaatttgcagatgtgcctgttatgtgggttgacaatcaaagggcagctgcacttgctgcaaatcccatattccatgccagatgcaagcatatggaaatagaccaacattttgtcacagattagatcttaaataatgaagtcttagttcgatttgttcctttggttgatcaagtggcagacatccttacaaagtctttactt

SEQ ID NO: 19167 - DNA, 5219 bp, Cannabis sativa
ctaggtggcccctaggcacaggcctagcccgcctctgcccagggccggccctacaagtgatgttatagtttctgctttttggcacataatgggcaccttctcttgaaatagcagaagctctaactttaaaatatcctgctaaccaatgtcgcttattgggtctccaaaatgtgtggtttgaatctgattgtttgaatgttgttttgaagtttaataaccaagttcctttggcttcttctctggagttagtcttagcagattttagactcagtttttcagcttttcactgtgttagtctttctttttatgctagaacttttaatattgttgctcattccttagctaaatatgccttgtcggaaattattagtaaggtttggtggtccggttatccttgttgtatccataatctcattttatatgagaagaattaatacaaccagttttcctttcaccttttctttaagcttttttgcttaaaaggtgatctgtgggattttttttaaaaaaaaacttttaaaatattttttatttgaaattattaatttatacaatttgaaaatgacacatgttgccacatgtacaaaattaacacttcacagcctaggtactaacaaatgcaccaaaaacctaatggtaagcattaaaaaaattacataggtattaaattacaacaaattaaattttatagggattaatgccgttaatttctctataatattattttgatgattggcttgtatagtatttatttgatgaacataatacaagcagtatttatcattagtatattattatatttttttatgaatttattcattacttaaaaaaaaaaaataagtttgtcagttaaaatattattttgtataaatttcaaaaaatattggtgtaatttattatttgggtaatttttccaaaaacacatttacaaaatggtattaactcttaaacatattctcgatcggttcttctagtttacttcattggtcgaagatatccccaagctccttgcacgccggtctaccccgtccactcccccaccgcactccaaacccatacccactctgacgccactgtaggtgaacctctctctctctcacgagcctcttttcttctccttctctctcagtgttgtataatttcctatatgggattattgggagtgagtagattatacaatatagtattgtatatacatggaatcattgggtttccctatgatataaaatcatttatttgtgcaatttgtgaagctaaatagtcttttgatgtttattaatatgggaaagcatgtttcgggttccacatttggcaatatgatattgtgaagttggcatatgtactgtttgattaaatgattgtgtgaacaatttgtttataaagtttttctttttccctttagcaatttttttatatagttgaaaagccatactggtgctttataagcattcatggatacgctatatgggtcattgtgttgtatgttgttaatgccttataatttctagtttctcatttaactgactgtttctgaatttcgttcataactcaagtttgtgaattaatcaatttaggtattggtatctgctaattttgatcacattcttttatacttctcactggaagcatgttccattttggatattaagggtaatataaaaagcatgccttttctgtaattgtcatttgcaatatccaatactaaattgaacaagagcatgattcttaagtagtgtgaggcagagtgaactggtttagaatttcattcattgtttatttatacttccaatattttttaaatcacttttttcctccagccctcgctcactccaatttttctgttctcctcagagactcccttgtttctactccattattatcacatgctattagctctcaaggctacttattcaggtatcattttactgtctctttcctatgaatgggccttcttttttttctccctttaatctctttctcaataagaaattttctctctaatgttgtatggcatttgcattgtaaaggtttttggatccatatgaaaatggtgtaatgactaaatcagattcgtaggggttggatttttctactagaaaggtaagaatctatttctatatttttttgaggttaagttttgtattctttggttcgatcattgtttctgtgactagaatatccttgatttttgttttctgcgttaaatgtcaaagagggatatgataggaattgattgctgcccaaaaaacttagaacagaataatagaataaaaagctaggaaatcggccacattatggaagagaatggagttagaaaatagtggacagatctgatattgctattagatgataaaaaagtgataagaacaatagaacccgaggtattcgagagacctcaactctcccaagggccaaaactcaatctcaatcccatacagtttccatcccccacccattcaatctcgtctcctatttatattgctcggttcatacagcctaccacctcttacaattacccatttaccctctatttattatcttaaggcccaacaataccgactgcccgaaattcaccatatcctcaaggtgaagaacatcaagtttccaccgcagaccgtactcgtcttgtgtaaaagaaccaagctagcaaatgcatattgttcaagttgtgagagatatgcaaacattcagcaagttgacttcgatcaaaaaactagccgaacaaagttgtatttcctctcattcatgatgaataaatccaaggtagagtgaaaaacaagctcccttctaccgctggctgcacaagttaagagcagaaagaatttgaatttggtgccctttgtcagaaagccaacactgtgaacaaaacactagaacaactctaaaattccatttttcagcaaaaagaaagtagactcggtttagggtcagcgagctgagagaaaaatgcattgagccaagccaaaatgcaaagaccaaacttccgtgacaaaaccctctagcagctaagatgaattaaaataaagagtctgtcgaaaatccaatgctgtgatcgcactagaacaaccttaaaattccatttccagtgaaaagaaagtagactcggaacagggtcagcgagctgagagaaaatgcattgaaccaaccactaattcaaagaccaaattcctgtgacaaaactcctctagcataggagttagttcactgctatgtgtgggttggaaatttgcttgaaaactagccactagtttctcgatagcaccaagaagagaaaccaagagctcagggctgcgccgggtagaaaaaaccctaaaactcatcgctcatcgaaaacctagaaacaaccaaccccaggaatcaaaataggagaataaaaactatacaccctcaactggtaattgtgcttcacttgtaaacttcagtggaaatttgttggtattcttgccactgataaaaaaatctaccaagtaatagaagacatttccttttgtagcaacaggttcaccataataagaggcctcctccattctcccaacaagcccataataagaagaacacaagaaaaagttccataggaaagagattggagggctgcattaaaattcaactattaaataacccaacaaatctggaacttattaatttcttggggtcaacagatagggggcttgaaaaaatgtcactgctctttgttggcaagcaccacggtggttgtcactgtgcgtaggacacccgagaagggacgcgcgatcctaagtccttgcgtctatggtagatgacattggtgagagcaagtatcgaggaagggactaccatctcgtgacaagaagatgaagaagaaatatgaaagtgggccataatagtgggttgggccttacttgggtcctagtgaactaatttattaattaaaatattgagtttttggcaacttaaccttccaaactatcattttacttgcactttacttttcatgttcaaattttggtggtaaaaaacccttcaaaccaccgaattgttgacaaatttaaggtgtcatctatttaccacaattaactatcaacataaactgcttatgtgtacactcttagacatgtgacacatttatattagtacatctaacattgttatttaaaaattataaaaattatttcaaaattcatttgaaaaataaataaattatattcataaagaataaaatattataaattaaaaaaaattaatttttcttcttgatttcgaatttttcaccaagtctttctttcaattgttccaattcaacaacatcatctccaatcaacacaatatcatcaacatacacaattagaattgccactttacattcttgtgaatagaacattgtgtgatcaacttgacttttagtgtacccataacgctttaacactgtaccaaagcgttcagactaagctctaggggattgcttgagactgtataatgacttcctcaatttgcaaactttccctgctccaaaacttcgaaatctggaggaatactcatgaacacttcttctttaagttcaccatcaagaaaaacatttattacgtctaattggtgtaaaagccaattagaattaactgctagagataacaacacacaggagaaaacatttcttagtggtctattccataagtttgagtaaaaaccttagccaaaagcctaacacacgaatacagttaattttagcaacaggagaaaacacttcttaatggtctattccataagtttgagtaaaaaccttagccaaaagcctaactttgtacctctgcacacttccatcggctttatattatattgtaaacacccatttacacccaacaatttctcctttggtaacttcacaatttctcaagtaccattcttttttagagcattcatttcttcaaacactactagcctccaattcggttcatctactgcttcctgaacattcctaggcacaaccagttctaaattttattggtaaaggtttttataggattcaaataagtgcttgtaggatatgtatttagccatggggtgcttggttcaggtacaagtgcctttcctaagggtaatgggaagactgtccaagtcaatgtttcctggggctgattcaggggtaggtttaggagcagaattcggatctaaagcatgttgagatggctgagtaatatgtggagatgaatcaataacaggattagaagaagaattacctagaatac

SEQ ID NO: 19168 - DNA, 2251 bp, Cannabis sativa
atgatgtcaaacatgcacttagggttagggtgcaactaataagtgtaagtgtagatttttttttttttttgagaaataagtgtagtttttagaacagcttaaatactttcgcaaggcagcttaaatagcttttagtagtgatttcataagagtttgataattgagattcctaacaatttttgttttttaatttatttacaaattttgttgtgtcaaaaaataaaactttataattaattaattataaactacatacctaacaatcaccaaaacattaatttagtccatgttttttttttcttcagattttgttaaaaagttgttagagagatgtggatcccagattttagaaaaaccagaagatgagtttggatggatgcctcatcactatacagcaaacaatggacaatcaagacttgtgagattatttttggaagccaaaaaatgcattgcctacatcaaagataaacaaggtatgactgctcttcacatctctgcaaggatgggccatgtaggagtgatgagagcattgatggagaaatgtccagatattggtgagttgttagacaatagagatcggactgcacttcatattgctgttgaacacaaacagagttttgtggtaaatactttactaagtatgagaccttttgttaatcttataaatgagcaagacaatgaaggaaatacagctctacatgtagctgctatggatggttattctaggatttttaaatgtttggtaagtaatcagaatatcaacaagagaatcatcaataagatggggatgactgcttttgacattgctcgtaaatcagcaatcctaggatatggttgtcttgcagaggtatgtccctagctaattttttgtatttttaaaaattattaaaaaaatatgtatattttttaaaagatattttttttttatttgggcccctaaaatgagtgggctctagacgcgggcctagcccgcctatacctagggccgaccctacttttggcatacatttagttggaaggaatgaaactataaaaataaaaaaagagaatgagaatttgataagatgtatggggttccattccaaaaccaacaatgagatgggtagtccatacacattttatgtatgctatttagtttctacacattatcaaatgaaactctctaacaatttattccacatattatcaatgtaagagggtgctccaaattattttatgttttttattttcaaaatacaatacttgtgcagttagttcttagattttttcttacaaaaaaaacccttgaatattccacctcgacatgaacccaaccccgatctcatcacgcacgcacttcgaatgtcggccttagtcccaaatctaacttgggccttgaccttggactcggtccaagtcacgaccccgagccctaaacttagacctcaacctcgacactaggcccaacctaatccaaacccggacttaaacttggacctcagaccagactgaacactagcctcggcccaagacccaactccaaacctatagccttggactcaaacctagtcccactcctgatcctagattctagctcaaaacctagacccaacccaaatcagtggccaagggccgaggctaatgatgaaaaagaaattatcaaaatagattatgttctctcattttttttaactcaattttcaaaaattatttttgaaaaatatggccaaacactcctgttgctttttaaaagcagtttttatttttaaaattaatgtgaaaataaatttaaagctatgaaattaaacactccctagctaggacaatctattctaacagacactatattctctaagtcagcgcgcgccaagccaagggcctaccactcacaccttttctatgtacgatgtcagagattgtctctcatgtcacttagagcgtgcatgtccttgtgtaccgtgtaaaacgatccaatgcatggctaggagcaggggtaattcaaatgagaagggcccatgagtgacacgcgtccaaagcaccattagtacacaaccagtacaatctgacatcggtaaagaccacatgacaaatatgccacttaccaatccaacggtgggggtttatcctcatgaagatccaccgacgacaatccttgcaagggatcggcctataaatacccccgaagatacacaaggcgggggatctcgattcgaacttcgacttcttctcctttaatcccttcatctctccattgaaggcgaaccctttataa

SEQ ID NO: 19169 - DNA, 4003 bp, Cannabis sativa
aacttgacctccacaaggaaatagtctacaaagatgtcctccacttgacaaaggctagcctccacatccaaaagctttcctcctcttggtaaagctaacggtgacctataggatcttggcaggcacatgacctgccaggtcctggaagaagcatggccaacctgacctcaacctataaaacttgcatggctggacaaacctcccctgtaggtgtatgggcaactaggattgacttggctggactctacatacaacctgatatgtggacagcaaaagcgctatacctgcgaattgggccctcttaataacctaataaactgatggaaaatatctactttttaggggcaatatagtcttttgtatttaatcaatttaatatgtaaatatctaaggtttcaattgtaaattagggtttaggcttttttatataaatgtcctaactctaatctagaaaacctaagtctgattctagcctccaaatcactctaagtctaaaaccgtagcctctctttctctctctctccctgctacatgtctaaagggattctctcttcctctctcgcacgactttaaggctataccattctgtcattagagatttgcctacttcatccatgctttgtaaccttacagagagctatattagatcccacctatagtgatctaaatagtattatctctaggtatcaatacaaccaaaaggggagtaggtcattacccgctaagtaagagggtggaacctctaaaaaaatccttatcttatttactttattgtttttgctgtgtaacacgtggcaaacatcagatatacgacttcgttgtcagttgatcactttttgaggtcaacacccaccatgtcttcatgtgaccatgcaaagaggtcaaggtttagaaatcttatcaaggctaattttatttctggcgctaaacctttcccagtcttcaatttcttggttggaagagtgggatcaatctccacttctcccagttcttccaaagctccaaagctatctataggatccccaaagtgaggacctatgtctgtttccccactttgggctggacttcattacactttgctagagtcttggtcagagctcttggtgggcatcttctctttcttggttatagatgaaactaggttgtaacagtgttaggaaaactattggtctccccttaagcatcctgccccatgccttgttgggaactttgggcataggtgatagatcgatgttaccgccttcaggtcgtatagggatgatcatcctatcatcgaattgaaggctaatgacatgtcaattaatacgcattgttccattaatgttcatgttgtgggattctctgtagcggtcaagggaagtcggatgtatcctattagtgtaatgccttggccaaaaaagacatacattacatgggtgcaaggtactaggtctgtcagttggagcccctcttttcaagttaatttgaaaaggatgttggaggagactccattatccatcatgcacctagcaactgtcatgttcctgatctgtgctataatgactagagggtcattatgtgggaagctgacctgggcagcatgtccctctgtaaaagagatggcatgctctctaagcttgagttacttggaacctctttcttcaatagctaggatgttgcttttaggctcgtgatgaagagtccgagcatagcgttctctagccttacttgtttcgcttgcaatatgtggttcaccaattatgacccccaagtgacctgccactagtggtggcatagggtctttattctgggtatcttgtgcctgagcttggttattttgcacataatgacgcaagtggggaatatttttccttgtgaggaatttaatctccctcttagagttttgacactcgttggtttcatggccaaaattattgtgaaatcggtagaactttgacatgtccctcttattcatctcctttttgatagaatgaggcttcttgtatgggacagtagcctgagtggccatgtaaatggtctaaggtttttcagttgggagggtgaagcatgtgtacttctcctctttttcctttcagtttcatggcgtaggggaagtgctgtacttccctttttgcaactgctctgcccaaatctattgttgttgcacttgcctacaatattcttattgttggagggctggctggcactaattgtactagcctgcatgtttggcatgtcttgggacttcatagcactctgagactgcctattgttgacttgccctcctgtatgggcttgtttgatagcttcctctaattttatgaagttgtttgctcattcgaggaactcctttaaattggtggttgagatcctttggatatctttctaaaagtcactcaacggaaggatgcctctcagtatggccgtataacggccttcctcagttaggcatttgaccttaatggccttggccatgaacctttgaatgtaatccttcaaacattcaccttgtctttgtttaacctcgacaaggtcttccaactgtgatggtacctgccttaaggacgagaattgtgtgtagcattctcaagaaaactcattctaagaattgaatcttcttggagccaacttgaagtaccattgctgggccatttctgacagagtagctggaaagattcggcatcgcacatcacatgtgactttttggagatctgtttgtatcttgaagtacttgatgtgtgcaagaggatcttctctcccagtatacatattccatactagcatcttgaacttaagtaagggcaaggcataaatgtatgccgagaatggagacccccttgacctatctagtttaaggtctgatggttttgggttggctaggccctttatcaaatctcttatttgatccaagtgtgcttgcacaaaagtatctaatgttgtaggagcctagttgagtggcccttcttggtttggctgtaaccctgggttggctagaccctggctggccacacttgggagagggtatgcccatggccgtccaactctagggttggcatctggctttggtcggctagccctaggttaggaaactagccatggttggccagccctcacttaggcagttgtccatggccgacaagctctatgctgggtagtgtctggcgactcgttctcccctgattggccggtgtggcctgtgtgttgacacaggtttgatcacactaattgttcaagtttgttagatccaactatccgaagtgattgttcaatggtggaacaaaatcacttcaattctcattccttgagttgatgttgtcttgggggttttcaccttcttttggacctagccgattaaagataggctttagaatgacttgcttctaaatattttggagaggattttttctctataggccggctagaggctagccgagggggggggtgaatgagccaaagatacttccccgttccccagccactaggtgctaaagtctagttgttcccgccacaagatctgtttggtattatttgtccatccttaggcaaggagaagtgcatcctcattcttgaagaacttggttggactgtttgtttgctgtctgcttgggcgtagaccctgcctgacctatcgacgagcctcctttggagaggatctctaatcagatcctttcctctccaagaggttctctcattgaactgccttattaggttactagcttccctgttatggcagttcagctctgcctgatgagcttgaaggatggcctcctagtcatccatccacctcaggaatttgcatctctattgggcaaaagcattgcaaccaatagtgcatggttcttcagtttggccaacttggcctatagcctctctaagtctggccaattaaatgtcttctcccaagtccacatgaggctcaccaatagctggctcgccaattcctaaacttgtttcccctgtatagtattggggaatagagttagttgtggtacgtgggggttgttccacattgacaaaaccctct

SEQ ID NO: 19170 - DNA, 10233 bp, Cannabis sativa
aaattaataaatttttttatatttaatattatttattttttaaaataaatatatattaaatattattataatatgtataaagttttaattgtatacaagcagtcttattgtaagagtatatatcttatatcttaataatcacatgatttaaaatcaatgataaaaaaagctttcctactgataagaaacttatgctaagttctaccatagtcttgccctatatatataatataataatataatactatttagttaggaaatataatatttggaagaatttaataaataatcaaattaaatatttaccccacaaataaaagttacacacgcttatattatattttaaatataaattataaattataaattgtaaatttatcctataataataatgctaagttttttttttctttttcttttaaaaaaaaaaactaaactaacctaatacatgaataattataataaaaaattgacaatttctaaatagcaatcatgatttatattatattaatcactaactattaatataaatttaaaatctaaattttcttctcccaaaagaaaaatctcctaaaaaatattctaaataaaatcttaagaatataaagaacctaagtaataaaaaacaaaagtgattaatcaaactattttttttatcaattattataataactgagagatcttccgttatgaaaaattagtaaaaattaaaatttgatataatttattacttagttatcattaaataaaaaatataattcattttggatataaaatttattttttttttaaaaaaaatctatcgcgaagcaccgaataaaatatttgttgtaatggattaaaaagaaatattatacttgtagaaatttttagcgcataacaccatctctaatggaagatctaaaatttatgctaaatttggcacaaaaaatgagtttgtactatatttagcccactatttataattgtgacccaatgcaccagatgtaaaataaaaaaaaaacaattaattatattgatggtcatttcatattttattgagaatatacaaaatttattatttaaataatgataatatggtgaataaagtaaataaagtttagcaaagtgattgctaagattttgtctaatcgattaaaacctcttttgaaagagcttgtgtctcccttccaatctgcctttatcccgggaaggtggatagcggagtcatcaattcttacacaagaaattattcacaagattcgtaacaagaaaggccaagggggtcttatggcattgaagcttgatatgcacaaggcttatgacaaactagagtggagctttcttgacagagtccttagagcaaatggttttagtgacaaatcctgtaagctcttaatggcttgtgtcactacgatatcgtactcggttcttttgaatggatgccctctcaagaagatccaacctggtagaggtatccgtcagggcgaccctttgtctccatttttatttgttctttgtcaagaagttctttccaagctcataatcaaggcagaggagaaaaagcacactaacggtatcaagatcagtcaagcagcccccccccccaattactcatctaatgtttgctgacgatactatccttttcacccgagccaatgagaaggatgccaaaggaatggtggagtgtctatcaacatatgagaagtggtcgggtcaatcctgtagtaggcataaatccagcgtactattttcaaagaatctgagcagtggcaagaaggacaacctgttgagtattctcaacattcagcaagttcttggtaatgagaaacatctgggaaatccttttgtctttaaaagacgaaaaaaggaggagtatttgaggctgaagaatagtatgatgcaaaagcttgaaggttggaagatgaaactcctctcgtatgcagcccgattaactttgatcaaatcggtggcctcagctatgcccatttatgcaatgtcctccaacaaaatgcctattggtagttgtcgtgaattggatgccttgatgagaaagtattggtggatggggaacgtggataaaaacagattcttagctctcaagtcctgggatttgatttctcaacccaagtcctctggagggttgggtttaaggaggtgtgaagacatgaacaaggctttaatgtccaaactcgcgtggagccttgctaccaaaatggagcggccttgggtcgactgccttttgaagaagtattgcagatttgaaagtttctgctgtgtagatcagagaagcagtgattcatacttatggaaaagtatccttgagtctagggaggttatcttcaagggttctatggctattgctacttctggagagtccataaatttctggaatcaattatggattccatggcttgagtttcaagagttcaaagagcttttgaacaacattagaggaagaggctacacaattcaaacattagctgatatttcgactggaaatcagtggaatgaggaggtagtcaatcaggtttttagctctgatctggggaagagaattttgctcattcctaggattccttcccttttcttcgatcaagtctactggaaaaatgataaaaaaggagaatttttggttaaggcagcttatggtgtggctaatagctggaaatttgctcctgtcaaagagatttggaagaagatttgggataagggattgcatcctagaatctctgttatgctttggagggttctgaatgaggctattcctaccaaggatagacttcattttattagcgacaaatcttgtttcctctgtggcaatgaggaggaggatggccgtcatgtgttttgtctctgtggttacgcaaaagcgctctggtttggtggtagatttccaattagaatagaccatattcaaggtgaaaatttgattgcaattgtggaaaacatgctattattgctgtcaaatgaagcttctatgcaggaagtgcttctttacgtgggctgtgtcttctctgttatttggcagtcgaggaatgagcttgtcttcaagaacatcccagctaatccaagttgggacttggcaaaaattgagaacaagtttctagagtaccatcttatggatttattaaacagaaatcaccaagaagggtctctcagtatcgacaccagggaacttgccttgattggggggagtgaagtcaatttgaggcaggggcattctaaggttaaacatgcgttttttactgatgcatcttggctgggaggagacactggtctagctgcaatcgtagtagactacatctcaggtacctggtttgttaaggcacacagatcacattcccattcagttttagaagcagagcttagtgccatccttttagctcttgagtgggcagtggagttgggttggtctgaggtgtatattttctcagactcgatgactgtcgttcaagctttgaagtcacagaagggtcctcatgactggaaagtttcagctttatatttctctttaattaatttaactaaagtgagtcctggttttaagttttattttgtcaatcgtggttgtaattctgttgcggatggtatcgccaaaaaggctagagtttctagcgatatggctgttttgtatcaaggggagggaaatccccctgtgattcccatcaactttctatttatatgaactggtagttctttaaaaaaaaaagtttattaaaagttaatgaatcataataattagtggcattatagtaaataaaaaagtaacatttattgtggactaaatttgatacaatatgtcaaatttggcacaacttttagcatgtactaaatttaacaaaatttttagaacaccattagagtataatttttttttttaagtgtgctaaaatatagcaatacaccactttttcgtactccattgagatgctctaagagcttgtataagcataaagcatcctctatgggccctgagctgggctgggcctagcgaagcctgatacgacaccgtttgtccaaaactcaatgggaaagtttccttatagttttcatgtcgtgatgctctctaagcccttttatttcctctcactaaatttcgtccctcgaaagcttgccggagcttccacttttggcggacaaccggttttactttcgacccggagacagatcggacttaatcgtccaatcggagcagatttggtctcagattatatcttttaatagattatccaaaattgttatagtcgcaattattgtattttgtctttggttctttggggaaattagttcatggaggaatactttagcagcgatgatgagtgctgttattccgatcgggattctctggatgggctcgagaacgaagactctcgtacgcactgggcaccttctaagggccctgccagtaaggtattccattttctggggagtatttttcttattaatggagcagacttcaatgttctattaggcatggattgatagaaagttatgttttttattagcgtttttttttttgttggggattctatcgggtgcgtgttaatctagtttttgttattcatgtttggcgcatgaagattgggatatattattttctgaggttgctggtttctaaaatttcgtatggtaattgtaaagggacatttgttctctcaattgaagcaggaaattgtaggtaaatttcgtgaaactgcggctggtttgataattttagctttataactgtttcttttagtgctctttcatctgggtaagtagtgttcgttccgactttgttgaatttggatacttgtttgcttaattttgtctctagatattttttgtttttgatcttatttatatgtcgtattgttgagttttggaaagaattttcaggtgctttatatttcttcttcagtgttgtagttcccaccaagtttttgtaaacccttttatcttttgcaggtaataacgaaggaatctctattggctgcacaggtaaaaaaagaaaaacctaatattcattgctcattactctttctttacttgtatcaaatgtgactacaaaattttctaaatctgaacgcttttgtgtagagggaggatttgcgcagggtaatggaattgctatctgtgagagaacaccatgctagaacccttctcattcatcatcgatgggatgtggaaaagttgtttgcagtgctagtagagaagggaaaatctgttttatttatggaagcgggagtttcactagctgaccaacaaaatcttggcgtaccactgcctccgacagtaatgtgcgaaatttgtatagaggatgtacttggtggtgacgcaacaaggatggactgtgggcattgtttctgcaatgaatgtaactctagcctctctgatttatgaaattaagtatttcttattgtttttctactgtgttttccgtggcacttattgggtaccaaccttctttgattattcttcctttgccttattttattttgtacaggttggacagggcattttgttgttaagataaacgaaggtcagagtaagcgtataaaatgcatggcacacaagtgcaatgcaatatgtgatgaagcagttgttagaaatctagtcagtaaaacccatccagatctggcagaaaagtttgatcgttttcttctcgagtcttatattgaggataacaaaagagttaattggtgccctagtacgcctcactgtgggaatgctatacgcaatgaagatgatgatttttgtgaggttgaatgctcatgcggtttgcagttttgcttcagttgcttatcagaagcacactcaccttgctcatgtttaatgtgggagctttgggtcaaaaagtgccgagatgaatcagagaccgttaattggatcactgtccacacaaagcattgtcctaagtgtcataaacctgtagaaaagaatggcgggtgcaaccttgtgagttgtatctgtgggcaagccttttggtgagttttcttcttacctgtacttatcttgggttcttctgaggtctattctttaatgttttcatccataccttgtttgtttgtttattttattatatatggtgtgtacttatttggcacctgtttctatcaaaatacaactttggtaccatgcttttcaattatgcttatgtggatcaaactttctttaattatataagttccaaattcaagtttaattgtttaattacatataactgggagcagtttagtcaattgataaaattttattgatcaaattttagtttagggtaccaaatatgtttaattttaaaataatggtaccagatgagcattattgaaaatatagggtaccgaacctgttcttttgataaaaaacaggataacaaatgagtatattccctactatttcttatatacatttttcataatagtttttataatatgtataatccctttgttgtactttttatctcaattgactcggtttgaaagttcattcagatacatttttgcagctgtgaaattgattccccacttttgaaatttcaatgctcaaaattctttagtaatttaaaataatttcctgttttcagtttgatattttacttacaatggtatttatggctgtgctgtaactatttttagtttttgatgatagaaaataaagtcttgggatttctgttttgtttcttaatcattttgcaatctgatgtccacggaggacaagttgagcagattttgctgaattcattgttaacgtggtttcctgttaaagttgtatctatggtctgttagatatctttgcttgtttagttagtgtctggagcttcaagacacagttaggctttttgtactgtttgacacttggagcttttatgctgatcctcttattaaaataattgtcaagttttgccatggtctatatactagatagtgtatatatagttttaaaagttggtcggtgaggcggtgaaaagatgtatctgaggctacgcctcatctgctgtcattgaggcgttggcatacacctcacaccgatgaggcagagttgaggcctctaaggcgcatgagtcgcacacctcaaaagtgggatttttttttttgtgtgttagggctgttgttttgtgggctgatttggttttttttaatagcttttctaatatctatttttagacttctcaatgactctattgggatttagtttgggtatttttactagatttttttttttatagaaaagataggaaaatataaccctaaaatccctaagcatctcatacggcatctctgtctctccttctcagccgagtccctccttcctcagtcctcatcaacctcacgtatagtcttctttatatgtttagaacttttaccgtattttgtttgaaattgaaccttttatgaatttattttatgattttaagacttaactagtgattttgatgaattttatgtcttttttatggaattatgtggtgtttgttatgaatcttataagttgcatgatattttatgaagtttttcttttaattgttgaggcatacgccccgatacgcctcacgcgactaagggaaaacgcctcagtacccgattctgttttttaaaatcacaagtgtattagtacattgttgtttgtttagccattcatctgcatttcaggcttgaatagctgttattctgtgttcttggaaccagtaatgtagaattataacttttttatgcaaataattcttctcctagtgtacagattaagttgcatttatttttataccctgtctgcacttttaagtaaataatagacttgcagagttactgcatttgaatgttctttttattatttacatttggaaattgaagctaatctattttttcgctcctcatgaggcagttggctgtgtggtggagccactggccgagaccatacttggtcaagtattgcaggtcatagttgtggtcgctacaaggatgatggagagaaaaaagctgagagggcaaagcgggatcttttccgctatatgcactatcacaatcgttacaaagcccatacagattcctttaaactagagagtaaattaaaagagactatacaagagaaggtttcagttttagaagatagggattcaaagctcagagatttcggttgggtaaacaatggactctacagactttttagatcaaggcgggttctttcatactcgtacccatttgcattttatatgtttggagatgagctttttaaggatgaaatgacaaataaagaaagggatataaagcagcatttatttgaggaccagcagcagcagcttgaggaaaatgttgagaaattatcaaagttcttagaggcaccatttgatcagtacgaggaagagaaagtcatgaacgtaaggatgcaagtactaaatctatcaacaataactgataaactctgtcagaagatgtgagtctttctacaattagtttctaaattctgaaatgctcatgaaattcatgtttgtgtaaatgtatcctctacactcatactttcttaatcctgtgcaggtatgaatgtattgagaatgatttattgggttctttacagctaggtatccacaatatagccccttacaggtcaaagggtatcgagaaggcatcagaactttctgtttgttggggcaataattctgataaagcattacattgtggctcaagtggtatttatttaacttttgcgactatctttagtatattctatattatttaagtattattgtcactgttaattatgacttaaaataaaacaaagacgagtaaaatatgtgccatacaaaattacacccaaacttcatgtacttatgtgcataatcattactcaacaaagattaataaattttgtattttatatgtatagtttatgtgtacatacatcattactcaacaaatgttaagaagagtttattcattttgttccttaaatgattgatatatctgaaatgaaatttacaggacggacgacagagtcagatcaaccttctgggtctggaagttcagaagagagtggaatttcttctaggaaacgtgctaggatggagggtccaggtggggccttttttgatttgaatttaccagcagacaacgttgacagaagtgagctctaaaatatggcaagcctcgtatagaaacaggtgtacagtcagtctctactctagtgtaactaggctctctttcggtatcttaaatcttaatggtggattaaaaacccaagtgctttacatactactgccattgctaattttaacacattgttgttaaaatatcttggatgacatttggggctcctctctacagaagatcacttatacttaccaatttgaacatccttactattttgtacatatgtatattctcccctcaaatttgggcaaacctttaatattactttacttggagtttgaggcatttctttctttctttcttttttttttttttttttgagataattaacttttattttctcttccaaatggtaatttaatttttgggaaatagtagtaaatgtctctaaatccttttttactaacttaatgtccttttttaaaaataatatagtaaattttagtacttaaaatatccttagttatataaggttattattaacattatatttactttccaaatagaaacagaagctctgctctaaaatataaatgacaaaacttcctttttcttattttttttcgattagtttagattttttcaaatttttttggtaaattatcgtgatttctcccaaaaggtgatgaaatatttttctcttatctatttattcgattcattcgttggatctaatcatttttccttaattcctcacaatcgaaagcgacaaagctcgctcattttcttctttttttaattttctcacatctccaaattacaatgattacccccaaacaacaaccaaagtttcagtcaaatttttctgtcagtggtatatacattttgtattatgatatatatatatatattctacactatggtataccattcagaaaataaaataaaaaaacttggattgtatattaattttgttgtatagcatacatataattttaatcaaagaataccaatctttagttttttctttctttctttatttcattcgtcatataaagatatgtatttattcaaaaaaccactattttttttagtttttttctttatttttcttatttgatatacatcagcacataaaaaggatatatttgtagattaaatggatatcccatagtgtaaaattaatatacca

SEQ ID NO: 19171 - DNA, 6032 bp, Cannabis sativa
actagccttggccagccagccccattacaggcggctcttgatggtcaactagccctatgctaggtagggtttggccactgttttcccctaattagttggtgcaacctgtacgttgacaggagatactgtttaatccatacttatgaaattataaactgtaaaccgcacaacaaaaggttttaaacgtacatgcagtttatgcagtgtggttagattttgacgttattctcattgtccaattaaatcacaaaatataccaaagcaatacacagtcaggttcaataaccagagtttgcaaacaatacaatttgactagtatgtcatgaagacagcgcctcaaaatttcaatgtcaacaaatgtgaactttttctttaattgaccgaagcaaagtgagaagctaaacaacaaatgaagaggaaaaaataatggcataaagcaagggtagaacattacgaatagccctaccatgtcaacaacataggacaaattaatctcttgcagagcctttaaaattttaatgttgtttcaagaacatctttctctacagaatggcaaggtcctttcttggaagaccacccgctacctatatctcatgaagaatatgaaaaggcctcagtaaactacaaagcatttacccctttgaggccaactaaccgctggccacaatgtcatgtattgcactactaatgctgatatcgtcagatcggacggccaatttcattgcgacctcctttgtactatcgatcccaaaggacaaacgaaccaacaccttcacgttgcctatgtaaacaccagatagtagacatgtgtgcgacctcgagttgttgggaacaacttcagagccctgaaacaaagttaaaaaaaatataagacaaagaaattaacagcttcttgaaagcaagctagaaatgataaggttcttattttcacactgtcgtatgggaggcatatatgaatagacagagatactaagggggtcattacaagcgtaatattgaatgtgtcaataagttaaccccctttttttttgggcaagtcaggaaaatgactatttggtagttaaaagaagcagaaaaaagttttccttgtacacattctatcagtagtcttttccatttttatttttaaagacagatcacatgtctaagaatgacctcccaaatttattagagagcctcacttatggcagatgaaggtaacttatcacataaaacattaggaaaacttacataaatacataaaacctgtctctaaccacataaagcaagcactagtatcttactgtagaatgcttcccccaatctctactaagatcttggaaagaaaagaccctcaaaagcacacttaacgtgatatttttaaagattaaatattagctgaaatagcagactaattcatccactaatcttatctctctactaaatcctttgtacaaaacacatccatcccctaatgtctcaaaacccttcttttcagttgacagttgacaccctaccaaacactcaaaaacaatattttcatgccggactggaatgtctcaattatttacatattccaaaagccaatatattttattcatcatttttcagttattgcatatacaacgcacttactggatgtgaccgaccaccctataccctatagcctgaagcagtctgatacttataaagacttttgtcttttcagaggatattactagtgtaccttataacatgttacatagcaaaaaaagaattgatgggaaatacaattaacttacctcacaaggctgcattcccagaaggctgatgactgcattcacagcttcagttaggctctctctagggccaagaccatattcatccacctgctcgctgtcaggatccatgctttcccatgcattcctgaaattggagactggtactttcaacacgtaatctgccgcaacaacctcaaggtcctccagctggtactcatcttctacaccatcttcatcagcctcacctgtgctaggatcaacctggaaaatccagaaaactagtatgcatgaaaaacacattatatatagccttcttcagaattcattccaccttgtttaaaaatccctaacctttgtggttgattttctagtaagcagtggccatagaatataatatgcagtaaatcattcatgctaggtacgtgttaaaattagaatatatggccaaagacattagaatacagatgatttcagcacttaaagtctagaccttcttcaaataagactatgcagttgctacaacaacgttgttctttcacatattttcaaaattgacaacagaaaccaaaccgtgtgtcagcacacagctcaaatcatatttactctctacaacctatataaatatttatcctatatatggttttaaccatataaaataacaagtaaacatataaagagatgcaaggcaatgtcaaagatgaaaggaaagaactagatacctctttaacaataaatctcaacatgtttgaaaattttccaactgcagagactccttcaggcttttcaaatgccacaaaggtctgtccaggtgtatcataaggaagagctctaagaggctttgatgctacttcagtgaaatcctcggcttccgaagcatccactaaaacagtgacctgccaacaggtcggaagatacattttaaggatctaattaccagtcacaaaaagaacaaggatgtttccttttctaatttagtaattacattttccagtaattgctctgggattgtattggtgcagttatactggaacacaacatggctgtcaaaaatatgcttaacaacattaactgcgtattcagtttctgcttccgtcaactccacaggtggcgaggactggtaacaataataaacacacaagtatggatcagtaacaattaaattgcaaatgtatgtgaagcataagggaaagtttagtcatcacagtaccttgaaaagatttccaaagcttgagaactctggaatagaggaaagcagcttgtcataagcatccacagtggatggaggaccacttggaggagctcccaacccagtttgttttttaccaggagctttcttctctgcaagtggctgagacttaatctccttaggtacagaattaatgtcaaaaggttcttctgaaggctcctgtaacaaaatttaaaaagaaaaaaaaaaacagaacaataagattgcaaccccaaaaaaatatatattatattaaagactgggataactcacataatttttcaaacttgtctctagattggcaagtggaacttccaaagatccaaagaggaagtcctttacttcttcatcagtttcaacaatggagccatctccctcaagagtattcagatagagtgtggccctatcacgaacctagaaagtagatcaattgcagccataattttatgtatctaatgaactgtgcttgtttacaaaatcaaatttcagatcaaaaccatagagaaaactgaaacatataaatacatcattatatacaataaaatataatatctatccgccaaagcaaacaattagaaacacgtgcaggcccacatgcattcaaaatgtataggcatgcatgtcataatttaaaatcaaacatatcagtgatctggaattcaatatatcaaaaataactgacctcgtcatcactgtcaaacagacatcgcctcagcagaatgaaaattcggggctgaagcagagaaaagaattatcatttcaagttatactagtaaccaaaacggatacacaagacagctcattcagcaaaagcaaaaaaaataaaagaaagctataccttcaaggaatcaacaagagcaccgaacttcgctaatgtgctcaccgcacttgccctgacagtagcattctcaagatgtactcgattataaatataccgtatatacttgctgggatctgaagtttttggcccttcaatccccaaaaagtgaagtatctacaatatcaaaattccaatcccacaataaaatgttagttatagtatcatttaagaaacaactcaaaagtaaagatattgtttagcaaatttataatcaatttaaatcttacctgtgtggacagataggtaaattcacaatcttcaatgaactcacagagatgaagcaacccactttcttttgcatcaggaatatctcttataaggattacaattgagtcaacaattgcctttttgtactcaaatccaccttcttctctaagaatgttgcttaggaagttcatcctgttgaaaacagaaacaaagaaaattaagccttctcatgtgtaaaaataaaaatcagacccccaaattatgaattgcataaacgtagaaaatgtgataagccactcacaaggatctgtacttcaatggaaacttcaaacacaatgatcttattgcttccaccacaacaatcttgaactcatcagcaatatcagacatgaaattagttatctgtttcatcaagcgatccacacttgattcattccctgtcttaagaagtgtggtgatggcaagagtggcaatgcttctgtttggatcagatattaaactttccatatcaatgttgcagtttgtaacagccatcggatgtgtcattgccacctgcatcagtcattcacatatatacttggcatcaacaattttcaaatgctaaaaatgtagacaactttttccagactaaataaagtagaaatgatatgatgaaaaatagtatctgctgcacaagatggtttaatttctccagataattagagcacaaaaaactggataaaaccaagagttatcacaacttataacgggagaaccttgttcaaagtgcgcacagcagcaaatctcaacactggcttagaagagcttaaaaagagctgaagaacagtgatggctggagttaattctctgttggttacaccactgagctctgtgattgctttggcagcctcgaaaatcaccatctctgctttatggcgcagacaactctcaagatagtcataaaacggccggtcccctgtttggttgatgttacttgattctcggatgacctgtataaatttggatacatgcttaataataagatcagcagtaataaagccttgtatgcaactgctctctccagaaaaatattcacctggctagtgtagcgaatcaacaggcactgggctaatggagagcgaacagttccccgtgttaagctagtaaccagtttgctcactgccaatcgatcattctgccgtatctgcaatttccacaaatgttctacaacctttcaattcgctaaacacaatgctgaagaatgactttaatggcatgtgatgaccctagcatgtaaccaagaagacagcacataatacaatctactgtacactatggctatgtatgtaagtattttgtaagagtccataaattgtcaactgcaacttaagtgagctagatttcaacgtgaaacactcagaaaagcaaacccagaagtagttatgaaccccacaagactagccctatgttttcatagtagaggttcattttataaggtactcactctatcagcaacatgcaatttgtacattagaaataacaaataacttcctgtgatgaattaggtggttagaacaaaataacttctcaaagcaaaacaaaaaaaggtttagaacaatctgtgttgcaaatgaaattctttaatattataactatataataacacattttttggtggcttctcaatgacaaatttggaaacataaagtagactgataatactaaagataatgctacacacacttcatagtgaaaattatagacacatcatagtgtctaatttagattgtgtacactggaagtgtcccaatcagtactcttatactaacatagtaagatcaacataaattatgcagtcaggaatcttatataattatataaatctaaaaactcccataataaatgtaatctcaatcaactcaaggaaaaggaattactgcaatgtgtgttcaacgtgccataagttcttttcatcccttggaacaatcattaaaaagtttca

SEQ ID NO: 19172 - DNA, 2938 bp, Cannabis sativa
ggagttcttcatctagaaatacgcagcctctcattatttctggcttccaccatagtttaacgtagtctttcctcttttcccatgtgttcttgttcgaagcgattccgaacacgatgtgttccagagaggtggtggtggtggtggtggtactcctccgctgtgaaaacaagtcttggactgaaaaatatgtgttcataaacttggtgtgtacgagaattaaacagacgaggaagtagagtatgcatgttgaagatgatagtatgataaagcttgtcaaacgagaataaggttttgaagaagtactactaagctttaaaatttgcattttttttttttttttgttataataatattgggaagaggaaaattcataccttataaaacatctcttatttattaagagataatatagtttgaataaaatacacggtatagtaagaaaagttgatgatgagttgaattttagactttgacaactaataaattagttacataaccatgtgtggaaccaaaacatatggtacgtatactggtatatataatatagaaaatagcactaattaataaagtgcaaagtcgccaacttagaccatctctcccataattaaggtaaaaaatatatatactaaatttggaacaaaaaattagtaaataatagaaaatgattatgtagaggtattaaaaatatgtaaagttattttttttttaatatgtgtcattattttttttatatccgtatttaatattatttttttatatattttttatacataattatttgttaaaaacactatcattcttctcgtcacttcttttttttttctccttctgaaaattcttaaaagttactcctcaaaggacctaactataaccaaaatattatgcgttttgatattttctttcaaacgaaaaatagtggttgagactcaaaaaattctctaatggcgaagccaaagaacaatacacaaaaaaacttttgtacctctctctcctctgagatcatatccacaaaagaaaaaagctattttgtattgttctttaatttcgtcattagagaacttctgagtctcaatttattttttttttagaaaaaaaaaaagaaatatcaaagctcttagttttttgttacagttttgggtcctttaaggagtaacttttaagaacttttagagagagaaggggagaaaaagaaaaagagagaagtgacaaaaataatggtagtattttttatatatataaataattataaaaaaaaataaaaaaaaaataacattaaatatggacataaaatgaagtaatgacacatatttaaaaaaatatctctatataaagtggcttttaatatctctactgaagtattatccaacattatatttgtatactttttgtaattgtgctctaatacataataaaaaattaagatataaattgacacaaacaataattatcattagtgataatcaatatattatttaaaaaataattgtgatattataattaaaaaatgaattaaagtaattaagtattaatttgacatatttgtgctgtggaaaaaagcagttatagtcgtgtgtgaaaaatagtaatggtagagaaaatatggaaaaaaatttgagttaagtatttagtaaattataaattttaaagtgctgtgaattgttaaaattctataataataataataataataataataatagtaatgttataatcttgttcattataataataagttttttttaaaaaaaattatataaaattttaattttttatatattttaattatttttcttttaagtataaatttatatgtatttaataaaataagttatagtattttaaattatattttttatcacacgtaaaaaaaaatagatactcaaatatataagaaacttgtgtttttttgtaaggaagatgaattttatcgcacaacaaactaatacagaacaaagccttcaaagaggcctttttacaaaaacacctatctacctctgtctgtcaaaacttgacaaaaaaaccaaactctatcaacaacacttattttctttttttctttcccttgagaaaatctatctataacaatccttctacaaaaatatggaaaatatagcaccacttatttgccactttattaaggatgctttatattagtgtttttttcagcaatatatattagtcaatgttggtccaaagctgagtaagttgacttttaaagtgttcgcgtatagtacacgatatttgcatgtggtatagtgaaatagagaatttaatttgtttacattttcttcatcatacattatggaatgtaatgactaattaatcaaatttaatgctagagtataaaattatatatagtctttcctagatattttttaaaggatggaaacattgtcgtaagatccaaactaaactaactatttcccacgttttatgccgaagatgtatacagtactttgcaattaacttttaagataatttttccaaactttaaaaagctttacttctctttaaaataatagtcaatagagtagaaagtcttacataatacttctcattttccaagtatatatttatatggtatatatatattaattaattaactatcccattataataaaaacagggcatatatatgtgtgtgttcgtcggactaagtgaatgtcactaaaaaccgtatcacgatttttcataaactttcgttttggtgttatctattactgatgaatttaatctttagttcgcgtgaattgtggtagaatcgtcttattatatgcatttaaacggcatgtcgttttcactattttagagtcctcttattatatgcatctgtatggatatatacacaaccgttttaaggtaaatagtattgacttggttttattttttttaataggcaacttgaaaagaacaaagatggaaaaaatatacagtcttg

SEQ ID NO: 19173 - DNA, 6829 bp, Cannabis sativa
agagagaggcagagatcacctcagatgatgcagattgagatcagagagactgcaatggcgtagtggtgtggttcgacagaagtttcatcaagcatttaaaccaaaaccaagagcaaaaatatacaaagggcaaatctttcttattatatttcaggaaaattctccaaagtaaagcctcgagttctgagctaagaccttcatttcatggatgaactccagatgggtcttcctcaatctcaactctcatttaccatcttgggtttcttcagtcatcaaaatttacgaaaacccatctccacaaacctcaagatttatcctcaatcatgtcgatacaagccgcctcctttcccgtggtggtgggaaagaaggtcatttttatctgggttcttccattcatgcttctatgatcaagatctctgattttttttactcggagaatggtgatattttacgtaatgctcttgtggtttggaattctctactctcttcttactcaaaacgtggtgacatgttggatgctcttacactgtttgatgaaatgcctatgaaggatacagtttcatggaatacaatgatttcggggtttctaagaaatggggagttccaaatgagttttcggtacttcaaacgattgcatgaatgggaatttcagagatttgataaagcctctttgactaccattttgtcagcattagatggaccagagtttcttgatatgaataagatgatacatggcttagttattagaagtggatatgagctggaaactacggtggcaaattctttgataacatcatattttaaatcttgttgtttaagttcagcaagacaagtttttgatgagatttttgagaggaatgttattacatggacggctatgatctcaggtcttgcacagagtgaattgtttgaagaaagtttcaaattgtttgtgatgatgcgcaatggaactgtggatcctaattctttgacttatttgagctcacttatggcatgttctggtcttcaggcattaaatgaaggtcgtcaaattcatgcccttttatggaaactaggaattgaatcaaacttgcatttggagagtgcactgatggacctgtacaccaaatgcagtagtatggaagatgcatggcaggttttcgagtctgcagaagaacttgatgaggtttccttgactgttattcttgtgggttgtgctcaaaatgggcttgaggaagaagctatacaaatttttagaaaaatggtgaaggcagggataaaagtcgacccaaatatggtttcagcagttcttggagtttttaatgttgatacttctcttggtctagggaagcaaatacacagtttagtggttaaaaagaatttcactttcaatccttatgtcaacaatggtcttataaatatgtactccaaatgtggagagttgaatgtgtctatcaaagtcttcaatgagatgcctcagaggaacccaatctcatggaattccatgattgcagcctttgctcgtcacggggacggctttggagcactacaattgtatgaaaagatgaaatttgaaggtgtgcagccgaccgatgttacatttttgtctctgcttcatgcttgcagccatgtaggattagttgaaaaaggcatggagttcctgaatgtcatggctaaagattatggtttgagtccaagagcagagcactatgcttgtgtagttgacatgttaggccgagccggacttctcaaggaagctaaagattttattgaagtcttaccagaaaatcctggtcctctagtttggcaagcactacttggtgcttgtagttttcattctgattctgaattgggtaaatatgctgctgagcaattggctatggctgctcctgacagtccagcaccatatgttttgctggccaatatatattcctcagaagggaattggaaagagagagcaagaacaattaagagaatgaaggaaatgggagttgtaaaagaaacaggtattagttggattgagatagaaaagaaagtccacagctttgttgtttgggatagattgcatccagatgttgagatcatttatggggttttagaccaactatttagactcatgacagatgagggatatgtcccaaataagagatttattctccattgtttggatcaagatgaaaatagatagacaatgtttactagacttatacaggattgtagttttgtttgtggcaaaagtgatatattcatattggagtatttggttttgagttataagattgtatatgtatacatagagaaagctatataatttgcctaatctcactgtttatattgttccagatgtgaatatttgattgcagtaaaaatgtaaagatgtatatttcatgatctttcagagaatgttgaaaaaatattcatttgctaattgagtaaaagctaagggaaacatattaaatgaatggatctcaggatttcttgtctaattaacttttgacaagtattaaatcttatattttgggggattagtggtaaaagtgaggcactgccctcaaataatgtacactcttgttatttggcaaaaaacatctaacgactaggcttgtgcaacacaaattatctatatgacaataaaatgatagatacatcttatcttagtacagaagaaaaatgttgagagaacaaacataaatggcaaaatacatgtattattaagatggggaagaagacagaaatgaagttatttcgaaatgaccctcataaatcgatttattgaagagaagatgcctgcagctctatcaaaaagagattgaccctgctctgaattttcttgtacatctccaaatatcagctgaaaatatacaatcacagtcattatcttatcttgaatagaatagagtttgacatcactgccaaaacagcaatttctgaaaccattgattatgtttcgtttgtggttcaagcatgtgaaactgtatttagatatagtcaaacatatggtgtttcattttgaatgattagagaaaactaataagaccaaccaaaccaatgactagttcattcagctttcattatggtttcatattcgaatttgaatgatgaaaccaaaccgaagtaaaccaatagtttggtttcatttgtagttttgtagatgtgattgcaatcgaaaacataaattttagcagcaacatacctcaaggtcttcggcatctggacgtcgaacaagttcttcggcaagaagatatctgtttggtctatccttatcatcatagaacaccttccacaatctagcaagatcaggcattaaaagaatcaagaacataatcaagtgagaagttctgttcttttttattttctcttcataataaaatatatatcatgctataatactcttaccctggataacatctaaacactgcaccagctgccataggcctcattgagtagactgttgtaaaggtgctgcaaaccaatgaattagagttgattaaagggttgaacaaacaaatttggaggtgagctgagaaaggcgaatatggtcggtcagctaacaaatgttcataaaggacatcctcatgtcatgtcaaattgatatgttattaagttcataaaatctatacgtacaagatagaaaaagatacttcaaaccatacctaagaaagtagcgccttaactttcgaacattgaatccaactccaacatcctcgctaatgagacgtggattccacattatgagaggccttggctgcccatatacaactaggaactttgattaatataatatttcctacttacttcaggctgttctagagagagatctgttgatctacttacaaattaattaagaaaaggtttgccaattcatgaatatcattgtttgaaaatgaaatgtcagtattgttaccggatcatctgaaagatcagctgcaattttctctacatatcccagcatctgataatcaggaacaaccataaccacaatttcgtcttctttctcaacaggcttccggtcacttaagctgtgtatataataagataagacagaatattatggcatgatgtgattatgcaaagcaacagatcttagcttcaataaagcaaaaaacatttctaaatttgaaatttgggtgaatgttttgcaagttacctggagaatccaaaagtagcatctttccatgtatattttagtagtgctgcagcaccagcatccggaaatacagctttaactttctaagatttcaattttgagagaaatttcgattagacaattataagaaaataataaccacttcatttggaaagaaaagagaattaatttgatatcaaatcatctatgtatgaggatgtaaattctacaaacctgacacccggtttcttgaataagtgtatccaagaaaattcgagaaagttcccagagctcagcttgtgcaccttcatcatctagaaactgcagctgggggattaggagttcaacctgaagaaatggaaagtaagctcagcaagaacttatgcaaacttatttaagatttctactatcaaatccgatgttcatcaaaaattgatctaacaagattacatttatttctttctggattctcttaaccctctctacttaaattcatctaagcttgaagaaggctccatgaaaatcaaaaacagaaacatggcacaaattaatcaaatatataacatattcttttggcgcgtactatggctcttgttcctcctgaagatacaaataatgcacttgcttcacttgattgtcggactgccccttccaaatcagaaggcaagcaactgtagtacaaaataaattgtattattattaaactttcttcactcttcaacaaaaaaatttgaattgaattgaatcatcacaagcaatattgatagaaacaataactacctatttacttattcaatttccaaaaacataagccatttgcttttcgtttacaaagttgtaaagctatatcaaacatacaaatcaagcattcaaaattaaagatgaaatcaataatttaattggatggtttccttctacttctacaacatgattgaatcttaaccaagaactgaataataaacaacctttatttgttttcttttttaaatttcaaatactaaagtataattggattaagggtttcctttcacttctccaacaaaaaccaaataattgaaaatcaagttcaagggtgagtgtatgttaagatagagaaggatttatcttaaaactaattggcaatatataaatggtattatgttctcgtacattatcaatgtgagactctctaacattcaaattccaagctctaattgttctattaaagactaaaataatacctcttaacaactatacacacaacaaatatgaaaaaatgggtatcatcattttctcctcccatgttaaacttacagtaatctatcaataaataagcagaaaatattagagcatttaatccgaaaaagaagtaaaaatcagcgaatcctttgtataacccaactgatttacctgtcatcttcttccacttgttcttgaactgattgagaagataaaggagtggtggcatcttcaagattttgctgagtagggtccccctgaaatttatcaaacttagcatgtagtcttgagctaaaagaatcagctttggtgagtgaatttccactgaaactagagatggaaggaaaataggataaggtagaggagtgagtggttgaagatgaattgggtattaatgatgatgaagaagaataaaaatggcaacttgggtatgtggaagccatcaaagaagctaactgaaactgagttttttgaagttgtgagtgtgatgagttgtgtgtatgtgggattaatttcaattaacaaattaatttgtcaataatccctaaatcttgaaaaaccttactatgccaatatatgttctgttttgggatatgcttattttatggtaataccataccatatgttggattcttcttttattttgttttttcaaaagagattttgagaaaaaaaaccctccatttgagaaaaatttgcctaactaaaaaaattgttaataatggttgcacaatgtaaatttattgtcttattgtataattcttgatcgtttcaatcaaatatgattattttttaaataaattttttggagaaattattatatatgtatacttttttttttatttttatagtttgaattattctgacaatttgctccatgagttacaatgtaaatttgaattataattcagattattccgtatattttcatataaatgcaaaaaagaaaaagaaaaaaaaaactttaaaatgtcaaaataaaaagaagaaacaaaaaccctaaatttatgtgttttgattaaaaaacaaatatgatggattttttattttagtaagtattattttaaacactgcaaaagttattgatatacttctctattttaataataatttagactcttgaactcgattttggtcgaactatttttatcctaactcttaaaattcgttttactaaccataaaacctcttattccctaatgtagttcaatttgatagcattattaaatagatctttgtatcagttggtcaattagttaattaggttaaaaaaattgaagttagttcagtaacaaactttttattagctttcttgtttttttttttcttgtagtcttttcaatttaaataaagcaacctctaatagagaaagtaacttttgctattctctgtttttcattcacaattcttttatgtgcttttacacaattttcatttttttaataaaactgagagagtgatcaattaatatttttgttgagaaaatgaaataggggcatgagaaac

SEQ ID NO: 19174 - DNA, 5711 bp, Cannabis sativa
  modified_base (2919)..(2935): a, c, t, g, unknown or other
tttcatgcgctcagtgagactttgacatttacatgagttagcatgttctctttcatcaaacacataatttggctaccgacagtaatcaagaactgcgatggttaggtgttaaaactaacctgccttaaaagaacacgaacttcttctttctcgagataagatatccctacattcaaaatgagcgataaacagttctgttgatatagtgaaattaaaagcaaacaaccaaattcaataacccaacactaggctgaaaaaataacttataatcaaaaggctacaagatacaataatatggaatgagttaaatggaagataaaaaggagatcactgtcaaaaaaatgcaccaaaatttacaatatccagttacttttggaatagcaactagaccaatagagggttctgtgtgaatacatctaataaatcaaaaggaattctactagaatataataccacaataacgtggatctgcaaggaggccaacaaaggatatgtagtcatctgatgaccgcgctcgcccttcctgctcctctatcaatgaataagcaatctgaaagagtataatggaaataaaataattaaatgactgaaatagctcctccgaaataaaaccaattattaaatcaccttccttacacacacacgcacaaaaagaattactaaatcaccttggccaggaaaaaaaatatcaaagagatggagaaagcttcaaatacaagtactgtttatcttgatgctaaaacagaaatcccatattttcaagcatagcatggatcaataggtagagaactaaaaaaatggcacaagcaagaaactcattgagctaaatgagttagttcgtaaaaaaaagtttaaaagcagaggaatatggaaacaataatacaagtttatcaaatcaatcttatagtagttacagagtaggatccaaaatcaccatcgcaagccgcatgtttgtggacagatgagctcaaatgaaagtacaagaggttctacactatttccttgtcaatctgaagcaaacactatgtaaaacacacaacaactaatcttcacaactgaaactaataaattagatcatttcaagcagaaaattcttacaaaatcctacttaaagtcaataaagtaacaatagatacacacacctgggtatccaccacgttgttcaacttgatgccaaactgaaaatagagtgcctacaaaaagaataaattcaagaacagtgtgataatttgtctgtgtcactcatgctaatatgttctggtaaaatgaattagacacctcgctatctcgtttgcaatcgtgaatgacttttgtgatgtaactagactcaagtgcaggcttacaggctttaataagcatttctccaccctgaatggcatcaaccaaatatatagcatctggaaatgcaagctgccaaataaataaaaaaaactgagtgcatgcttatacaagccttaaaataagagcatggaaattattatcttgttttaacctgcatgatacataaagctccatggcgacatagatccgctccctcacaatcaaaaccaatgactatctgcctttcagatgatggttccagaaactcagcgggaagttgagaagcatgagtgacaatgtgaatgggaaccacaaatatctgaggctcagctattggagacttctcatctgtaatacaccaaaaaattcaaactcaaaatagggaaaggtgaatatatcatgaacataatgcaacatcactgagatacgcctcatcagaaaaaaaaaatttgttcgatctaaccaattccagcatgctatacttgcttcaaataagaatataacaattctattgcacttgccaatacagtctctagtcttaatgtggggatagtaatagaagccagttagtgtgatcaggcctagtcattctctcaatgaagtattgaactaaatgctttccggcagctatctaacaatttttttacaccatctagagaagctcattgtgtagcctaaggatatgcttgtactgaaacattagccgctacgaaaatattttgaccaacttaagttagataagccaatagagcttttacatcagaaaagaacacccaactcgatatgaaacactgagtcattgttaatacaacaagggagagggaaacttgaaatacagcttgaaaaagacctagtacttgaatcgagcttagtccagccacaagagcaatagcttctggttgaaccagtatagatattaaaaataaaaactaataaataaacgctagccacttaagactatcgtaaatggttgggacttgggagctgaccaggtaaacgagtgtgtgagtagcaaaatgaactgaataacaccaagaactgagtaagtgagttagaatcgaaacaatgaatactgcacaatcactaatgaattgcatcgaaaaggaaacgatggatgaaacttttgcagaggttaaaaagcaataatggatcaaaatcaaaagcgccggaattgagcaagggccagctatagacacaagtcttcaagaatatatactgaaactaaagaagaagaactgagtgggtcgcggatcaccggtttgaaatctgataaaatttcaagaaactaaagaaaaacaaattaattaaaaaaaataatgcgaactcgaattgctagtttcgctttagtttagttcagctagtattaacaacaattacacgatccggtaagcgatcgtggcctcagattaaaagtaaataaatgaaaattttctcggcatccaaacagaaaaataggaaaggagaaattaaacaaataccagggtgagaaggtagaggaacgtgagtctgataaggagaagggacagaagccatgcgatcggaccatccaaacaaaatcaaaaacttccttctccttccctttctctctctctctctctnnnnnnnnnnnnnnnnntatatatatatataaatataccccttccttttctacgagcccccactatttgctcattcaagcaataattgtttttttttttttttgaaaagttattctagaaagataatccaatgtattttttttgtaagataattgctaaaaagtatgcctatcacttttaattggtataatactattagtaatgtaattaaatagtaagtttcatgtaatttaagaaaaaaaatatagctaactaattataacgtgtcacctataaaatgtgatgtacaccaatactactcaatagcaatgttgtttttaaagcttatttgtattgcatttgcaggtctctaaattatatatatttttgcaagttagtctctaaactttattttttaacaaatcggtccccaaactatataagttttagcaagttagtcctcaaactttatttttgacatattagttcccaaacttttattttcttaaaaacataaagtcctcactcttaaataagggtattttatttatttttgtatttattataaataattttatatttatatattatcaaattaaataaataaatatatcttttatttatatgtattttttttttcaaatatgccaaaataaaaaaaaacaattaaaaaagcttaataataatattattaattttttttatataaactaacaaagtaaattatattttaaattttatataatttatgctctgcggcgaactcataaaattttaccaacattgatgtaaattttaaataatcaataaatatatataattaaaaattattaaaattataatattacattttcataaataaataataaaatataatataaatgctaaaatataaatatgtgaaggggctagaattctctctagccattatataagtttgctagtgtttatactttttttttttattattaataaaatatatatgaataaaatatattttaatattttctttaaaaaaaattaaatatgataattatatatattacatgaatacttaaaaaataaaataaaaaatattaatataattatttttattcaaatattaaaactaaaaaaatgaaattatttgaatttaatataaaaataaattaaagtgtgtaaaataaataaaaatcaataaaaatgtcaatatctaagagtagggacttaatgttgctaaaaaataaaaatttggggacaaatttattaaaaataaaatttggggaccaacttactaaaacttgtatagtttagggactaatttgtcaaaaaatgaaatttggggactaactttctaaaacttatatagtttagaaacctctggtataaataagtctttttttaactgtgaaagtatgttccactatctattttattgtagttatctggcagaaataaatatataaagaatttattagaagaataataatattaatagtttttaagaaaaaccaaataaacaataattaagctgaataaaatctaaaagaatgatcctctaaaattaaactttagtatatatatttatatatatatggtcaaaaatggagaaatgttaggtgaagagcctttaaagaatttagagacggagagaggggtccaacaagggtgttgatgagttttcaagggatgagtctttcactcttctcttttcttttataaaactttttctccgatgagtcttcaaccatctgagaatctcaaaccccttttgtggttgagcttttcttgccctaaatgagtcacactctctgatctctttattcttcagtctttgtttttattcatctttccttttgtcttatgccttttatcatgtctttcctttgttcctttattccccttcccctgtttttttcctcacgtgctagtgtatggccttggatcttgttacctggttgactttagtgccatcattgtttctcttttccttctcacgtggtgcttgttttcatatggatctcgtcaatacacatgtgttgggcgagaaaggtaggtgtgtctcaatcaatgaggcaacacttgctcttaacccatgtgccagcaaaagtgaacttcttgccaaccactgcctttatggcaagattctttccttacagcctttggatgagaaggttgttagaagatttgctttgaagacttggaaaattcctgctaagattaccagtattattgtggttggtgaacataacattttcctttttgagtttgacaactttaatgacaagaaattgctcttttaggagaggtcttggtgcattaatggtaaacatctggttcttaaagaatggatagttggtgagaacattaataacgtttttttttggctcttctcagttttgaatttaaatccattatctttcacaaaaatacttctctacgctcaatgctaatatcctaggtacccaagtgggagcggttgggggaatttcactacattagtggttgtctgggacaccaacgacgcgagtgttcccagaagagccctggcttgatctagagcgcttacacgtctttcgctcccttgtttggaccatggctcaccacttggtccaagttccatgaatgtttctcggccaagaagcattatgtaacgtctccgctttaagcctccattgggcccttacacccacggaatgatgactcttatacacgagtacatcactttgactgcttcttggaataacgactgaccctacaaaccaacactagtgtttccagcgtgctttgtccttactcgcacacttcctaaaaaaattcccaagaggtcaccca

SEQ ID NO: 19175 - DNA, 5453 bp, Cannabis sativa
tgattctttatattaataagcagcaaatctgattatatgaaatgagttttacttagggcataaaacccaacagttcacgggtgccgtgagcttgggctgataactcctggtaggggtattcgtcaaggcaatcttttgtctctttatttatttcttttttgtgttgaaagtttctattcgttgattaagaagtttgaatgaaatggcgatctccatgggtgtaaagtttctaatggtgcctctattatttcttacatactttttacgaatgatagctacatatattatcgtgctagtgaagatgaggctgctaatgtgctttagttactctagttgtttgaagttgctactgcccagcaggtgaactatgccaaatccttgatatttttttagctctaatatcgctgctgagttacatgcctgtctttgtaataagctgggtatgttagaagatggtgctaatagtatgtacttagattttccatgcattatgtgtcgtaataaatcaattatcttaggtttccttatagattaaatgcataagcaaattcaaagttaggaaggttagtttctctcgaaagtgggtcgtgagattctattgaaaattgttgctcaagtgttgcctagttctgatatgtctattttctttctccctttggatacatgtagtcagtgaaatgatgatgtctaagcattggtggggttcttcttctaatcgctttagagatgagttgaaatcgtcttagtcgccacaagacttttggagggcttagcttgattataatcttgctctccttgtcaagcaaggttggtggttgcttttatatgttaataatttggtgggacgtgtttttaaggcccgatactatcctcatggtttgttcttaacaacatctttgggccataattttagtttcatttggcatagtatctttgcggcacaaattttaatcaaggagggtacttgtttgagaattggttctggttttgttgatgttcttaatactcattggctaccttgtccgagaaatctttttgttacttatactcacccagctcttgtaaattgtcaactgtattagttgttaaagttggacactaggcaatgcaatgaagatattataagggacttctttgatttgaaagaaggaaaccttatttttagtcttcctcttagcatagttcccttgaatgatacttgatattggaggtatgagaactcgagtttcttttcaatgaaaagtcggtatcactttctgcaatcttccaaagacgaatggagtgttgaattggttttggatatgtggcagcatctttggaaaattaaattatcgaccaaagtgttgcattttatttggaaggctctcacaaggtgtttgccaactcgtactcaactttcatccaaacatgttttaattggtctatgttgcctattctgtcagattgtcgaggagtccattttgcatgtgttggtatcgtgttcctttgctcaatcagtttggaattggtctggtgtgaatggcaatattcgatctgttggggacttctgtgtctagtttgaaaaggtgctaagttggtggaggatgcagtgtggtctttgtggaaggctcacaatgaattagtgtggaataataaagttagtgtagtcgttgaagttgtctttgttgtaaaatcggtacttgatcaatgaaaacatgctcaagcgtctcgttttgagccattgttggtcccttgtggtgttatcaacaatggagagcattggactaaactagtcaatagtttgatcaagataaatgtagatggaacaacttttcaggcatctaatacttttgggactagtattattgttcgtgataattctgattccgttgtgaagctttcaacatgtatagactgggctatgttcaatcgagggttattgaagtaattagcgtgaaggaggctctgagttggatcaagcaagagaattggcggtgggtgtttttgagactgattctctagtcatgattcatgctatcaagagtttagtatccatgtcatttattttttgtctattaatttttgaatatcaattattattatctagtttgaataatgttcaaatttgttttgttaaatgttctacaaataaagtcgttcattgttctgtttgtgacccttatttatagtttgatcatattaacaatatttattgattgttctccattaataaattgttgtttttcattaaaaaaatataaatgtaccatttataataaataataaattcaaaataaataacaaataaacctttgggtatttcaacaatgcacttattttgaaaagggtactgatgcactcctatctattttcatgtttgagagaattttttagttcaattttttttttgatcgtctaagctgtagttatttaagacatcctgcaaaatttttaagagattcagaaaaatttaacaccctgaaaaaatagtttaaaaagtctcttacacgcgagattttttaattttatacgcgtataaaataaataattttaatcctattttcggcgtgttaaatttttttaaaatttctcaaaattttacaagatgtctcaataactacaatatagacgaccatcaaaaaattaaactaaaaaattcttctgaaataaatatgggatgcatgaatagacccctttgtagaatctttttaaactttattataaaaaaaatacatttataaataatttaaggtgtttcgacactacactcctttaaaagcaattcactaaacaccatttactattttgaagaattttttaattcttaatataaatatatttacatatagtcggtttaatgatccaatctacaagatccccaaatttcagatataacttgaatggaattttaaaatattaaaacttgataagaaataacatcattaaacaaaacaacaaacaacaatatataatataatgtatgtatgtcataatgagaattacatatgcgcagcgcagacataacaagtaacgacaatatagtcattatcatgttccacattttcaagttcactcaacaactccatatatatatacaataaatatatgatctttattcttcatcttcatcttcttccttgagctaagttgagtcatttataatatatataggtaaatcttgtaaagactaatgctttattagtttaagatattttagtattttacactcttttttcgcgccaaaaagatctgtcttttttcttttattatgaaaaaaaaaaaaggaaacaagatctgtaaagatctgatttttatttatgaataaatatgaatatggttctgggcatttcagtttctattttaactttactaaaaagctaagtttttttcttacttttatagggttttaatggaagtgaaggaaaaagcttcatctttggaaccagacaacaatggtactgaatcatttgtagttgatattcgaagtgttgaagctaaagaggcaaaagggtctccttcaaaagtgttagaatcaccaaagaaagctgcttttatggattcaccagagatttcaaggtttagtccaagccccaataagcctccaagatcaccagctccacaacatgagaatcttactcggaggaaaacccttaacaggtcagtcttttctagacccaaatctagatttggagagacctctgcacctattgatacagctatggttgaagaacatgcttcaacacttggatctccatatagaaactcattcaatatggcttctcctaataacatatcagtggctagaaccatttcaatggctcagaaatctaatgcttcacctggtcgtgatgattttgaggagatttataaaaaggttaagttgaataaagagaagaagaagaagttgaaaatgaaggttattgttgagtgggttttgtttgtgatcttagttagttgtttggtttctagtttgagtgttaagaaattagagaagactatcatttggggtttggagttatggagatggtttgttttaattatggttatcttttgtggtttgttaatgactaattggtttatgcatataatagttttctttattgagagaaactttttgcttagaaagaaagttctttactttgttcatgggttaaagaagagtgttcaagtctttatttggttaggtattattcttcttacttgggtacttgtctttaatcatggtgttccaaggtctaaaacagctaccaaaattctagagtacataacttggactcttgtaacttttctcattggggcatttttatggttgttaaagactttgttgttgaaaatcttggcttcaagttttcatgtcaacacattctttgatagaattcaagaatcaatttttcatcagtatgtgttgcaaaccctttctgggcctccactcattgaggaggctgagagggttgggagatcaccaagcatggggcaattgagttttacaagtactaaaaaaggaaagaagaaagagaagactcaagttattgatatagctcagcttcataagatgaaacaagaaaaggtttcagcttggactatgaaggttttgattgatgctgtttcgagttctgggctttcgacgatttctaatcagttggatgagatggaaattgttgctaaagaacagaataaggagattactagtgagatggaggctactgctgctgcttatcatattttcagaaatgttgctcagcctggctgcaagtgaggacatagtaatctagcttttcagtattaccttttacactttgtgttttgtttttgtgtttaacttgggttttgtaatggcatataggtatattgatgaggatgatctcatgagattcatgattaaggaagaagtggaccttgttcttcctctgattgggacagagaatggtcgagttgatcgaaaagctctcactgattgggtggtaagtctttgcatttcattcaaatacaactcaaatgatcaaacatgcaatctgctcatattaagacattgattcgaaactcaagtagggtatagcttaaattatcagcgattcgagtccctcttgagcacttacatagcaagtgttttaggatgttttctcaagtatatccgagctatcaaatcaaaacttgtattgaaaagaaaactaggctcattgttcattgtttttttcggtgttgcaggtgaaggtctacaatgggagaaaagcattaggacatgctctaagtgacactaaaacagcagttagtcaactgaacaaactcgtgacagctattctcgttgtagtgacgattgtaatatggcttctactgatggaaatcgctaccacgaaagtactagtctttctctcatcacagcttgtagtggcagcttttgtgtttggtaacacctgcaagaccatatttgaagccattgtgtttgtcttcataatgcatccttttgatgtcgggga

SEQ ID NO: 19176 - DNA, 1535 bp, Cannabis sativa
tttctttattaataaatgaatacacaacattatattgaaataatattttatttaaggcacaaaacccaacagaaaacactattgacaccttgaggatagagttccaccaccactgccttccctttgtccctttccactccattcccacctctccgtttccttctagattccacaaatatcccccctcaagacattttctttttttctgctcaatatcaccattatttccatcttgtgtacagttagtagcaatagaaagagaacacgaatttcccctagggtgtcctatattatttttctctaatacattacttgagtccaactcagaattggatttagtgtggggcccatccctaggaagtccacattccatttccttcctcaaaatatcttcacgggcctgcccaaaaacaacaggcccagttatttccttagctcccaatcccctattatctatactacccttagatgtccccataatttttgcacccacttcctctactctggcagtttttcttgttagccccctagtttgagcgatttcagtcccaccacgaggtaacttttcaacatgttcccttctctcaactatagttggtgcctcgctcattcgagtttgacattgttggaaagccacaaacccgtttggaataggttcatcttcctttagccaggttccatacttgggcactaatctccctgtttcatccttttccatagcttcttcagccccacagtccaattgttcatggccccaaaaaccacagtggtagtagcataatagcaataaaagatcaaactttagttgtatccaagcttgtcgctcccccgatggaatgaagtgtcctgcaatcaagcttttattcaaaggaaatacaatacgaacacggacgtacccattcagcagaacctattgtggattgctctacgaacctccgcaacttctccagccatagcgccaattcgcttaatgtttttcagcgtgaaggacttctaagggaacccctgaatttgaacccaacaaagcatcttatctagcatagcatctttccaatttcccataattggccatatgtctaaaattagtgctccaccattaaagatccatggctatttgtccagtacaaatttaacatcttttctgttttcaaagttaatcttgaagacattcttatcactttggtcatcaatctgtttcaccttccaatttagaatattttttcacattttggtaaaaatactttgaaataaacttccattctcttcccgtctagcaaccacttgttagaattttttatcactcataaaatatgcaataacaagattcaatttcatagataaatatattacatataattataagtgtataactaaagatataaagaatacatttgttgattcaaagagaagaactcaaatagcggaagatagtggaagcttaccttaatccttagatagtgatgatttgaatctatcttgtgattttgggtataatgatcttccaagaaaacaagacttaggattttctaattttc

SEQ ID NO: 19177 - DNA, 6315 bp, Cannabis sativa
gaagaatagatactttgtcgaatcccccttcccagaggcaagatacttaccactctcatacttcacctctttcttatcacattatgcatattgccatcgggaatttaggatcataatttttttttgttttaattatatgcaggtgctaaagaatttgctcaaggatgaagttatatctcgagcaaggattatttctgaggtaagttattcgatgtcataatgtttctagttaggattttttgttcccctgacatttcattcttgctctccttattgttaagtgcatattcataagtaaatacattttggattgtatggtgaatttatcacccttccaagcatgtgtttcaattttgactttgagaagttcatacgtccttagttgcttatatgtatttaggttttagattggtcatttatatgtctgcttagtttattagttgattgttttgtgaaatgtatctaacttcaaattgtttatagggtctgaatggaaacgatggatttactattagcaaaagtatgggtgagatggtagatggtcatgatgggttgctgaatgaagcagaaattgcagctgcagccgaagaaaaagaaactcactcatttgaagttgatccttcacaggtttgcgaggcctacttttgtcatgtgccttatagcacttctcagtttcatattattgtatactagcttgtgaagtaagtgctggtttattagacacccatgttcttttgattcaaataccatcactaaatataaaattgtatattttttatacataaatatcattgaattttccctcaaaaatgacaaatgctgaaatgcattgcccacgttagggttggaaatgttgctttgtgcctaattatataattttatattcttttgtaaaccactttatttgaatctttacttgctttatgttagatttttttttgtttttttagtaaggatttaagtattggcaggttgaaaatgtcaagcaacgttgcttgccaaatgctctaaattatcccatgttagaggagtatgatttcagaaatgatactgtaagtttacaagatcttttccttgctttagatagctgtggtggtcagtgtacaagtgagagattttctctgatttattgggtatgtctgatatacggaaccatgtgctcatatggtactataggtcaatccggaccttgacatggagctgaagcctcaagcacaacccagaccatatcaggagaaaagcttgagtaaaatgtttggaaatggtataattagctttccaagtttaatcatttaatttctagtaattaataaaatcatacacagattgattgggaatcttttcaacttgctcatgctctctctcattcctggtaacttagaaattgcctaatattctaaatggttttttttttggtgatttctgacaatgataagcataaatgaatgacactttgatacttattctcagagttgtcaactaactttggtaatcatagtcatactactttgaatccaagttattcatacaagttcattatttggaatattgcaggaagagcaagatctggtatcattgtgttgccttgtggtgctggaaaatccttagttggtgtttctgcagccagccgaattaaaaagagttgtctctgtctagcaactaatgccgtgtctgtggatcaatgggcatttcagtttaggctctggtcaaccatccgagaggatcaaatttgtcgttttacatcagatagcaaagaaagattccgtggtaatgctggagtggttgtaacaacatataacatggttgcttttggtggaaaacggtcagaagaatcagaaaagattattgaagaaataagaaacagagaatggggattactgcttatggacgaggtaaccttgtaattttttttagctaaataagttattaaagccttttaaaacatcaacttacattggtttgttcaggtgcatgttgttccagcacacatgtttagaaaggtcattagtatcactaaatctcactgcaagcttgggctcactggtatgtatgtgtacctttattattgcagaggacactaacacacagactttagttcttttggcttggaagtgaaattttgttatgtgactgtagccacactggtgagagaggacgagaggattacagacttgaattttcttattggtcccaaattgtatgaagcaaattggttggatttggtaaaaggtggatttattgcgaatgtacagtgcgctgaagtgtggtgtccaatgacgaaggagttttttgcggaatatttaaagaaagaaaactccaagaaaaaacaggtatttgattttttaaatattcattttccttgcttggtgcaagatttctttgccgtgagagcaataccggccctgagattaattgggccttaggtagcaataaaattattggacctttttcaaaaggaaatgtggtatttttaaaatgatttttttttattttcgggcttttgggctgggtgggccctaggcctgcgcctagcctgccttagctcatatctggtccttggtgagagacatcatgtattataagagattatttctttcgggctcttaatgatgattcactaaatcagtttctttgatagcctgataactctgctggtaatagccgaaataaaagagctattactcttgctatgtacctatcgtgtttaatcttgagttatctggagagtttggtctgagtttgctatgttaacttgttatgtaattctatgaaaatgaattgtttaatggattatgtatagcaaacatgttcccccagctatatctgtagactataatggtaattagtaatcaactcaaggattctggatataattttcttttattataaatttttaattttttaccaactttacaaaacccgcaggataatgggtttatttatttttaggcactctacgtgatgaatccaaacaagtttagggcatgtgaatttctcattcggtttcatgaacaacaacgtggtgataagataattgtttttgctgacaacctatttgcactcacggagtatgctatgaaactccgcaaacccatgatctatggtgctaccaggttctttttttacgcacataacttctcctctatgaattgcattttaatgggtgttgttttgtgtctaactttcgctaatgtacttatgtttcatgcagtcacgtggagaggacaaaaattcttgaagctttcaaaactagtcgggatgtaaataccatctttctctcaaaggtactccactttggcttactccacgatttcaatatgaaatgaatacatagtttagggtaaatgccatgttttgcaaatgctactcatcgaccttttgttttgctaataataattcagatcctgtgttttttcataataataccttgagcttggtcgaacttttttttttatcctaactctaaaatattcaccttcctaaccgtaaacctttctactccctaactcttaacaattgtggttcaatgtctattctattccttactcgaaagaagttcgaccaaaattgcgtttgaggtactattacgttccattttgcaaaatataagatttggattgttattttaaggtacaattagtaagttttgcaaaacaaaaggtccaaatttgtaagctttgcaaaacgaaggatccaaattagtaagctttgcaaaacaaagggtcaaaatacaagatttggattgtcatttacttttaccatgattcttttttgttccttgtgaatttaaaattatatttttggaatgtttattttagttggcattgcttcaggaggtttatacattttttcttaaaaactgaaggaataaaaaccaagcaacaaacaaattggtgtctggttaattttaggcttgaataacttttctatttcaacaaatcccctaccctttaccatagttgcattgcatcaatcattttatattctaaataaattagtttattataagctggaaacagtagataagcttagaatttcttcccggatggtgattgatattttatattacaggttggtgataattccatagatattcctgaggccaacgtgatcattcagatttcatcccatgctggttcaaggcgtcaggaggctcagcgtttgggtcgtattcttagggctaaggtttgtattcatactgttttgggtgacacatttgcatcttctatcattacattaacagaacaattaattaatagttttctttaaattactttgaaatggcttcttctgcttacgggatacatggtcattttttaatttccgtgaagactgcagtacttactaattggcatcattcacggtgactgtaattatgtttgtttgatgaattattgcgatcaacagggtaagcttcaggataggatggcaggaggtaaagaagagtacaatgcgttcttttattcacttgtatcaactgatacacaggttagttgttccctcattttttatttaagcctagcccaccactactagataatactttgttatttactctaaaacgctcatgtatgttcatactcatatcatctatttagtcccaacatatttagcttgaatgctatgcaggagatgtactattcaactaaaagacagcagttcttgatcgatcaaggttatagtttcaaggtatcctttattttttcttttaataattttgtattttattttgtcagcttaccacactttatcatgttattggttatgtactaggacgattattggatcttgcaaatttactaatttttactttaatttactcttaaaggtgatcacgagtttgcctccagctgatacagggcctgagttgagttatcatcgccttgaagaacaattatctcttctctcaaaagtatttatctattttgcttccttcacatttcattttttagtgctttgaggtataaattcctgatatgtttcttcatggtaggtgttgagtgctggtgatgatgcagttgggttagagcaactggaagaagatgcagatgacatagccctccataaagcccgtcgttctatgggatccatgagtgccatgtcaggtgcaaatggaatggtctacatggagtacaggtatgctggtttttgaagcctaaattgatttttatgtattttggtggaacaatgacaccatgtggtgtggtgttgtgttttcttcctatcttagttcctcttttcttataaaaaccgtgttgcgttacacagtactggacgcagacttgctgggcaaggacagctcaagagcaataagcccaaagatccagccaagcggcatcatctgtttaaaaaacgttttacctgagaccaaaatgagtaataattcagaacaatcttcaaaacaaacatggcaagtttcagagagaagcttatgtaaaccaaacatgtgaaatatctaagttatgtgaatttccattccattaccaacttggttatatacaattggaactgaaattctctaatgtaatatttgcataattaaaattagcttttgattattaatgtgatattagttttgatcagtctgttgagattttagaaatgtggtaggaaaggaatatgataaaagccatgatgggttgccttttccttttctctaaatgtaatacatatatgtaatcagatgagaaaatattgctctttcattgtaatgcatttttattcttgttggttttttttttttttattttgccgttatagaattgtattttgtagttacaaaataactattttattaccatatttattatttcgtatttaattaattaaataataaattgataatattaaaatacaaagttttaattttattttgttgttggtttttttttttgttgccattacatcactgttactagttgggaataacaagttttttgtaactgaagaggttgttagtagttcaattacgtactttatacaatttgagtgttcaagctacgaagttgaatttgttgcaagagtttctactgttgtgtcttctaagcggtggataaaataaaatataagtattcttaaggtcaattgtgatgttgcaatttttttcatctgatttttttttgtcaaacgatttgagaatcagactaatgagtatttgatttgtttttttaattcttattctgattgtgtctctaattaaaaaaatatcccaattaaattataaattattatttttttctactaataaaatttcataatttattaaaaaaaaatatttaatgtggaaatataattaaatctttttcaatagtgaat

SEQ ID NO: 19178 - DNA, 8233 bp, Cannabis sativa
atatacacgtatcaataattatcagtcaaagatctttcaataaaatttaagtaataacaacattattattcaatctagaatgaaaagaaataatcaaataatcaactatgacgataaaagtcgtaacaaacaatcgcaccataaactataaggccaataaaaatctgagaatatcctcaatttaaacatggacaaggatagtcacgctactaacacgaacaaacaagctttggcccaattgatattctctcaatgtctaaaaaagaaacaagactaaaatctcctagcatgaatggataaagccctactgccataacaatagcaatgtagtacagtaatgtagggctttatcctaacagactatgattaacacaagtgaatattcaaattcagagccaatgaacaacttaaataagatacacatctgaacaaagaagaaggagaaaaaataacactcaagcataatgatagcaacaatcccaataaaatcgaaaatagtgtgtaacttcaagggccggaaggttctatataccttaggatcggcccttactctactttaagggcttgtttggttcgtgttgaataataaataatattatgtttagataaagtaatgcattatattaattattacgaccaaaaattttggtcaacctcaatctccgatccagacccgaactcaaacccaggacccgaaccttgacctagactcgccactcggagctacgacccgagactagactcgtaatcggtgttgagattgagtttattgaaaatacattataactttacataatctattaataaaagtcatacaaaatataatagcatattaaataatactaatacaatataatatagtataatttaatacaatataatataatagagcgtatgaaaccaaccaaattagctattgagagtgccttgttgtaattattatcttaaccatagagtaaactaacaatataataaataatattttcaccaattaattgtttcttttaacaagaaaaaggggagagaaaagaagaagtgggccaagcccatagattggtccaccaaaatgattcgcacatgatttgatttgtactcgtttcttaagaaaagcccattttcaacaacagcccacgtaatgtactaaacaccacaacacaacacagctcaacgtgtcgttgccattttcatgctgagatttgtttgcgtgtgttcgtgtccgaacccaactagtactctctctctctttctccttccttccttccttcctttccaatttccatgaccgaaccatctaagtcaccaaccaaccattcattttctcacaatttaccccaaaacccatatatttaaagccataaagcctctctctttctctttctctttctcacaaggccaatccgattacactaaatgactctttctcttgtccgctctgcttcaagatttgaaaaaccttttcagccggcttagctatatacatatatataaataatatacacacacacatatacttgtatttgaaatttgtaattggatcggatattggtattttgattcatctgggcaccgacaaagatcggatctttttggttcaattcgtgttctttcgtaatttttacgaggtgggtcgatctgaattcgagtttagagtattgggttttcttgatcggttaggagttgtatttgaaatggtctatatccctagctcaatctcggtctgcaagtccgttgaccaaacatcgctgatgccagtttcaatgaatttatctgattcaggtgctaaatctaagcataacaatcatatccccaaaaccagaaaattacccaatttgccaaattgctcaacaatcccttattgcgatcgatctcgatcagctgtagtagatgttgtgattctaattgctgtgattttcgcttgtggttttctcatattaccttcactaaagttcctctttttcgaagccattgagttatttggtataatcatggatgttctcaaagaagagatttctcaagctccattgatttatggatctgtagtgttaagcatttgctctgctgcattagctgcttggggtgtgttggcatgtacaagtagaaaatgtgggaatccaaattgcaaaggtcttagaaaagctgctgaatttgatattcaattagagacagaagagtgtgtcaaaaactcagcttcatcatcatcttcttcaatggttaaagatggagtcaagaagggtttatttgaattgcctcgtgatcaccaccgtgaattggaagctgagcttaaaaagatggcaccacctaatggtagagctgttttgatattcagggcaaggtgtggatgttctgttggtagattggaagttccagggataaagaagcagcaacaaagaaagatcaagaagtaggccttttcttttctttcttttctttaaatatattgaaaaaaatcatagggaagatagagatgaatacaggagtagtccttaatgcagagagaaaaagggtgtcttttttctcttttgaatcttctcttagaactatgttgttcttaataaaatttagttaatggaataataaagtttgtaaggaccattttacagttggttggtatagagaacaatataaagaaaaatctttactgaaatttatactggtgattctgatttgatatttttgattgattctaatagatgtcaatcaatttcaatagaaactcaatattttatttggacactatgcagtatgatatgatttttattatcccttttatcatctcatgtttaattaattatatcttgatttgtttaatcaacctatcatggttcaatttgtttaactgcgatccttatttctttgtttattctattacaatcatacagttgattttcatatgaaaaaggtcttgtagtagtacacaagtgaaaggtatagtcttttcctagttaagcatataatatatatcatctggaatcaatttttcatatatattctccaaataagaagaaagttaagtattcctaaatgatattgacttttttcccagttggtgtgtcattgttcatctggcttcctacaaatgaattcattcatgaattaaagggatactgcctccatagctttatattggccctggttagctgggtttttaaaagctgctttcgggcttctgaagctcgaaaaatgctctcgggcttctgaagctcgaaaaatgcttctgctgcaaagaactttctaaaaagcaaaaagtaaagctcagccaaacaggactattatttcaatgactcggcttttaaaagccaattgaccttagttgggttggcttttaaaagacgattttgagcttctaaagctctaaaaatactttcgctgttggttgggtaattagtgagtttcagatttaagttatttttagtagatttatcgtaaaatggttttttgaaaagctaaaagcagaaaggcgaagcttggccaagagggctattatctcaaatggcagttcatatcccttagaagcataagggatatcttcctacacacatgttttagttgtttatacatggaatggaagaaaaccatagctgataataaaaactctgtttgtagtcactttgttagtaagatgaatggagtaggtgagagtctttccattgaatttgaatttgtcttgcccagattattcagtcttctctttaaacacaatctgatctgaccatttattcagtcacttgttgacagttgacactaggtctttttccacactgtcaatcaatgtgtttgcaactttgcttcttttttttttcttcttttaaatttattttgttagggtaaatactcagagtttacaagtgatataaatttaataatttgttttaacaagtattaaatatttgtaaaactgtaatttttttttttagtttcgacaatatagactattttgaatttttcaaaaaaatgatttaaaagtaattaacgaaattaaaaaaaaaaattgtatttttataaatattaaatatttatgttattcaaaaattatcaagattataccatttacaaaacttaattatttttataagtagtttgatatttgtgaaggcagaggaataagattgtggagcatatcttggtttgttcgcaaggaagaagagaaaaggatgtgtttattttattgacttggctactttttgtggcatttgtgtaattttcataatgagatgattgaaattgacagggcctaagctaaggggatggtcactgagagtttatggtggcactgaatttcatgacaaaatcacacacccatatatgtaatgtataccgtattcgtcataaattaatttatactcaacaaatggacacatctatctagtatctaattctctcccctattggataagtatagatgtttttttggtataattaattccctaattaaaatatttgtctgctaaattttaatatgtactaaatcatgctttctgaatttttttagtcgttaaaaattttctctaaactattgagattgttatatttaaggacttttgtctaatttcatttaattttactatttcagtcattatttatgtactaaatcatactcattagattttgatatctaccaaatcataccactcgaactttaacatatactaaatcatgccccttaaactttcatctatgttagaatatttttactagaatcggacaaaagttcttaaattcaacaatctcaataattcaaggggcatttttaacgaccttaaaaatttagtgggcatgatttggtacatgtcaaagttcggggaaaaaaatccttagtagcttaaaaaatttattagtttatcttttatttttgtgtatgatcgtgcacgttatacttatttaacactgtttataaattttaagaaaattttaactaataatgctaaaaataaagttaaaacattttgttgtacggacataattattttttttttatacacatggtgagtaattatttaaattttaattccaatactgtaaactatttagaatttagctaaaaatttataggtagttttatataattacaatatacacgattatatgaattttcgaatgtcaaaatagataaaagtataaaaaaaaatgtccctttaaagggtatactatataaatttctaaaaatacttagccaacttttgctatcagttacagttagcacaatgttgcgttagaaatttcttataaaaaaatggacacatgtaattatagtccttgcaaaatttattattgttattcataaaaaaaaaaaataaaagctaaaagatgttattgttgcttaacactcttcttagtaattaagtattgaatgctatataacttaataaaataatttttaaagaatattactaatcaactataaaacgctacctataaaaagtgttagacacaacaacacgataaaagcaaaggtcataatggaacaaccctatcctaattaatgcaacatagaataggagtagggcttggcataatctgatctatgagattgagaatgacaggcaactactactactgaaaactatgcctcaaactcttttttttatcattgctatctttatgtttcttttttttttttcttgtcaattaacacctcattcaatttttctacatttttacctaaattattagctactaaaaataagactaaaaaaacaagaaaaagaggtgtttcgatccaaattatcggaataaaataggtattatgagtgcaaaaatgaaatgaaatttacaatgctatattttaagaaactatataaaatgcataaattatagaaataagttgaataaaactctatgatttaaaccaaattatatcatctttttttgttcaaaagtccaacagctcatcatgtgatataggtacgaattgggattaggcctaatacctatcttcttggccatctcctagggaaactcaaacgatgttgaattaacactacaccaaaagagtataatgtataagtatatataattaattttttgaaagaaaacttaatcctattaaaaaaaaagtgtcaagaaaatatcattcatacaagacattagccattagttgaggttgtatatagtaattgtgttagggttgttcatcgagattgaccaaacgcagtttaaattcaaaatacaacaattcaaattactatagactataatctgtaagaccgtctttggtgatccaattaatttgaatagtttattattgtataatttagttgtggttcgtaataaattacaaaatgcatagtttatttgttattataatatatctatatcttacaaaagaaatttaacatattaattacctaacacatttaacttacaaaaacgattaaattactttttttaaaaaatacaactatgaactataaatattattatgttacattttaacttttgcgctttgttgcaaactttatagatcattcacaaaaatagaattcgtttaaaccatggttttgaactaaattaaattattcttaagagttttgttagtttgaaaaatttattagtcaaagtttagtttttaatatctaaaaaactgttatatgctgatttagttaaaaaaatatataaaaatttgaaccaaattaattcgtaaacactcgtaatcggcataccaaacagtttaacatgaactaccccgttaactctcatataaaagtataacatataacttgtttattgtagccaagttgatgagattggtgtaggccataatatatatatcaaatagagtattactattagacattagtggtgtctagcatcttctcgacatgtcgcgttgcgattggttagcgatactccctaaaagctattatattaaattatataggatccaatacttagttggaccaataacaatattaacacataggaagatactaggcactatcggtgccctttagcatttctcatatcaaatacccttagcttttgcaatctcaagggtgaagtttgcatgcgccgaccagactgcctatgcaacaacaacacatcatcattaccattaatagcaatatgaactatgaacctttggatcaattacttttgattgataataatccaaaaaattaaggcccaacaacaacatttaaatcaattagtaaagtaatattatgatgcaccttatttttccattgctaatatattcacacaccttcaaaaggttcaaactaaagttcacaccatactcactttaccaagagattgatatgtgttgagtattatagggttccatagttcatgttcttatatatggtttaatatttttatatttgatctatatgtgacaatattatccaatatttcccctcaagatggtgattatttttgctcaccaatcttgaatcattcttatcataagtagtgtcacttgctcacttatttttgtttgttttgcggttggaagttccatttgctcgcttatacttatttgcggctgggagtaccattttgctcgcttgtggctggctaactctttgataagtgtggatcgaaagcccgctagggatatggctctgataccatgttgagaatcatggggttcatctcaaaactaattggtaataagtggagtagcccttcttatctgtggctcaatatttttacatttgatccatgtgggacaatattgtccaatgatatctatgctatgtttatgcaaattatttactatatggatccaaccttaaataaggaatggtcatccagtagctactggggttgcatcatattcgtgttggtgttatacaagttgatatgtgtaattgttggtcctgttcactatcacttttgttgggccgccacccactttatttgaagccctcacaattttatttttatgcatctttccaaaaagtctcatactaatgagtttggtaaaacacttatattcaaaacaactattgcataatttgtggccttccctccacattgttgagccctactcttccactttgttaggccgccacctcactttaactcccacattagtgatattgtctattttgggcctaacctctcacggttatatttttcgacaccttcttaaaaagtctcataataatgaagttagtgaaacacatacggctaggggtgaacaaaaaatccaagaaattgaccaaatcgagtaaaccgaccgtccgaacaccgaaaaaaccgacaccgaaaaaaccgccttcggttaaaa

SEQ ID NO: 19179 - DNA, 4256 bp, Cannabis sativa
aacgctgttggtatccctatcatttgctcacaatacactaactatcatccgcgaacaacatgtgagagattgtaggagcgccattagctactctacagccccttatttgttttgatgcttcaaaagaagatatgattgcagaaaagccttcagcacaaatcaagaaaagatacgaagagagagggtcaccttgtctaattcctcttgatggagtaatcggaccaatcttccaaccatcatgtgtaacattgaaggaaaccgtagacacacactgaagaactagtcggatccacttctcatcaaatcccatctttctcatcatagcatctagaaacgcccattcaacccgatcataagctttgctgaaatctagcttcaatgccatataaccatccttccctctccttttcctcttaagataatgcattacctcataagaaatcattatgttatcagtgattagccttccaggtatgaaggcactttgatgatccgagatgagatgaggtaggacaatcttaagtctgttggcaagaacctttgaaatgatcttgtagagaacattgcaaagggaaatgggtctcaaatcactcatattatcaggatttttctttttaggaattaagacaatattagtgtcattaagacctataggaagagtacctgattcaaagaattgttgaacttgagcaatgacatcctttcctacaacatgccaacatttttggtaaaacccaggggtcattccgtcaggtccgggagacttatcaggatgcatttgaaacagagcattcttaacttcctcttctgtaaccggagcaataagatctctattatggttggcgttaattgtggttggaataaggggaataatctccgttgaatcggtagcatttgaactgaacaatccagaaaaatatgaagtaatgaggttcggcaatccatcatcccaatacttataagttcctctctcatctttcagtttgacaataacattcttccttctgcgattagtggcagcagtatgaaagtatttactattacgatcaccctcctttaaccagagctgcttcgaacgttgcttccaaaagacttcacgttgggtatacacctcaaataactctttttcggcatgcttatatctttcaactgaagctgaatctcttcctttcttccaaactttaacttcctttttccagaaattaattctctttttgaaattaccagtgtagtcctctccccatttagcaaggatttcaccacaatgactaatcttatgctgaatggtattagtttcacaagactcccaacaatctttaacaatttgaatgcaaacaggttcgcgaagccaacaattttcaaaacgaaattgtttttgaatactaacccgtttgttgacacaaggatcaaggaaaataggggtgtgatcggatgaggaaatttccatattgaagagtttagcatttgtgaacttgtcgagccacgattgtgtaaccagagcacggtcaagacggacttccacccaatcggttgttcctctgcctctttcccaagtaaactgggaaccatgaatgtcaagatcatacaaaccacattcagttaaagcctgattaaaaccctcaatgagccaattaggataagcattccctccttttttatcagtttgagaagtgacgttgttcatatcaccaatgatacaccaagggagagagtatcggccagcaagattagtgagtagttcccaagttttactccttaaatttctatttggctcaccatagcagcctgtaagacgccatataccactatcattggagactttaacatcgatatagttagtagaaaatcccagcaacataacatcatcctcaaacctccataagagagcaatcccaccacttctaccttgaacatcaaccgcaacagccccttcaaagcccaaagacaaccgaagcttttcaatagtatctttcttacataacgtttcacacaaaaacacaaagttaggcttcttttgaaccacaaggtccttaaggaattgtaaagcccgtgggttcccaagcccgcggcaattccaactgagaacactcataattcttggtgggcctggacaccagaacccaccgagagcccattttttggaagcccattagtactaactgtctcatcttcactaatattattctcattatcattgggcctacgccttttagaatctgagataatgagagaggtattctttgcaacagcattattcccactcacgtggccaccagatgacaaatttgaattaatattcataatgcctttatttttggaaagtaaagcattaatacctttagattggttgaccataatcagctccatattctcctccatattttccattctagtatcccccgaatcactcaatccatcaatgttgataggattttttgaatgatcgctgccagctgtatctccaccggtgaagtgaacggaagactccgtgtttgtacgcagccacttagctccgatgagatgagatttctttctcggctgagccttcataaacagaccatatggcttgacaattgactctgctggagtatcaaataatcggggacaaaaatgttctgaatgtcctatgattccacagataaagcagaaggtaggaacatgttcatatttaaaattacaccaaaaccagtctccatccactttcttcatcttcatccttcttttcagtggtttatcgatctgaacagtcacacgaactctcaaatgatccctccatatgcccagaaaatttttcggatcagtcttgacaaaagatcctatgtagttacctacattcttagtgataaactcagattgaaatcctgggcgcaagtcatgcagctggacccacatatccattctattgagagttatagctttaggatcctctcctttcttcaacctctcaaagatcaaaggggctctattgaaggtccaggggcttccttcaatcacacgttgaatgtcaatctcgtggtagaactgaaaagcgtatcgattagtgtctagctctttcacaaacattcctttaccaggttgccaaagagacgccaaagtgtgttgcatcgcatcgaaatcaaaaatcctagaagttaggaactttccaatgagacaccatctctcatcaatagtctggccaacatccgatacaatatcacacaatagtcctccatcttcttcttcatctaacacaatattgtcataactggactcaagatctctcatagtactactgctcgcagccatactgactaacaaaagagacaaagaaacagaataaaacactcacaaacaactttctgtatactcgatcttcactgaaaaaagacacactgaaaaagacacactacacatgtcagaggacaagacttttagtatataaataaataaataatgtatagaactatgtctgtttggatatctttttagttttcagtttttaaaattgtatttttaaatgtgagaataaaaaacaattttttattattttaaaaatttaatggtgttttgcacaaattttttaaaattatttttaaattttttcttactaagaaaaataatattttaacatcataccataacatgaacccatccagattcgtatgacatgaacccattcagtttcggggtcgagtatggttctgagtctacgatgcgagtatgtgagcaaaaatataaaatataatatgttagacaaaaaagtaatttttgaaaataacatgcgaacaacattttgatgttttctgttttctagttttttaaaactcaatttttaaaaaattgtttttaaaattttttgccaaacaaacccctattagtttttaaaaactattttcaattttaaaaaataaaaaacagtttttaatttatgaatgcaaacagaacaatgttagaatagcattttgatagaaattaagccacatacttatctctgcagccggatatcgaatgtatagatcctctccatttgaagaaagatatctaatatcgaacaggttactaccaaaccacaatatgcagccacttccttgacttctaatatctgaatttgaataagccatgcaagaacagtttctcaagcatttttccctgcaatcaatgaggctcatacttgtgttcacccaagaatttatggtttccggcagtttcaagctgccaaatttttcaaatctatgattattggcattcgagcagttgaggttgtcatttcttacaca

SEQ ID NO: 19180 - DNA, 5241 bp, Cannabis sativa
aacaatctcaatagttcaggggatatttttaacggcattagaagttcaaggggtatgatttggtacatgtcaaagtttagggggcaaaaatcctaattagccaatagaaaatgcatcactcaacatcaattgagcagagatttatcaaataaattaattctaaaattcaacttggtatcagagcaaagttttcaagatgttgacactcacaaaatcctaaaaaccctgcaaacaccacccctgctcaacccttagccacagttgcagcatcaacagtacttggtgctagctcaagtaatccttagctctaaactccagtacctaatcactgcaacacctcaaatcaacctttctctctgaaacttaacatgcacaactacaacctatggaagataacggtctcaaccatagtaagaagtcatcgattagatggtttcttgaatgactctaacatttgtaactctcaatttgttgactgtcatggagagcattgatattggagaatctcacatcatcaatctagcttatgaaaactagatcataaatgatcaattgctaatggggtagttatacagttcaatgactgaaactataacaactaaggtcatgggttgccacagcagcagcattatggcaagcacttgaacaactctaaggtgcttactccaagtaaaaaatggatgagacaagaaccttgatccaagtgacaaggaagggaaataccccaacgatagaatacctcagacaaaagaaagtatgagctggtctattagctctaactggagaaccataccctgaatcttagttggtaacaaatgttttctttggtcttgatgttaactatctaaccattgtgttatagattaatgctcgaccaaaaaatacctggcaagaacttcaagagtcgctactcatctttgatagtaagaaagaaagattacaagccttatcaccaaacaaaaaactccccaacactctctctcagcctcaagccaactttgctcaaaaacctcaatctgcagaccaaggcagaggttccacactattcttagaactatggtggcaggagttctaacaaaggaggaagatctcgagacaagggcaggtttaatggaagctttggtggtcctaattaaaccttccttctaagtgtgtgtggcaaatatggccacttaactgtagtctgttacaattgatttgatgtgcactgtatgggatctaatcccaacaacattacacagacaaagagcaacaatccttcaacctttgttgctacatcagaaatcttggaaaagtgaagcctggtttgctaatagtggagcacccaaccatatctcctcagactctgtctcaatgactcagaagcaagactacggtggtaaggagaaagttattgttggtaatggtacacaatccattatctctcatcttggtaatagagttttattaactagcaatggtcaactgatactgttaaaataaatgttgctagtactagaaactaccaagaatttactaagtgtgtccaaactcactcaggataacaatgtgcttatagaatttcatctgattgttgtgttgtgaaggacaagctaacaatgaaagttcttctttaaggtatgcttaatggtggtctctattagctccaaacacgaccatcaaagtctgtttttcatttctcaagttcaatcgagtccaataaaatcaagagtcaagtgtcttctagtgttgcagtcaagtccaagtccagtgtaaattagtctagaagtgatattaaattttgaatttcaaaaggtgatgtatggcataggagactcggtcatccattacccaaagtcctgagtcaagtttttagttcttctttagttaaaatttccaaaaatgaaatgaaccatttttgtgatgcttgttagtttggtaaattacatgctctttcttttaaaattccaacagcaaagcaaaaaatattcttgatcttatggatagtaatctatggggatcctcaccaattatgtctgaaaatagatttaaattttacatacattttgttgatgattgtacttgattcacttgggtttattaattaaaaaccaaggcagaagcaagtgaagcttttttacaatttaaagtgtttgttgagacacaatttaaggaaaaatcaaaggccttaagacagattgaggagggaaatatctagctttacaagatgtggccattgccaatgaatttaactttcatcattcacgtcctcacacattagcttaaaatggcatagaagagatacagacacattgtagagataaacgtttagcttagcacttatgccactcaaatactggtgggaagaattccaaaccactgtgtacatgatcaacaagcttcccacacttgttcttgatcataggtcactttttcaagccttatatagcaagaaaccagattatgccttcctaaaaacttttggtgttgcctgcttcacttgcattagatcataccatgcacactagttttaattcgctaacttaaatgtattaatttgggctatagtgagtctcataaggttataaatatcaaacacctactagaaaaatttacatctctagaaatattattttcaatgaatttgagttccttgtaaacttggttttcttaacaattttcaatcaaaaaactagttgtcattcaaagttcagcctgatttattttgccatcttttaatctttccacaggtactccttctactgctctttctttttcatccttaagcatgcctagaaaagcaccttccacaccatcacactctcaaactaattcttctaccctaactttttttggtctctcacctggtgctccatctggtctctcaaattcaggtagtgagagaggaaaggactcagttggctaaactaacacattgtcccaactatcagaacatgagattgttgacatcatggaagccatgatttctcgtgctgatcttgcttttggtttccaatctcctcaagcacctcctgctgccactggtcaacccatgactacttaagctaaagcaaacattttcaagccttgagttttcatgggataggctttggaaccgtattttagataagccttgtagtgttaagggggctctttctcatcttggctcgaataaggctatgcaagatgagaacactgcccttaaaaacaacacaatttgggatctagttccaccaccaccggacccgaatctagttagcaacaagtgggttttcaaacacaaatttaactcaaatagatcctttcaaagatataaagcaaggttggttgccaaaggtattcactaaaggcttgacgatgattttggtgagacctttagccctattatagaagcttcagcagttagaatcattctaacaattgttgtcactcatggctgggaaattagaaagttggacattaaaaaagccttcttaaatgaaaccttggaggagaatatttacatgtcacaactatgaggctttgaagagaaaggataagaacaatttttatgcaaactaaacaagtccttatatggactgaaacaagttccaagggctctgtttgataaactgaaaaacacattgattagttggaatttcaagaattaaaagtttgatacttctttgttcttttacaaacatggtactgatatcctgaaagatcttggtcgatttcattattttttgggcataaaggtttttagagatgcaacaggtctctacctgactcaaacaaagtgcattaaagatttgctaagaagaactaacttcaccaatttgacatctttctccacattagctactgcagggaagcatatgtccataactgatggggaattatattgccaaatccaacaacttgcaaaagtataatttgaggcctacactacttatgccatacaagaccaaagatttcatatgttatcaacaagcttagtcagttcttgaaaggtccaacaacaactaattgaagtggtgcaaagagggtaccaagatatctcaagggaactatgaacgagggtttacacataagttgtgatgagtcattaaatcttagaggatattcatgtgtggattgggcatgttttttgatgatagaaagtttgtggcagattattatttgtactttggtaatacattggtgtcttgatcttcaaataagtaagttgtggttgctaggtcaagtactgagtcaaagtaccgagctttatcacatgtagcaactgaaatttcttggatcgaatcacttctaaaagagattaacttttcaacacttgcaacaatcacatgtttggacaatatgggagtagtgccttagcttcaaatctatttttccatgcactaacaaaacatattgaagttgatgttcatttcatttgtgataagtgatgcacaaacaacttgacattagatacattccttcttcagatcaagtagcagattgcttaacaaaaaaatcctctacttcaagattcaatttcttgattgacaaatttggagcggttcacccctgcgtttgagagaggatgtgaagaaatgaatccaaatcaaccgatagaaattctattatttcagtggtccaagcactgaacaagtgtcatctcctcacagttgtgtcaataatgctaaaaattcgagatagattgagtcgttataatgaaatgataattttatcattgtgtattgaatatttcttttcttttttttttcttttttttttttgttttaccttttgtgccagttgtaattgagcctctcttgctcttgtgtgtaatggcattagtgcattttgcctataaatggaaaatgcatcaattgagctgagatttaccaaatcaattatttctaaaattcaactcccctccttataactttacaagtaattccaaccatatgttacataaaaaatctttctttattctagaaggctgaagtttggcatatcttatattgatcattaaaaaaaagttttttatttctcatcttataggcatgatataaataatatacaatgcaaattttttaaaatatttattttgtaaaatatttgatttgatatttagtatgaattatagaattgttgcaccaaaaataaaacattctatactaaataagtgtagattacacaccaaattaatgtaaccattcgaaaatggtgtaaaatcatataactatcacacatacacttacaaattaaaaaggaaaaatcaacaaaatttgg

SEQ ID NO: 19181 - DNA, 2620 bp, Cannabis sativa
atgtatgtgtgcagtgtgcacttaggaatgtatgggtgagataacaactttccttttagattcatacaatgcctaaatttttcataaaagagagttttgagttgatacatatgatggctttattttcaaagccaatttgttgagtaacattttctattagtattagaatctataatataaagagtgaactattttcagtcatatatcatttattcaatcgaactaataattctgtactaatgtttcttacaagcatttatttcaatgaaaataaaaagaccaaaaacccaggtttagttttattgagtacttaatatattcccacagcagccgccttaattgatttctttcaattcctcaacttcaaaaaagggacacttgaacagatttcaggcaccatttacacacttgactacttagtttctcattttctgcaacaacagaacaagacatgataatgaaattgattgtgttactttaagaaaactacagctgttaaatcatagcatatgatttcactcacattggaaacatctatccaccgatggagtgtcttgatcgctttgcctgatagttgagtctcgcgagccaggatgatcccttcggccaaagagttcacatggccacttaccaagagagcagctgctgcatttaaaatctgatccaatgttttcggcatgaattgtgtactaaaaaaactaaagaaactggtgctttgtcataagagaattaaggagatacttacaaatgcatctgcaattgagcttttctctcctgacaatacacgctttagtgcctcagcgttatactctgggcctccccctcgcaagtcatccagggtacaccgaggcatcccataatccactgcataatcaatgatttgttagcagattgaagaagcaatgtaccatcctgaaattccatggcgcctaaacgaaatatttccttcggaaaagaaacaaaattaaaaactagggaaaagtttctcacatggatcaaatgagaacttctcaatcttttctggtgtaacatcaaagattaacccaggtcctgtgtcaaataacttatgagtaactgaagaatatgtaggttgggacttgtaaataaaaattttagccaatggaagctaagactttctaactactagatacacgtagtctgacatacaaaaaaaaaaaccagatctttaccaagggggctcatctcatccaagccctctgagtgaacaactaatgcccgtttcatgccaaatcgctgcaatgctttagccatcttcaagacctatttgatgaagtgtttgaagataatgctcgtcaaagaatagcataataagatttacaagcaaaagcatattggtaccgaatatataaggcaatcaattcattttcattaaaggacaaccataatcaaaaaaataataaaaaagcacccattttcatcagttaaactgattctacacagctagatgggcccttaaaattttcactaaaattacagtagactaaactagatgattgagagtctcacaagtcataatctggcattctccagttctaccacgactctcaaatgaaaagggcaatcagatcttttttgtgtgtttgtatgtggacactattattttctattacaaatggctccatcaacatttaggattagcattagatatgattatcatattagcaagtcaccttgaacagcatatatagtacactccaattctgtggggattcgaagctcggaacaaatgcctaacagcactttccaacactccttcttaccactagataaccttggggttgcatatataggcctaagttcaacaaagcaagtagaaataaagtttaaaattattaaaatatgacaaaacacttaccaaatcttctgtgtagacacccacaacggcataaggtacttttgctgggttcaacatagggcccaatatattaaatacagtttttacttttagttttttcctgacagagcgtacaagcttcattgctggatgatatgttggagccatcataaatccaatgcctgcttctttgacacagcttgaaactcccttttaataggagataaattgaattatataataattagtttagttacaatcttacaagatgagaagctgctgttaacaaagacattgacaaatttgaaattggtttagcatcttattaatctaccagtttagtcatccgatacagaaaatattaggcaccaaccttaggctccaggtcaataactacccccaactcttctaatacatcggcacttccacatgctgaagaacttgaacgatttccttgcttaaagggaaaaataaaatcaagttagctctaacaatctagtgagatctaacacattcatgtcaagcgatcaataaaatagatttcacctttgcaattttggcaccacaagctgcagcaagtattgaagccccggtcgaaatgttgactgtgtttgctccatcaccacctgttccaacaatgtccactgcatcatctaagccctttacctccaaactatgcttcatcatcgccctcgcaagcccaacaatctgtttaaccactacaatccataagtcattttatcccttaaccaccccccccccccc

SEQ ID NO: 19182 - DNA, 3844 bp, Cannabis sativa
  modified_base (3255)..(3266): a, c, t, g, unknown or other
  modified_base (3477)..(3479): a, c, t, g, unknown or other
aaatagctataaataatttttcataattaatcatgattaactgataatttccaaattaaactaagcgggctttacagttgttgttaccagtgaaattattgatggtggggcattctgatgttgaagcattagttgttggttggagctgttgagtcaacatggaaatcagatgttgacattgagctgaggtgagttaagaagtggatgagtctcctgatggaagagaaatgttatgagtctgaggtacagttttgttggtggaaccaatttctgggaggggttaatctattgccaagagttctttgtctttcttggtggatgaccatagaaaagactttgttgagaggtgggcaaggatcgattaatagtatctgataacgagtagcatgataggtttcattcaatcctttgaagaattgtaaaacctgatcatggttgatgtgatcttgtgtttgagctgtaaatgcacaagtatagttaattcttggacgaagttgatttattttgtccaacatggatatcaattttgtaaaataggcactcacagtatcatcaccttgatgtagataagtcaaggtttcatttagttcaaagattcttaggccattgccttgattaaatctgctgttaagaacagtccacatctcggtagcagtgtcgagatacataatactgctcttaatctcaggtgagacagaatgaaggatccaagatatgactaactgattgcatctaatccaagaactctaaagggagtcatgaataaagggttgaggtaaagtaccttccaagaatggagttttgtttcgtgcacttatggaaatcttgaaatctcttttccatggttgaaagttgcgattgatgaggatcagagtagcaagaagcaatccagggtggtctacgttgctcaggtaatatggagaacaaatgtcttcatatggaggtcgatcgattgtgttcgatcgagggacatggatttagtcttgtgatgattgatcgactagaatgggtagaggagcaggaacgtgatcgactggattgggtcgagaagcagcttgatttgtatttggttgtaaattgtcagtagatttgttttgaggtggtggagcgattgcaacatcgaccactgatggattttttgcaatgaaagtagctgagatggtagctcgtgtacatactattgttaaagatgaaggaaacttcaattgaattcttgaaggttgaagatggaggagtcgtctgataccatattagtgattaagaaaaatagagtaattctttattgaacaagaaagaatatcaagttttaaaaaataataaaatatttaaaactttaaaaaatcaaaaaaataactttaaaaataattattattttttaatttttcttcttcattcttcttcttttgaaaaccctaaatctctctcttcctctctcgataatctctctctttctctctgcttgtgaggtgtcggcgtagccgccgacggactaggagcattgtactccggtcctcccctcatcccttttcctaaaacccaaacctcaaaaaccccaaccctttgcagacccaaacgagtcaaacgccatctaacccaacccagaaaatcctaacccaaaaatcaaagtcccaacccagaaaaccctaacccaaaaattgaaccccaacctagaaaatcctaacccaaaaatcgaagccccaaccctgaaacgattgctttgggttctttccatagctgaggaggagaggcagcacattgagggcaggttttggggttttggttttggagtttaggaagaagaagtgggttctgattttggggttcacaagttagagtgaagaacagaatatcaaaaagaaaaaaagaaagaaagatttttttttttttttgtcatggaagggagtatggaggcaagatagtgatgtcaggagagagaaagaggagcaacgagatggaattacggtagaagaaaaaaaaagagaaagaaaagaaaaataaaataaaatattttttattattgttttattttttataatattttaataattaatattacgtggacaactaaaaatttaaacacttgtgtacacgtggacagtttactgtggcacttaactaagattttttaataaaagtgtaagagcaaaacgaaatgggggttaaataagttttgccgtcaaaattagatgttaaaaaaaaaaaaaaattaagtaattttgccgccaaaatccttaaacatataagacatatttattagttctgagagctcaagattaataagaatgaaagaaatgttttcattaatttgacagtaaaaacattacaaatatatttatactgattgcaatcaataactaatagttactaattctaattttgttactaacactatatatataactgaacaatgtactaagttacaacaacctttaaataattaacattatataattgggctcaactaattaattctaaatttctaactaacttttttttaatgaatcaacaagtatattattattctaaaaaataatttgtacagcctagtagcatcctccaaattaaagaggacctaaaaaatctataaaaactttacaatatataaaactaattcttttcacttttagttacatgtttaagccaaatacaagaaattttatttttgattacatctttaattttgtacactattctatcactatttttcatcaagccatttcaaaatttgttatttcggttggcccaaatataatacacaagtgtaactaaggtagctgagatgatcttcttcttgaactttactaactaacattcttcattaaccagcagtgtttaatcaagtcgtctgtagtcattccggggccttgggcgattaaaatatatagagctttttgcaacaacaaaattgtgtttttttatattaagcaataatcactaagaaattgcatagaaattagaatttaaagaatagtattttggtaaaaatttgtaaaaaaaaaatagacttataaaattgatgttttagctattaatgttcgttaaatactatattaatcaattgtttaatataaaaaattcaaaataattttggagtataaaaataaagacaaatgttaattaatgtataaatctataatagaaatttaatttaaaaaattactacataaacgactatttgcagtttacaataaataaacaaattaatacattaatgtgtagtgtttcattttaaatgagaaatttacatggtatacnnnnnnnnnnnntttttttacaaaaatattgctaggcggtatttttttactgtgtttttttataagtttcatactacagtatactgtgttaagttttctttggtgttctactagtgttttactagttatctactattgttttgagttgttctgctttgtgttttattggtgttttataaaaatacagtatttttgaaaaaatttccgtgtaacagtatttttnnnaaaattaacccaaatttcagtatttttataagtttcccttttaaattcaaagtttttttaaaaaataataaattttcctttaacaaataataacaacattaataaagataaagtaaagactgtatatagatacaatgctaaatttttaaataaaacaaaataagggcttaattaatattttttaaaaaataataattaaaagatgagtaatatgggtgaggcccaattagctaatatacctagtgggcctttggcaattgccctagctgtccatattttgggttcgttcattaaatattattttacaaatatagaaaaacaacaaaataattataaaaatgcggttttatagaattttaaatatt

SEQ ID NO: 19183 - DNA, 2367 bp, Cannabis sativa
atgccgcaaattactctaaaagaaataaaaaaaacataatttaatttatgtttcgttccaaaacagaacagaccaaaaaaaaaaaaaaacacacacacgagcatttcttctgaagtgggagagaaagacctctctctctctctaagctaaaactctcgttattactatctctttctctctcccagatccaatctccgtcttcctctttctctttccgttcagatctctccgacgacctatttggatctccgattcgctcttcctgctatccacttttcgcacttcaaatcttcaatcctttactcctactaattcatcgcttgcggatctgattttgagctttctgacagcttcaccgcggattcagtcatgaatccattctcctccggtacccgtttgaggttagatattatcagatcgtcacactgtatatgtatatacttgaattatatcttctatacgtgtgcttgtttatatttgtttatgtaatttgaattttgttgagtttggtttctataattgaaagtaaggcataatttggtgatggaagttgtttatgagatggttttgtttggtttattggtgaatttgattaggcaagtatatgcatttccttctattagattttgattcgtgtcaatttgaagttagtggatttggtaaatttgatattcaaaatgggatcagcttcgagcaaattcgtgtttaggtttttttggtataatcaaaaattgatttccattattattatttttcaatgcgtttgatcatgtgtagttccgttatactgtgaagttgaactcatttggttgttataaatttaaacgatagacaattcctatagtaattaacctctttcggacatttctattagccgtcttgtattatatgtctaccttttaaggctcatcgacattgtcaacaatgaaattttctttcttacaaatagtgtaaccatatgctccccagtatttgattaccgtatgaggcacatctctcatggcaccttacatttacttgaaagtgatttataaaggaatcattgtttttatctggttaaaaacttgtgattgtgatggtaataatgcaagtagatcagacttgtatgcaatatgcatgaatgccgccaggatcgaagttgcaacaatggttgaagagttttgagtgaattccctggtgccaactggaaactttgttgtttcaaaattagagtacttacttgtgaaaataaattagagctcatagttaaatagatggatgctgtctccttttcaaaattgacgtgaagagagcctatcttagtttatgatttataagctgattctaaagtgaatcataacccatcacggagtttgcttatatatacttgatttactgcagggacatgattcgggctatacgtgcttgtaaaactgcagcagaggaacgggctgttgtacggaaagagtgtgctgctattcgtgcttcaatcaatgaaaatgataatgactatcggcatcgcaacctggctaagctcatgttcattcacatgcttggttacccaacacattttggtcaaatggagtgtttgaagttgatagcagctgctggttttcctgaaaagaggattggatatcttggcctcatgttgcttcttgatgaaagacaagaagttcttatgctggtcaccaattcattaaaacagtatcctgttctttgcctcactcaacttctcttgtctaaatttttattttaattgttctggtctttgttgagttttctttctttctttctacccccacctttctgtttttaatataattattaacctcagtttatatttgtttcttaaattctttttctcttgaaaaactttttttgttttgcaaatctcttggtgaaactttgaatataatgggcaaacctctgtactattcacaaaatatcacttggagaaaattctgttttttttttttttccttttatggcagcaaccttaacttatgtttcagagatctaaatcactcaaaccagtacattgtgggtcttgctctttgtgctctgggaaatatttgttcagcagaaatggctcgtgatcttgcaccagaagtagaaagattgatgcaatttcgagatccaaatatcaggaagaaagtaagtttcttctaactgtaatgccatgaacaactatcctaaactttaatttctcttggtacatatattttttttgcagttgtctttatatttaatgtatgagccagaaaagtgatattaggaatgtttaagagaattttttgaagttatcaagatggcctcgacaaaaaaattaattaattaggcaccctgagaaactctaccttttgaaaatcttgttggcaactttacgat

SEQ ID NO: 19184 - DNA, 2382 bp, Cannabis sativa
tttaaatttaaaagtacatattaataaaagattgaatcgcacttttattttatttttagtatcttttaatatcagtttaatcgatcacgattattctaacactatatggggggagacttttaaaaaccttccctgaaattcaaaaaataaaaggaaattatacattgccctcactacaattcctgacgtcttcctcttgtaacatatatataattttcctaattaattaaaataaaataaaggacagtacaccaaactagttagtttgcgttttcacacacacaaatatatattagcatttaattacttatgaccaaaaccaattgttccaattttcatttctgtacaattatatataattagtatatatcaacaattcttctagaattcattcctaataacggtcaacgtacgactatatatttctcctatatatctatatcaatttagataaattgcatacgtagctaatttacaacgtatgctttaattaattttattaaagcaatatgtataaatttcactttataggtaagaatcttatatcaatctttctttcttcgtttataaatgtacaattccaaatatacccttgtagaatctttttcagacatatataaagtccataagttgtacacagttgaacatatcgcaaaaccatcaaactatataggctagctaagccactgtactacttccattattggatcgattgatctggctttatatatatatacgaataataatcacatctagtgaaaataaagaagataatgatgtcgtcgaaggtggtaacaactctttttttgttgagtcttcttctcttattcacagttaatacctgtttggctaggcctgctccattatcagctttcatttccaactctgatactactcttattcccactaaacatcttggccataaggtaataattaagctctatatctatatctctgtttttcattttctgattattaaagggtttttaattattattgggttatataggtcattaataatgaagcagagcatgaggaggaaattagttgtgagggagttgaggaagaagagtgcttaatgagaagaacacttgcagctcatactgattatatctacacacagaagcaaaatccctagattatataaatttattaactattttatatcaatatagatatatattaattgttattctatataagctaaatcttttttctttttctttctttgctggaactatatatctagctaaatgtctccaaattacatattttctcagttttaccactcaaaatctgataaattatttatttatttaaatttacatttttacataattaaagaataatttgtgaaattttgagtaatgaaacaaggagatgacctgtaatttggataaagaaatttctatttgttttataaatagttttttttttttttttttaaatcggcttttgtaaaatttctgggtttttgataattttggagtgtttcaatttattgtattaaatatatatatagaaagacgggtctggttgtacccttttgtaattctttttctttcttgggcgaactttatttataatatgaaatgaataaatggtttattactagtaataatatgaatatataggctgaaaagtcaacaatttgaagtatcattattgttattattgtattatatgcccaaaatgagtgaaaggccagcacacaaaatatataatgaagctctagagatctgtaaaaatcagacatatataaataataactttgtcaaaccagtttctgatcagatcagtttcatatatttgaatgaattcaaatcggtcaattgtattgtacttttatgttatctaacattttgggattaattagtcacaaattaatgagtccggaattaaataattaataatgtatccaaatattatatatgtatactgcaaatataaaactattgatattttcgttttcatacaagagaacataaaaatacaacattattattgtataataatgcctagtaccatgtaaatgtgtcactttataattggatagtgatactctttaaaattattacattaaataatatgagactcgatacataattacaccaataacaatattaacatataagatgacgttaagtaccaccagtacctttaacatttctcataaaagtaacacatttccttgtacatattcgcattatagaaataagggatgttggcggctaaattaaaccaccttaacttttaaatttgtaacagttaaccccaaaactgaaatttcgacggcataacccattgagctgtggttctgttttgctcagcactattttatcccccaggctccgttttagtgccaagttggcatacgtggca

SEQ ID NO: 19185 - DNA, 9474 bp, Cannabis sativa
  modified_base (4896)..(4934): a, c, t, g, unknown or other
  modified_base (6152)..(6157): a, c, t, g, unknown or other
  modified_base (9423)..(9428): a, c, t, g, unknown or other
tattaagtcgcttataatgagaaatagaaatactagtgactttcaaacgtgaaaactatcattaagaacatactcattagaaacttgcgagataaacacgctaatgtgagaataacccaaacgcctgcatagaagatgtcacgactctagcggtggtcaaatgttacattttgatccttgtagatagatttaataaagttaataaacaccacaataatatttagcatctgtcactccttttctctgactagtacatagctattttaagtcattcagaccatccattcaagcttaaataggtacaaaataagttttttcaatggaaaatttgataaataggataatgtttggattaaactcacttaattgtcaagttagtaggtccatctatatgcttatcagagaactatgaagaaagttgttgttagtcataacaactataaataagtgttactctattctcaaagggagttttgagctctaattaatctctaatctccaagctcatactttagttttagattcaagtttagagagagagagtccaagatcatagtgagggtgtgtggatggatgtaatgaaagtatcactcttgaagtgatttccctcaatgtgagacatttctttgtaatactttactgtgctgagttgtaatcttgggctcattcctattgtgtactacttgttattccttctcaatgaagattcatcattcatttgttatcgagctaagttttcttgtctaatttcaattaagttctagttttgatttgtgattggttttagttttgtttgtgcattcttgaacattattaatgttgtaacaacttggtttgagggtaagcattaaccatagataagactaaactactaacgactttcttcctcaacgatactatcttcatccactaaaatcaaactgagttcctagaacgggagaaaatagagagtgggcttataaagcccatttggaaaataattaatataatagaagacccttgtttaaataaaaatttctctacggttagctttaaaaaaataataataaataaaatatctcatcaccattatcaaaatgtataaacaaaatagagagatcgcaaataatcacaaaatcaagcttcaaatgcatatcatcacacatgtcaactagacacacttagctctcaataccaatcctaaactagatagtcgcgaaccatcaaaatgttagggctcatattcagctcacttcttgtacagattttaggtcttacacctacaaatgagtgcacagctgatctacctatgattgcacagagactaggtcgtgaaataacaatatatgcacaagacataataaatatagctctcatcagtactataaccaaatacgaacattaagaacgacaagagtacatattctgtttattaatttatgaaaagtgtgagatgaggaaggtatatgaatatattgcgcttagtgtgcaattatttatatatgaaaaattataatatttaaattaaaatagtatttaattttttttaaatattaattatgcgaagataattatcttatttatttatattgtttttaattaatttatttatttatattgttagtgagttgagaatattgtttagagtagttgtggcaattttttaaagatagttaaagtggtaattactgcgaggtaaaatattatggtatttttgtacaagatagacaatcatttaattaaagcccaatatgaaaatttattagagttttataatttatttagtgggtttaattaaagaataatataatacactttttgtaaatttttacgttcaaagatttatttatataacaacaccaaaatagtaagaaaattacataaaagtaacatgaaaataatattaaaacaacaacaaaaaataacatacaaataacaaaaaatgatcaacaaacgaacaagagtacatcataaaaatacatcaaaaagctgtattttctataaataaaatcataaaaatcgtaaaaatatacaaaattctgtacaaccgtatttttgtaattttttttataaattttgtgtataatccctttaattaattgtataagtggtatcaaataacattattatggaattaatgttaagaaattcgcaaatttaaaaaatgtcgtagcaaaactaccatatctggagttttataatttcgattgaagtgattttagtggtgttagaaagataattcaaagatctataaattttataaaaatagttatatcacaattcgaaagttttctaagtcaaaaccgagccttaaaattacgagatagaggacttacaattaaaattaataaaattagatatttcttgatttaataatattattattattattattattattattagttaaccaaaatttattacaatacaatatctcatactcttcaatacataaatttttatcaaacactaaattattataattttatttttctctgcaaaccaattagttaaagtctcattttttgttatggtagcttgttgacgagaaatatccctacaacaaatatgagtttccataatacatcatcactataagcttaataaaaaagtattgttttttcaaaagaaaacaaaaaaaaaacatataattctaaataatttctgtttggagtgttggcttttaaatagtctctagtttaagcccagtcataaattaggtaatgcatgaataataggcccagcccacccacaaaacattcaccattttccttctctctcttcgattagatcagatcgccattgaccttcttgtgctctctggtcaatgccatctagctaggaccattttggtgaattcttttagaatttagagtaacactatggcaacacaggtctctttagaattttgttttgttcataattttttttggtatttgggttatgcatgagcatttaaaaatacacacacatttatatattatactttgtatttatatatggactaattgaatgaaatttatagtgactaactgttgatattttgtgcagtgatttcaactaaagaacatgacacaaaattgttgctaataagagcttgggtctcctgaagagtgaagattaatgaattagttttagaaaatacttattgtagtatcttaattctcacaaataatttttctcttatattattattatggttgtaaacttgtaagagtactcttttattaactttattttttttttttgagaaattttattaactttattaatttatataaaaatatattttcgtgttggatcaatatattattttcttaaataataagaaaaagtattattgtaaatcatgtgaaaactaaaagaataatgatattataaataaataaaagtattatgaaaattaaattaataataatattttaagtttataaaagtaataaaataatatgcattaagtattattgtagattattcaataacactttatataagtgaaaaaatatattataaaaattaataaagataatacttatctaaacatattaatatattaaaataatacctaaaaagtattataaaagagtttttaataatattttattataagtcttaaaaagttttattaaaaatgtataacttttaataacacggctcttaatacatcaaaaagtattatggaaaggtttatataatacttttcttgtattataaataatattatttcttgttgaattcctttcttttggatgtttaatttgtcatataaataaaagctaattataattattatatattctgcaattattattttagttcttaatatcaagttattttttgggtatagatggagagatttcttgaagattttttttttttaaaaaaataataatattatagaataaaatactaagacaaattataaggaacataaaataaaaaaaaaataaataagctaaaactaataattcctattaataggaaaaattttaaaaatactctttttttttatttatttacaattttacgatttaaaatttttaattacaaaaatacatttgtaaaattttgaaattataaaaatatattttactcagcaaaaagtaaaaatacgattaaaaaacaaaaataattaatcagcattaggataactataaataaactataaagaaattataaaataactaaaaacattctcatgacaactataatataattataaaacaaccgataaaatagatcattatttttactgaatatgtatttttgtaaataaaaaaaatttaaagagtaattttttttttctgtgtagacatatttttataatttttttaaaatttttttggtttattatgtataaaattttctatacattaatagcaacttgggtatgtttaattgcttattatatttaaaacatttttattcctttctattaaaagaattaatttttaaataaatcttaattaacaatatatataaattaaaaaatgtgttattttttattaaagataaataaaatatactattatataccaattaaatcttttatgatattttttattcaaaaaaaaaatcttttatgagatatgcaacaactcatcaagatatcaatcaagttgtctacaatgaaaatcatataaaatatataactaattgtaatttaattttattaatatattaattgtaatttgtaaatattattatcaatttattcatttaatttttttatataactcagagaagtttttgtattgcctcaaaacatatttacaaaattacaatcaatctcctactttcttgattcactttctttagaagaaattttttaattctattctttaattgcattcttttttactctcgtgacaagtctataacctaaacaattttggcatattattattattattattnnnnnnnnnnnnnnnnnnnnnnnnnnnnnnnnnnnnnnngttgttgttgttgttgttgtgttatatatgtataacaaatgttatgtgtatttaatttagattttttatgtgtaaaaaaaataaattttatatatatatatatatatatatatctaaaaatataaatcacttcatttgatttataatagcagactttttcttaaaaaaaaaaaacagacataaatttattaattcaaatagtaacagtaaaaagtaaatttgattcaattatattttaaaaatatatgtaaaaattaattgtaaatcaaatttaaatttaaacttatacaaaaataactaacctattttccttttcaacaaattaattatcacaattatatgagatatattttttttatatatatacacacgtgggttagatatttttataatacactttcaaacaacacaccatttctaaacaatacacacatgacaaattatcatcaaatatttattttatataagaagagatcctttctaaaagattttctttcttttaaaaatgatattttccctagactcaccaaataaagataaatactataaatgacaaaaatccaaaatgatttattgtgttgaggttgaatattttctctgatttaggatttgattttttaacatggtgaatagggtgatattgagatgtgtttcagactggattagttaataatttaaagctcatttatcatgtgattatttaattatatatttataaattataattatttaatatgaatgcttccatcaaccaacaattttaaactcgtttgtattactttcaaaactctgattacaacctaaccacacttttgtataaaaacctgattatacacatatacacataattacaagagttcaaattctattataggcaacggttttaaatcgtcaagattgtaaaaaaagaaaaaatacagttttttttttgaaatagcagaaaaatctatattttttctttttgaatgatgcattatttttataattttatctaaattaaaataaaataactaattaattttcttacaataacaacttactttaaaacacattaaatttatatattaacaaaataaatatatataataaataaaaaagtacataaataaataaatgtatttatactgagctcggagagagaaaaagagagagagggagacggacaggaggtggtgatggtccgacgtatgagacgaagatgagagggacaccgacggnnnnnngtggtggtccgacgtatgcgacggagaggagagggaaagcgacgggaggaggggtgggtggagatcaatggacgagagagacgagaagaaattgagatcgagagagggaggaagatggctagagaggagggcgatggtgcggaggcgtgagtgggattttggagagttaacatttttgttttagggtgtgagaaattgagaagaaataggtaagaagtaataggtgagaagaaataggtaggcatgtggaaaataaaaaaaaaaaaagtaggtggacacatggaaaatgtggcgagaagtaggtgataattttttaatagacccttatacccgaaggtttaaaatcgttgggtatagtataggcatttttttgtcgtttatactatacatgacggttttaaaccgtcggatataaggatccattaaaaaaattacattttataaaaaaaaaaacgtcgcctactttgtttagtacgattttaaactgtcgggagtattaaatttttcccaacggttttaaatagttacttaatttttttagcgacggccccgaaaaaaaaatcatttttaggaccgtcacgaattctgatatttgtagtaggcccagacctccccataccagttgttacattcaaaaggttgtgaaaagagctgataatcctatcgaatagagtaattgagcaccatgaactgttgtagttattttcttctaaatctcttctttcacttgcactatttgacgccagtaccaattattttgattgaaacctttatagtcccacaagttgtttctttctatatagacactatgaatctatttgacccataagagttcttgtttcgttgtaagtgcccaaacatatttgctaagattagccttatttcaaagaaaaagattacgagatcccaaacctccctctttccgagtcttacataactcttgccaaactatgtaccccaacccattgtactctgttgtgtccttctaaagaaaagatttgcaaatagcaataattgtatttttttgatagggacccaattttaaaaattaaaaaagaacttttaaaatatttaagataattttatattaaattaattaataataatacatattggtgtaacttactctattataggacaactcgaatgaagaaattcaaatttagtattaaatcaacagtaaaaggatattatttcaacacttaattttttccaattccaactacaatactaaaaattacactaaaaaatatattcttcataattactttattttattaaattatctcacactgatattttaatattttaatattttagtgatgaactacttcattatgtgtaatttattgaaaacattagaataatataagacataaaataaaatatcaaaataatcacaaaataataaagagtaaacctgattttcatacaagatttctttatatttgtatttgatttgatttgatttgaaagagacaaatagtacatgtggaaaaactggtaaccaatggaaaatgattaacgtaacccgtgaaataatttggaaaagcgcgctgcggctaaccgaaatctcccaaatctatttgatcacatgttcaatgtccccacttccatacataattacataccattccaaaaaacatttacactctttactcctatttatagtactactcccacataacaaagtctcattcaaaacaataattaaaagaaagaaaaaaaaaaatgacaatcaacaatggcaatggtcaaaataccactaggtcgaccacagtagaggaagacctcaaattagttggattctcaaacttcgtccgtacaaatcccaaatcagaccgtttcactgtgaagcgattccaccatgttgagttttggtgtggtgacgctaccaacactgctcttcgcttctcttggggcctcggcatgcctctgctcgccaagtccgacctctctactggaaattcctctcatgcttcctatctacttcgatccggtgagcttaatttcctcttcactgctccttactcatctgccatttccacccatcaaacctcttccgcttccatacccaccttcgaccgctccactttcctttccttctttgcggcccatggtctcgccgtccgtgctgtagctctcgaggttgaagacgcggagtttgctttcgttactagtgtcgccaatggagcaatgccttcatctcctcccataaatctaggagatggagttgtcattgctgaggtacgtctctacggagacctagttttgcgttatgttagttataaagttcaaaactctcaaaacctggtgtttttgccaggttttgagtcagtgctcactgctgagtcagatcagcctttggattatggaatccgaaggctggatcatgcagtgggcaacgtccctgaactgctacccgcggtgtcatatgtcaagaagtttacgggtttccacgagttcgctgagtttactgcagaggacgtcggaacgagtgagagcgggctcaattcgaagatgctggctaacaataacgagacggtacttattccgatgaacgagccggttcacggaacgaaaaggaagagtcaaattcagacatttttggagcacaatgaagggcctgggatacaacacttggctctggctagtgaagacatattcggaacgctgagggagatgaggaagcgaagcgggttgggtgggttcgagttcatgccttcaccaccaccaacttactataagaatctcaagaatcgagctggggatgtgttgacagagactcagattcaggaatgtgaggagttgggggttttggtggacagagatgatcagggtactctgctccagattttcaccaaaccaattggagacaggtaggttttaataatataatatatctatattaataatggtttaattaatggttgcatgaatataattaaaagagcattgttttttgaatattagtgttatccagcacctttagatatgtcgtcttgtaattaattaacaatactttttaaaaattattatattaaactatataagatacaatacttagttagaccaataacaatattaacacataggagtgtgctaagagcatctctaatagtagcatcttttaaaaatactaaaaatctctacatcaggtaaaaatataatattttattttaggataaatagaccttatattttttccaaaattataaaaatagaaccttgaacataattttcgacaactttttttttaatataannnnnntgaagacaattcttaatacgaacaaatacagaaaatataaacagtt

SEQ ID NO: 19186 - DNA, 4221 bp, Cannabis sativa
  modified_base (4183)..(4185): a, c, t, g, unknown or other
tctttatcttattaaattgttttatacggactatcttatgtgacatctcgggaaatcggggtgttacaaacacaaacactttgcgttattgttgactctcatgactttcataacgcgatgaaactgggataagtgatcactggggtctgagtctcctgcttatagtgtcatttcaggcattttaaaattctttgggagctccacttcaaggatgtttctagcacagggttcccggtcctcacaatcaaactctgaatcatctcccctttgtctctaggagactttagctatatctttttagaggatggcaagttagccaagattccctcattcagggcacttcttgagactggtatttattgtttcttccgctccaagcgatttctaagatcaccatgttttgcattgagtttctatctcaaattgacaggaggatctttatggttttccccattctctccctcggctcctagtgcacaaatatgcttttccgatctccccgatcttaagggccatcatttccctttagaaacctttccttatgcggaccttttcctttagggagatcggagtgaactttccacgaatcttaagcctttttgttcttttttatgaatggctgctgggtttgcccttagggatccttctaaagggtaccaaatagggctcatctctcgatttttgtgcctccaaatatccggtggcagcgactcatctcttgttttgtcttgcctaatgggtctggcatttggatgcacatggatgcctacagttttccattactttttacatggcgatcttgatttcttgcatcctcttgttctgctccttttgctctcccaattcagcttcatggtcagtggctttctatctccacgccataagttcagtgtaactaccatcatcatatgcctcgtactcttgattttcattgtattctatatcattgatttcatcttgttctacttctacgtccactcgcgaagccacttcctcttcgtctagccccctagggccttgaggtggacgtggttggcgtgcatggtttctagtttcaaccatctaccaagaatttatttttgatattcttcttacgtaaagctttccacaactcttaatgaaagtaccaaaatattgactaagatttttggcaactaattaatgagagttgtttaaatgattataagaaatttaatgcaaattgtttttacataattgggacattaatgagtcttagtccacaagtcagtgctatttaatatagtgttttttccttacagatgatgtttacaccatttttttaacccctttccagaatatggttggggtatttatagcttcatatagagagtaaaaaggtcaatattgttgcaagtgttaaagcatggcttgcataagttcataggttcaaataatagggaatgtatgtatgtatagtaggttgcataggttttagctagatattaggtaagataagcccttagcctttcttgattgatatgatagttcattatgcaactatcataaaactcatatattagtgtaatcaccaaacaatgggtttaatagctctgacatgtcttttcagatccattcacaaacgcttcctccatgttgcatttaatgcgcttatataagttactggaggccttgcctagctcccgaagatgaacaaaatatcttggcattaagatgcagttgaagctcttggagggaccttccggatatgactatcaaatctaggaaaattcttttggggtttgtcttaagtatttcctgatctttatacccacttgccacatggacaactttgagactgccacgtatattgggacaaatgaggggaaaaaattaaattaaatttatatttagatttatctaaattagtaattttaattaaataagtatataaatattaaagtaaatatatttaaaatagatatcaaaatgaaaatacattctttttaaaataatgagctatatttttaagatattcaatctctattgttgattctacatggttgatttatttttaatgggatacatcccccatagatataaccatttaaacaatctaacacaatagaattctaaaaaataaatacttttgtacattttttattcttagtaacgattacccaaatagtgactactcaaaatatggtttagcaaatatttaaacaatggtagaagctcatgaaataagaatgaccttgactctcacataaacgagacaacgttagattcatgttttgatcgaataaaaggttactaaaatagtgtccattttagattagccaactactctcacctaaattgtgtatgaatttatattgaacatgtattcttttatgttattaattatgtagtatcaatttcgaatctctattgttagtctaacttggcttgttattttcaatgggataatccctaatagattatcatccgttagacaacataatagtgttagatctcctgagataagtattttgtaaatacaaaatctagttgacacatccctacaatgataacttagactagtgtttgcaatgctgaaacaataatgaagttcataaaataagaataaaatcgttggattcttattttaatcaaaattgttctttagttttcctcttagctttttcattaagaaattgcttaagatggtatatcattggataagaaggtttataaattatctgcttatgatgtcactctatttttttttatataaaaatgagtggcgcagattaccatattctagatatgctatcccgtaattatataaattctcgatcttagaaaaatctcctagttcatatgcttactaaaggtaacttaaacttagagttgaattattactttagtggttgtccaagctaaaataattactcattgaatatttggtataaatttacgtcttcgactttaaattttagattccaaatagaaatttaatttcagtttcctgaatacattgaacactacggtataactttcacaagttattaatatcgattttctatcaatggatccaaactatatgttaaatgtatggaaagtgagtcttctatttgtattatgtgactagaatctacttgaactattctaggaactctttattgtaactaaacttagggatcatcaaaagatcacaaccacaataatatatttatggcatttacatctttttcatagtaattttgacaagatcattctctacaaagagaaaacatgctaatatccacttagaagtatgttcatctacatatgtatgtacatttaggggtggatatgagttatcattaaattcttagacaataactctagaatataccttatacaaggaaatttgaaatatttgagaaatttcatgaatttctagcaatggtgaaactattaaggtaagcggttaaagatcttgcgaactgatagaggtggagaaatatttggttatgtagtttaaagatcattaaattgaacttcaaattgtatccaaaattacgtcccagaactttggagtcacatattatgaaaatgaaaggtctatgattagttactagcagttgcccgagtccttctagggaaatgccttagagatagcaaacaacattctatgtcattccatctaagtctgatccaaagaaaacctcataatgatggagtggtcgtatacttagtgtacaccattactagattcagggatgccctgatcatgaacttaagaaaagcaagaactgttaactaaagtttgcatgtttaatagctattctaaagagattagggtggaccatcatatggtcattaagataagaaagtatttgtttcaacaaatactactttctaagaacatgactaaatttgtagcaaagtagggggagatactatttgattcaaacccatagtgttctatgatcttattctacgtaacatgatcctactgcctctattgtattgacacaatcaatgaggtcaataccactaatattcttagacagaaagtcacggcacctcgtcgtagtggggggtttcaaggaactcaccctgttatgacttagaagatacttgtgataaaaattcatttttagtttaaacaagtaataaatagtcctaataaggaacaagtatcgaagcccaagagaactatagttgaaaccattcatatggagcaaccaaaagtttnnnattacaaggacaagaagggaaattttgataataagt

SEQ ID NO: 19187 - DNA, 2459 bp, Cannabis sativa
atctgaatagcaagcccttgcctccaagggaggaccctccattggtgcctcccactgaaggaaggactcatgggcaatagcccccagggaaaacaataggatgtcgtctcttatactatgctggagagacaggactaggagttggcgaacctgggattggcaaggcacatgtggacttcggagaagatattgatttagctagacttagaaaaaacgtttcccaagttgtcctggctgaagaaccacgcgctcctaattacgatgtattcgctcaacagatactagaattcctgaggttgatggatgactaagagtacatcctttgatctcagcaagaaaagttggatcgccgcaatatagaggccaacaacctaataagatagttcaaccagagaaccaatggaagaggccaggatctcatcagagatccactctaaggaaggctagtggatagatcagggagggtctgtcgacaagctcatcaacccggttcctcagggactaggataggtctttccttgttagatggaggaaagaccttgacaaaaacgtctaacgacaacaacaaccagatcctaataactagcggcatggggcctagccagagatctgtagctcagtaacaaccccgttattcaacctttggctagccaaacatctgtaggagttcccttggccagccagaggggagcactccctccctgagaggagcgaggcactcagaggttaagtaaccaaactccagcagctagcatgatctacctcctctcaacacaccatcgacataagtcaaccgaagagtcgtgggtggctagaccctaccctttgcaggtttggccaaccatgaaagaatcacgagaagatagactctgccctatgtatgtcttcccgaccatggaggagttatgggtggccagaccctacccaatgtagatttggtcagccatggatagctacctagtgtaggcctggccagccaaggctaacacccttgcctaggagtggtcggttagggtttacaattcaacacaagattggctaaccttcaccatacactctcttagagtatgatcggccagacgctgtcacaccaaaatttgcaacccttccaaggagggctagtcagtcaagcccctacagcaacagagcaatcttggcaagcatagttggaccagttaaggggcacgattcaaggcatagcaggtccaaaaccttcagaccttgaactagatccgtcaaggtgatcaccattctcggcatacataaattccttgcccttgtccaaattcaagatttcagtatagaagatgtataccaaacgagaagactcatcggctcacatcaaatacttcgagatgcaacttgatctccaaaaggttactagtgatgtgtgatgtcccatattcctagccactttgttggaaatagcttaacaatggtacttcaaactgacccaagacagttcaactcttgggctgagttctctcaagaattttacacataattcttgtcctcgtggcttgtaccatcatagttagaagatcttgttgaagtcaaacaatgacaaggagaatctttgaaggataacatcaagaggttcatcactggggccacaaaggttaaaggccttacagaagaaggccaatatacgaccatactagggagcatactcccattgagtgacttctagaaagaaatccaaaggatctcaaccaacaacatgaaggagttccttgatggagctaatggcttcatcaaacttgaagctatctgatatctttctaaaagtcacttagtgggagtatgccccccagtatggccgtatatcagccttcttcagtaaggcctttgactttggtagcctcggccataaatctctaaatataatcttttagaggttccccttgttattgtttaacttcgacaaggtcttacagctgcgatggtacaagtcacgaggacgagaattgtgtatagaattctcgtgagaacttggcccaagagttaaatctccccagggtgagtttaaagtaccattgttgtgatgtctttgatagtgtggctagaaatatatgacaatgcacatcactggtgaccttgtggaggtcaaactgtatatcgaagtatttgatgtgagccaacgagtcctctcgtccggtatacatcttccatacctatatttttaacttcagcaggggtaaggcatttatatatatcgagaatggtgatcccctcgaccgatcaagttcaaggtttgaaggcttcgggccagtattgccctagatcatgtccttaagtttgtccaactgtgcttgcacaaaaggatctattgttgtggggacttgattgactggccctccttggggagggtacggattctgaaaagataggggctagttggccataccttgggagagtgtatggcgaagatcaaccatgccctgtagaccctatccggc

SEQ ID NO: 19188 - DNA, 2975 bp, Cannabis sativa
tatgcttcaaggaagcgaaattcggaagaaagaaagtttattttttagtgtcataatagtatttgcaatctgatattcaacagcatttacacaatctaaaaattgtgagcattgatgccaggttcaaggctcaaaatttgaccctgaaggcgaatatgtgaggcattggctaccggagttagcacgattgtccactgagtggattcatcatccgtgggatgcacccgaatctgtgctcaaagcttcaggagtagagttgggtttgaactatccaaaaccaatcattgatattgacttggctagagaacatttgactaaagctataaggaagatgtgggaacttgaagcagcttcaaggggttcgggatcaaatgctgcagcagatgaagaagttttcgataactctgatcgtgttgaaaccatggcaattcctaaggtggtcttaaagggaagagctccaccttcatgttatactaattcatctaatgatcaaagggttccatcttttcaaaacttaaagaatactaataataagaagaggcctaaaagtatacaagaggaaaatcctgagaatctcttgaaagaagggatctcaagagctgatgaagacttgtgctccacagccgaatcttcggctgcaaagaagcagacaaccagtagtagaaattcattttatgttcctgattcattttccatgtcaataggaaatgcttctcaatgcgaaacatctgacctgatgcgaaccgagcaagaacaggacgacatggaacaacacaacccgagcatagatggtaagcaacactaatttatatagcttaataatatcaaattttttatataatatagaatatgattcctggttttgcaaacagcttacagtagctgcaactttggtagacaaagttgtttctttgctcaccatatttgtgtaattttttctcagatgaggcactatgacataaaaatttgtcttcctgtcattaatggggttcttcacaaattagtctttttatatgatcactttgcaaaatagcatttttctctataattatttactaaatgatcttccagacacactataactatgatcaaaagagactattttgcaaaggaacattacaaaaattaataaaggtctccttttttccaattactctcaactttatttctgttgttccttctactaggtcttcaaagttattaactttattgtgcctatggcactttcactaatcaaaaaaaaaaaagttattaactttattataaatcggacatcttctcttgcatttcaactagggctggttctgggctaaggcagactagggtttaggccgacacaatccagaggcccaaaaataaaacttccctttgcaaaatatgcatattatttttggtatttttcaaaattaccatatttgcttggtttaataccatttggatcgtgtgttttgcaaaagttattaattagactctctgttttgccaaatgacaaattggatcttatatttttcaaaatggtacaaaatagtattctcggtttaatttttgataatttttttttaaaatataactaacttgaagacaagttttagcacgaacagatgcagaaaatgtattcagttttatcataacaactttagattgagttattattaacttttattttgacaaaaaattagttcgcggtactattttgaaaaatataaggttcaatatgtcatttaataaaatagagattttattcggtaatttttgtaaaacgcagaataggtatttaccctattttctttcaataagggcctaaaaaaatattttcctttggctgaaacaatctcaatagtctgctctgattggaactcgcttttgtgacaccgtttggcatattgatcctaactatgcctttcgacggtggcgatttgtcgacatattagtctgtaattgtacataaaaacaaaaatatagatacatatatgctttttgttgcaggctttggtaatacagtttttgttatgcatcatactacagctgatgcaacaagggtgcagatgcaacgtatattctctgagaggggtggatgttgaaaatacaaactaatgatgtccttctttgcaaaaggacaactacaagtgagaggagcacacaagtgagagaagctacaaccttttagtttatatatataaaatgaattgtgacttatgaaatatgtagatgtgcatatgtaatattatataatatctatgactatgactatgacttgtacgagagaattggtttaactatgagcttcaaacttgttaatattataagccatgaaaattggattttctttttgacatggttagatagagattattgattttaccacaataaagagctttttcccatagcaaaattttataacttttttgacctactccatgcttttcgggtaggggtcttacacattcctgtcttatttttttttgggttagaagcatctcaagaagtgtttttgacctaattagagttcaacaatccccagagaaaatgaatccaagtgaaaggtagctctcgtagtcagagtttctcttagatttgtcagtgggagctatatgttacccttcataaagggtaacttgttactgatttcggcttctctggttcaaacttaatttttttagaacagttcctcttgctaatgaaaattggaaagttttaatgagtatagctagaactactgctactgtggaattcacaatctctttcagatccttaccttcaataaaaagattgtaagtaggctccaatattcgaagcactcctgcttttagaacgctctgtcaaatttgaaattttcaaaacttgtcaaacatatcatttgtgggcaacactactataaaacatttcttgtaaaacaatttaatgaaaataattccaaaaaagaaaacatgaaaattagctttgtttatagctcttatctaattcgatgtttttgc

SEQ ID NO: 19189 - DNA, 3712 bp, Cannabis sativa
tcgccatgaaaatattggcttggaactgtcgtgggctcaagagtaccacgacagttcgccaattggcggctttaattcgctagcagcaacccgaaatggttcttctttcgaaagttagattatcagaaccaaaatttaacaggatttgcaatcgtttaaaatttgaagggtctcactatgttcctcccattggcctctcgggtggtttaggtttgtgttggctgaaaggtgttggttgtagcatcttctcgtccaataaatttgttattgttggagagatctcttctaaccccccagaataccttggttgttttttggtatttacggccccctagatatgaagataaagaggccttttggctttctttaggtgatgcagcccttgctactacaatgccaaccttgctaattggggacttaaatggcacacttcatgacacggaatgtttcaattatgccaattctggtagttcatcccactatgcgtttgatcttagacgtatggtaaatagagtgggacttgttgatttgggatttcaaggccctacgttcacttgcgctaagggttcgagagagagcatggccactgggagagggtttgtaaaacgcgcacgactcgacaaaggtttagcctcctcggattggagagttctgttccctaatgcaataattgaacacctctcggcctctatttcagaccatcgacccattctgcttgatacatctaggggcgtccgctgtcgtagtcgtccctttaaatatgaaaacatgtgggctcacgataaacgttgtttctgggtggtcaaagaggcgtgggcgaaaagactccaccataatcctttggttaactttcgtagaaagataaagcatacttgtcgtaagctcagttcttaaaataaaagacagttcaaaactatacaatatcaagtcaatacagctacatcggccctgtaagaagcaaaagaatacaacccgaatgatctcatgtctatccatatggccaaacaagacctcaacgaagctcttctaagagaggagatccactggaaacaaaaatcaagagttcaatggttacaggaaggggacatgtgctgtaaattcttcatggcatcaacggctatcagacgtagaagaaactatattcagtgtataaagaagagcgatgatggagtctggataagagatcgaaaggaaatcgctaaagtttttattgagaactacaaggagttgtttggcaaaaatgctacgacaatgatacccccctctacaagtattcttgaaccgtgtatctctgctcaggattgctgtgatctcaacgcaatcccctctgtagaagagatttctacggctctggatgaaatgggacatgataaagctcccggtccggatggcctccctcccagtttttacgtactctcatcattgggacactgtaagcaaggatctgatggaaatggtgatgtacttctttaaccatggagtgttgcccaatttcatcaatgacacatcctttgtcctcatcccgaagaaggagggccctgcgtacacaaaagactatagaccgatagccttatgtaatgtctcctacaaaataatatccaagatccttgctaaccaaatgagacatttactacccagaataatttcgcctaatcagacagcctttgtcaaaggccgaagtatcactgaaaaatactatgattgcaagggagatcgttcactccacgaagaagaaacggggatcgagaggcttcatgatgataaagattgacatggaaaaagcctattataagctagattggaacttcatcatctcagtcctatcttccctcagtttcccttcgtcgttcattaattgggtcaaggcttgcatatctgtaaaggagataaaactgcttcttaatggttcggtgatgggaaaattcaatccttctaggggcttgaggcaaggggaccctctttctccctccctctttatcattgccgctgaaactttatcgagacttttcctggagatggagagtaaagacctcctcaaggggtttaaaatgagacgacacggtacgccagtcaaccacctcatgtttgcgaacgttttaattctgtttggccaagctactatgaaggaggccaaagcattcacggactgcctcaataagtactgcagttggtcgggccaatctatcaactttcagaaatcatccgtaatgttcactagaggggtccctcgggctaggactcatgctatttctcaattccttgggatgaagagaatgtctactaatacttcttacttgggtatcccgctctttagatcatcaaaacgaaccaaagaccctgaattcattgtggaaagggtgctaaatcgggtccaaggttggaaagccaaattactttcaagcgctggaaagtcatgcctcattaggttcctgggctctaccatctcaaactacgtggtttcgtcggatgtcatacccatttccattgcaaaaaagattgataaggcgcttagggatttttggtggggcgatcttgatgggaggcgatcgatgcacacccctgcatgggaggttttatgtcgtcctaaggtctgtggtgggttggggtttcgcactacggaagccatcaatttggcttttctcatgaaatgggcatggaaagctctaactgataatagtagcctgtggagtagagttgttaatgataaatatataaaggatcacgatttcctggatctccatgtacgaggttctgattcgatactatggaaagcaattctaaattcgagaagcctcttaaccaaaggactgtgttgcaagattgacaacggaaacgctacgtcgatttggttccatccctgggttcccaatggtgttctccaacctcatccctgtttggatgctacggaaggtgtgagcttagtcagttactttatccgaaataatcagtggcaagaagacctgatcagaagatggtttaatcatgatgacgccaagagaattctcaatattactcttcctagtatcccctccttagactcttggatgtggctccctgaacacagtggccacttctctataaagtcagcgtatcgggtggttaaaaatgtggatgcattggatgccaacaatgcaaaatggagaattatttggggatctaacatccatagtagactaaagattctctggtagaaaattctctccaataacctcctcactaggagtaaattgctctccatgttctacattcgggacactgaatgtcctatgtgttccctggtggttgaggattacctgcatctcttctggaattgccactttgctagagcgctgtggtttggctgtgtatggcatttgagaaccgatagtccaagtatcagtgattaggactcttggctagcttggtttaaggtggacacaaaccacccgagtgggataaatttcaatgtcttcctggaaggggccgcgattatcttcgaaaagatttggagagagcgtaataacaaaatccacaatgttgtggagtcccctctgtctgttattctcttccatgtcaatagaaggataatggagaaggatgaccttcgctccccggagagtacgataaatcctaatattcagcaacctcctccttgctggacaatctgcaatattgatattgcaattggagacatgatgtctatgggaggtgctgtctttaaaaatgaggaagg

SEQ ID NO: 19190 - DNA, 3380 bp, Cannabis sativa
tctgaaaagctatatccaactatattcactcaatgcctaaactatatactaagtgatttgatacattaattgggataaagggaaagaaagaatcatatagtcatcttttttttttttcttttgaaagggaccatacaccttgattcttgaaagctatagttaagagttgtcactaaattctcacgcttataaatatataattactgcaaaatttgaaaaactcgacaagaagaaaaagaagaacctagagctatctagacatatacagctagagttgaaatataagccatggccattaatgttgaagaaaacaatgaaagaagtaacttttgtcaaaattactcataatctccattaatggcagcaactactctcatttaaagctaattttgtcccttttatttttaattggaaagaaagctcactttctttattcattccaactcataataggcctaaaacaaaatgtaatatctttcttatgttaaagactgaagagtaattttgatagagagtatcaaagtttgcttctttagctaactcacccccaaaattttagatggtccacatccttttgctgatcccaagaacacctttacaagtctctgagactctgccaaagaatgggaattagagacccaattcagaaatttgagttttgttgtcgtttttcatattattctcaacaaaaaaccttaacataataaagctgcacattggttttagaacattgaaaattaactgagtttaaagtaagtttgcatttaatttagggctggaaaattggcttgcaattgagagcaaaatacccaaatatgtacaagagtatcttcttaataataatttatacaaaaagattcattttttttttcaaaaaaaccagaagagtaacaaatttacacatgtaatcacatgaaacccccagcccaaaccatctctattagatctaattgagaaacaaaaacatgatgaacattgaacactattcaaccaccataaaagaaaacctaataatagtttttctaatttacgacaaattcattaacctaatcctatgaagacgaagactcgcatcatcaaatccgatcgataattaaattaatcgccaataatacaaaacatacccaagaatattccaaatcttcgccggtacaaactcccaccaccggttaccgcgatctgcgcttactcttagtactagtagtagttgtcttcgttctccgattactcttattcttagtggatttgccaaatggattgcacaaaccacaagcggatacctttggcgaaggcggttcgatggccggagctaccttgcctgttcggtagcctcgtcctccgttggatcggcttctatcaacggtattgattggtttaagggatttgagtgggtcaacgtcgaccgtctgatcacctcctgctcctccgtgggttttttcttgggcttgttttctttcttgttcttctttctgactcagttgatgtagctctcccaagaacctatcgtcccataccatacctgacgagccttgtctcctaaacgatgttacagatctctgtaaaccagccatggcctctctctctctttctctctctctctctctctctggatctttctatatgaagaaaatagaaacttggctttataacgaaatattgcaattttcgatttggggtatatttatagggtggagaaatttataaaagataaataaacattaaaaaaaaaaaaatctaaattttaaaaattaatttacggcataaatatttaagtttaacttgtagtttcaaataaatatctaaagtttaaacttagatatttatataacaaattacttaattttaaataattttaaaaattacaaatcaataattttttttatttttttatattattttgtgttaattttaatatttattttaattttagttttatataaattttttaaataaagtataattttttatcttttattttttcaaataaatttttacatagtttttattaaaatttaattttttattataatatttaaaatataatttatttttgtttaacagatatatttattaagaatataaattacaagaaaaaaatattaaaaaattaatataattaaatagatatattttatgtaaaataaaaattattagaatgaggtgtatttataaaattttagagtacaaatagaactcttcttgccaaatcatgctatgagctttttaagttatagaaaaatttcttcaattattaagatggttggatttataaatttttatctaattttattagtttattaatatgatgatggtccttctaacaaatggtgttcttatgctaagtcatgctttcaaattttaatatgtataaaatcgtattttatgaactttcattaatcttttgttagtaaaattagacgagaatttttgaatttaatataatctcaataatttgagaaaatttttaatagtttgaaaaaaacattaaaagtaaaatttaatacatgttaaaattttaataaaaatattaattaaattttagcttgtttatttatttatttatttttatttttgagtttatattttttaaaaagtatatagtaaagtgttttttattttttgttataataataatttaaattggattttgtcttccatggctgacctggctttggtggtttggctatcccctgaagcaaagctagccgcctttgttttattttccattttagaattaattattgaattattattatccagattgtacttgaaaaatcagttaatttttggaaaataagttaatattagtgtgatattaattctgtttctttatttatgggataacttaatttgactttcaaattaaatggggatggcaataagttatattttattttaggcacaagttaaaatgtcagcagtgttacctcatcatccgccatgcattcagtttataattaatattatttattaaataaattaaattttaatttatcatgtatctctagattcttaaaacatgttatataagttatgttggactaaatttttacttgtttatagcagtataaaatatttatttatttttatcatttgaataattattatatgaatatttgaatatcattaaaataaaaataaatttaagtttgatgattactatctcatggttattgtaacttttttaaggtttgccattaattgtttaaagtaaatttatagtataattaatgggtacgagaggtgttttatgttgtactctcataccttctacaaatgactttttaaatctaacgtataagtatttttttcattataatatgaattgtttatcataattattctcattaactattttttccattaaattgtatgatatt

SEQ ID NO: 19191 - DNA, 5275 bp, Cannabis sativa
atgagctcaaacccaagttttcctgtcaccaacaagaacatctctttggaaattaaggtgctttattgataacttattgcctcaattatgtataattgcctaaattatactattgtcttggtgtgaaattctcaatggatacattgttcttgacagggtaacaaaacagatgttgtcatttgcagctatgatgatcatttctttgtaagtatcagatcccaattgtttttacactaaggcctcaaatgtgttagatatcaatgttgatcttatttatcatttgggttgctctctcaggttattgcaactcaaataggaactatgggaacaatacttaaagctaggtatgtaaaattactctccttttgtaataacaacaacagctctttcactaagttcccttatgttattggattttacatttaaggtgaatatttttctctttcaggaaggatgaagggatgttgaccgaaccaactttcgatgtgtctgttattgttggcaaaagagatgaggtaagctagtttcccttgctgtgttttatatgtctagttttgatggctctcttgatgtttttcttaacctgttgccttttggtgccagccaatgctagtagtatgcgctcgtcagctaatagaacagatcaggtaaatataactgaagttttatgttaacatgattgaatcagagattctcttcttcataatatgcatcattgaatggtatttgtatttaatcttttgcagtctttccggttccaccaagtcgttgatcctcgctcttggcctgaaagatcattccgtggtattcaagatcaactatttgggaattaattagactagttagataattttgataactcattgttcgtgatctttatcaatgttatgcaggagacagtgaagggtattgttgctgccgtggttgaaaatcgtctctggtgacttagtgttgagaattgtaggttttcttaatctagtatctaatcgtctatggtggttattgttggttagattcattcaagcactaactattgctgattttagaattaaaaaccagaaggcctttttagtgatgagaacaaaaacaacagtatctcaatgaagaaagaagaaaatgatacatgctcttttgccatgaaaatgttatatctcatttctctttttataaacaaaaaacaaagaaaaggtgtcaaaggccatacatgttataattagagtaagccactgagctcttactgttaatatcggttcattactaagtatttttggtcatttgttctaatcgagttgatggggttttagcatatggatatactgtgatctttttatttattgtatgaatatttgtaatagttagaagaatatcaaaattgcccataaaaggttagaattttgttgctgtttttgagggtaacttcattgtcaaaaaaaaaaaatctcaaaaactaaaatacctgacaataaaaggcccaagagagcatgagctaaaacaacaattaagagttatattcaaaacaaaatttacatactatgatatgattaacagaataacatcattttacttgtgttgtatgtttttctttttcttcctttttgggatgagtaagataagttattgtacttgttttgaatcacgaaactgcacgtttgggaatctgtcactcccatggaaccaaaaggagtatagttttgaatctctcattactttggtttggaccaagtatgagtctttccttctcgaactattcaaaatcaaaccaagaaaaaaagagaaaaagaaaaatctttaaatgaaaaataaaagaaaaagaaaaagcaacggtcagggaatagagaggagcctcctttactttgtttttttgcttcgatttggactcatcttaccttcaattgatatgtttataactccaaatttataagagaaatggtaaaaggcattattggtgctgaataccttttacgtgtcaatattgctattaatctaagtatcgagttgcatataatttaatgaaagagtttttaaaaagtattattagttaattgcaaggcaacacatttagaatgcactacgtaatactggtgtctaataacaatactcacttaataaatatgagaaatttatgtagttcactctttttatagcatgaaatattttgatagatattttatttgtggttgatgtcctgaaaagttttttaatttattttttattttttagattattatttaaaattataattaaatttttagaaaattccaactaattaaaaaaaagcctacaactaaaaatatttaaacattatttattctaaccaactccaaaggttaatatttaaaggtatagttgcttggtgttatattctcaaatagataatgagcactgttaaataatacttgtgatatttggtactaaatgccatattattattattgttggaattcaatatcaaatcttatgtatattaatttaataattatcataaaaaaaatactaactacctgtaaaatattggcgaatttttttttttttttttttttttaaaaaaaacggtttataactaaagatgcatatttgtaaataaaaatgaaaaagaattcatgttgatgtatttttataatttttttcaaatttttcgtcattatataagtttttctaaaattattacctttctcatgatatagagcacacctagtacctaccaaataccaatacttattagttatttacaaaagccaagattcatgcaaaaatgagagaaaaacaccttaattgttctctatttatattttgttttggtttgtttaataatttattgcttaacttaaactagaaagtgaagtaaattgggtaagctttggtattaatattaaacaagggggcaaacaccaatcaaggcaatctggtttcagtaaaagagtaactttaattgatggtaagttactttagttgggagcacgatccattattccacacaataaaaaagccaattcaatttaaagaaataaaaaaggatacccaaaatttgaaagctcaacaaaatgattcatatacatacacaccaccattaccttaatccatttatggaaaattcagtcaaatgaccttttctttggtagtgattcaattcaatgtatttaattcctttttttttttactttccccatacaaaagtaaaaaaaaaaaaaaatccaaataattatcttttttttcatatcttaaggttctttaaatgtgtgtgttttattattttgtctcagagaatcaaagacacttggcccctttacaataagctttaataattttcatttaagtaatcactccacaaatcctaaaactaacacaataagattatacttaattactataactataattgcatataagtaatgaaatatattttcactcagaacccaaatgaaaactcaaaaagtagagactaaagactagagaagatctcagcttcaattcttcttgattgtttgtcacacaaattttgatgcttcaagatgtaattaaatacctgataatatatattttaggctcgacctggtggttgtctagtcgttactactctcctggaataacaatatataattatattattatcacagattaagttatgcataatttatcaatacacaaatgatttgaattaaccaatgaaaatatgaactataacataaacgttcctttgttaaagttgtacaattctctctcccaaagatcttgtgtgtgtgtgtgtgtttttatcaaaataagagaaagttagataatataaagacacttttataaagagttcattatgttttctcacttattatgaaacaccactccaagctaaatagtttttcacctttttttttcttttgtttttctttctaattaatctatttaatttattatattagttgaattatgaacgtaggaagaatacatgagtaattgtctttgaccccccaaaaaaactgtagagctaattaattggaattagaagaatgaaattcagtgtcacaaactgattaaccattgataatgagtgaactaataacagaaactaacaaaattactttttgtcccctattaataaaatataaaaatccctattaataaaatatagaaaaattctatcatgcacttctttaaaaaacgtctacggatatatttctatgtgttttggcatttaagaaaaaaaatttaatctaattttttgggatatttagtaacatttaaaaaaatttaacatttcgaaaatagagttcaaacaatctatttcacacacttataaaataaaatagtttcacatgcaacaaaaagtttgaaccatattttcggcgtgtcaaattttttcaaatctcttaaaattttacaaaatatcttaaataattacaatgtaaataaccataaaaaaaattatagtaaaattttttcttaaatactaaaacagataaggagtgtattgtaaaaatattctaaaatatgcctagaacaaaacatacttgactataacaggcaatattaataatattgtaattggagagaaagtaaatagcaatgataagtgaagtgtacctgttgtgaatgggatcagggccatttggtactcttctcttgctgacgtaaatgagattagagtcccaacgaagtgatgagcctcttccattccatttccaatgctttaacatttcatcagttgatgatgatgatgatgtaacacttccaatactcaccgttttgatggcatgaacatgaacatgatgatgatttgatataattccaactaacaaaaaccaaaacgtaacaagtagaaaaatagcaccaacaaaaaccctcaaaacaaccttgccttttccaccactactccccattgcaaacagctctttcctctccttattttgaggccattcagaacagatctagatgagtagaaagaaggaaggcagagattttgttttgttttgtttttaataagttggcgggtaaagtgagattgattgattctatgttatatatataaagggctgttgctacaagacagaattagaacagaggatatccttatagagatatatagagagccaaggaatgaatgaaggaaggaagactaaataaataaatagagaaagaaagttgggtgttctacttctactactaattatgtagctttttaacactagaattgggtccacatgcttctctttcttgtcttgtgttgcttttgattaatgtttttttgtggattttcatgcatctattgttacaatagggacctcac

SEQ ID NO: 19192 - DNA, 1924 bp, Cannabis sativa
aagaattcttccccaatttccaaatccgaatccgaacccgaatcatccgccatgaaaacgaggcgaggaatcggcgatcccttcggaaacaacgcgataacttcgaggatcagatcgcgagagagatgatcaacgaagacgagtttggattcgctgtgttgaaggagaacggagacggttcgtgcatcgagacggagattgacggcgttaaggacggccccagccatgggaacggcgaagtggagctcgtacatttggggaacgtttggagcgaggacggagatgacgtggccttttttaattccgagtgaggcgattgacgaggctagacggagacaacggtcgttagtttgagaccaggtgtatgaaacggcgtcgtatatgattgaggttgagtcggcgtatacggtggcggctctttctagaaagcctaatggggttagtggagatgagttgggtggactcggcttcagctcttccatttttttttttttttttttgatttggttaattaaaatgaatttaatttatacagttaattttgggataatgaattaagaatgatatatatcggtgaagatgaatgacgtggcaaatgtgcttatcttctttttgtataaaaaatattttctttttatatatataatgcatgggaaatgccaaaatggtaattagtgtataattttgtcttttctcttttttatcaaaataataataataagaaaagtctacggtctttattgcggttaattagagataattcatgataaaatggtatgtaaattgatttttttaataattaatttgcaatcattttttttataattgtcttttttttggtaaatatttgtacttattttgcaaaaattattggactttcgttatgttaaatgataaaaaataactaggatttatccttcctaaattatgattattgtagagttttgtccctattttttttttgttgcataaaaaattttgagttatacaaaatcattacaaatattcatgcagttacattgtgttaatttcttcaaacaatttgttgatatatataacactaacataatattaatctagtacaatttaagagtccaaacaaaaaataaatacataaataacagtctaataataaattataagcatatgtatgtacattctcaaaattattatttgtatgtttagtgccaataaattaaattttagaaaacttaaaactattaaataaatcattgttcaacaataaagactttagatagcctaaaactatatatataaaaatatttaattttattttaaattatattttttatataaataagaataaaatataagtttgatgtattaagttttaaaatacatttatatcatatttttaaattattatttttctacattaaaaaattaattatatataattattttaaatatatataaatatatatatatatggattagattcaattagttacttttacataacatttaagattttaaattttctaatctaattcgatccgcacaagtgtaaatattcccattttgcaaactggattgtattaaattgtacggattggatttaattaggtattttatgaacacccctatataatatgatatatcttttattttgtaaagatcaccattataagttagagaaaaaatccaaatacaaaagtgaagagattctttcaatctaaataagcttattgtctatcctaaggacatgttaaactaatattttatgggttacaatattaacttaatattgtgatttacatataagaaaaaaatgcccctagctagacaataaaacttgaatgatagaaaagaaatttttgagtagagtttctcagtatctaacacaaaaaagtgtatgagtatcaatatagtaaagcaattaagaaagagaattttaataaac

SEQ ID NO: 19193 - DNA, 2853 bp, Cannabis sativa
tttttttttttttttacattttggtaaacagaaaaaagtgatcaatgagcataaaccattaagatttccatgttaatacaaaccgtccattgattaaagtatgtctcttttaattgtgtgattcatcttttgattagacatatatagaaatactctagattatgttatagaaaatcatgatcatctccccactaaattattatatataaataaataagagagaagttatgtatataatatgtttttcttttctatatataaaatcctatatacatgtgtttgatgcactttctttttcaacaatatataccataaagatataaaatatgaataggggatttgatttatcatactaatagtaataagaggtgggatttgaaagaagttgataatgttataacataagaaatgggcccaaaaatttcccaaattcagaagaattgtcggcaaaatgatattgtaggattttgcacttccatattggtgataataccaaagctttttaatttatttttccattcatttaaatgggaatttattttttaaaaaaaatgcaagaattttatttggttcaaagtgatatatgtgtgatgattctcttgtaacgtcaccttcaaactccaaagctcatgtctattttcactattagaatgtactacttccaaaaagggtagaagaagaaaaagtataaaataattaaaaaaaaaaagtgaaaaccaaaacatagtacactccattttcccattgttattcttgatagagataatttcataattagaaatagaatatcatcacttacaatattttaatattcattattattactactagctagccatataatatattatattatatgaacaataattactagtagtagtagtagtggtggttatgtatatatatataattgcttttgcatgatttagtggttaatgtagacataagggaactattaacacttttagacaaagttgccactaatgagaaagaaagtaaaaacacactcacacatgtacacaaattattataccaaaaatgaggagagttgggttcacaaccacaatctccaagaacctattaatgggatgagtaagagtagatggtgtcatagcacatggatatatttttgttagtgggagaagctgatgtttacacttataaagatccaaaccaaaacctctatttctctctctctctatatatataataaataaagggagagagagaaagagaatatatagttgtaacagttgataccctttactctttttgtgtttctttttattctatcttttattattttcttcaatgttttcataatccattatagtggggattacattgataatagagtactctataatctatatatctttagtcctactccatccatttttctagctatgatacaagcacacaccaaaattaaattcaacctttgtaaagtaggactcatggcaagtcattgaaattcccacaaaaacaaaaaagaatgtaaagaaaagattttttttttcttttatattatgttgagtgtatataatagatatgatatatctaggtgagtgagaatgaatggttttagttttatatgctcttctttctttttgagaggttatgggttctttatcttgattgacccacctgccctttttcaaaagaaatatatatatatatatatataaatgtatgtgtgtatataacccatatagatgaaaactcttgcctcaaatttataggtttcttcatgaacatataaagtagtgcctcatctttgatacatatataattaataatagtatcatacgatggtaagtgtaaatattattttcaaacttctattttataaaagttattaattcaattctttaaatgaataaataaatcttgtatttttcaaaattatacaaataggactctgaactaattttttgtcaaaataaaacttaataataactgatctagagatgttatgataaatttggttacattttctgtaactattaaaattatcttaaagttgtttatattaaaaaataaaattattgaaaattaaattcagtgtcctacttttaccattttataaaatataagattcattttgtcatttaataaaatagagagtttaattagtaaattttacaaattagaaggtctaaaataataattatcctattaataatatatttatacaaaaagacaaaaaagatcaaaaggtaagagagataaatgagaagactacaataaaaatcacacctagttaattttgtatacgttgccaacataaaatggacaatataatgaattcccttcaaattattggagttttttttttttttttactttgtcaaaaaaattgttgtgattcatttatatattcttaacttagaaacggtacatatgtatatgggaccatatatcttaaattctaaattgacatggaaagctagctagatatatttatatatatagctagcttagctagtaaggtctaatcatttctctctcaagtgacttgtgatttgggtgtgtatagtagtagggtcctcatcaattttgtttaaagtttcattatcaatatgtgtaaaattaaaataaaagaactttatcatgatagaggtgagaaaaaaatcaactctaagatgatggtaatatagtatatagtatatagcatagaacatgagttagtgccccctttcacaagggaagaaagttagctagggttcccatcatcatggcccatccatgccctctttaattggatccatattctatgcttttttgtactgtccattacttaggctcacaaccccacctcaactgaaaaatatggaatataaataaaaaaaa

SEQ ID NO: 19194 - DNA, 4935 bp, Cannabis sativa
tttgatgatcaaatgactcaaatgggtacacacaagtaatgaaagtgattctttacgtagtttttggtccttttttttttttttttcttttctttccctttcggtggagaatacttgatatgttacaatcatttcaattttttgcagtagccagttttctcacatttaagtgtacattatatatgttgtcatcatcatatacatgtggcaaggtgattttgtaattcttttagagaagctggctttctacacaagcccctaatagctttttaactttagttatgatcgaaacttgttcaccactgtctcagaaaaagatagtagtagcaagtaattgccatttcgatagataggctcattatcaccacatatttttatggtaacatcaataacatatcacacacgtgctccccacgtgcttatttggtaatatattctaagtttcctaaagctttaaaataacctggtgaacatgattaatgggagaaaacaagtctgctagtatgaaacagtttggaaaaagcagttgagatcccaatgatgatagagcaccaagactttgaccagtgcagaaaggttcagtaaagttaaaaaagcccaaaacaaaaaggaaagagaaagggcctaataacttttttttgcttgcccacaaattcatttagtctacgccttaatgatagctaaatttgtactcataacaacattgtctcatctttttggttgtagccagtcaaagagctcttctccactttgctaaagaaaatatcagtagagcgggctccccattgatagcttactcaactttgtggaaggaaaatagtggtgggtatcactcattatggttaaggtggtgtcttttattgccatggttaggtcatgcattagggtagactgacctaattttatattgggtgatgcccaaaagagcaccaagtatggcccacaaagagtaagagtgaagggcagctaagagtaagagtgccctatatttatatgggtggacattttgagacaacttttggtaaaaagatttgcatgggttcttttgggtaggtaacttggtgatgagtagctctgagtggttagtgtgctgaagaagttatagacgatatcataataatcttgtaatctgaaagggcatgtgtttcactgaattctgatctctgacttcttttagaaaaagcatatatttatgtattgtatattcttggacaccaagcatggcttttaggctttagcagatccgcgtggattatatctgcatataggatttcaactacttaatgttttaagctactttgggaccccttcaagaacattttgtgctaaattaaacaaggatattctatgatgattttcttttaaagtcactgaacatgattgttgaatcttaagatagctcttcatgaagtcataagataatataatatctgttaattaatactctccatataattgttaattgttaagtgaccaaatttgatgtggttattaaatctaggataactcttttcgtctttttgtcgttgaagttataagattatattacataacaaacaatatcttttatttgtaagcaattgtgtcgcttcacataacaatgacaataataaaactatacttgtggagatcgccaccacctgattcctttgctcttgcgatcgatgcatcactagttgttgggagggggtttgtcgcgttaggtggggtgatcagggatggggtgggggtggtctggctatcttgggcagccggtgtgttgggagagtttacttgtaagcggcggaactatttattagattggaattgacttttgcgcatcaattttagtttattatctctattattaatagtgattctgctgctgttggttagataaataacccgcatagaaatgctgcttttcattatatttttttagatattaattttttaatagctgctattggtgttggttctttcacaacttgtgaatggcgttgtccatatactaacaacctcaccttatataaatcgatgcttgtccacgatttatgagtttgtctatagcagcaaatttatcttaataaaatgtaatttttctttggtgcattgttattttttttaaaacttacaatgatattcttcatatataacaagccctcattctgccctaaaatcatttcagtcttgaaatttatagaatactaaagaatttttttaaggttatttatattaaagtgtcagagtattttattctttatttattttaaaattaaatccccacatatttggaaatgtctgttagttggcagagcagaaaaaatacatgaaaaaatagaaactaaataattagcatataaagataagctcaaagcccaaataaaatataatagtagaaagtgtttatatgtaatatctattaatttatttactctaaacccagtatattcatatattgcataaatattttatcattgtgatgaaatatcacataaacaggaaacaaccatataagtttgttattttggattacagctgatcttatcattacatctaacttgcaaggactgttttgaatgtttaaggttaaatttatttggctaggtgatttgcacaacaactggcaaaaatcatcctcaaattttcatggttttcaagttatacaaatctgtgaagttaattattataaaaaaatcatgatgaaacatttgaatagacaatggagaagaaagcaaagaataatcttctagaatggcaatttcaatgcaaaacaaatctgccaattttttcaggtcaattgggccaatacttttatttattttttttccacttaggtgctaattaaaatcaattagctattactttaattcatgttatgaattagcttttcttagtgattatatatatagccaacaaatgaagacaacatcattttcccctaagaaaaaagagaacactccaccaaaaagtatgactgtctttcacttgatttgcccacctgtcaattcctacctctttgaccatgaaaaaacaatacagtttgattattttatattttacttggtatatagggtaattgtcttgtgtattaactttttttctccttatggaaatacaaaacaataatgctatgaacaaaatcagtgtctttcatggaatttaattcgatttttttattaaagtgtttacatatacattacattctacaatttgaaattcagaaatccccacccttccaagccacttaaaattcgatctcatatatgtatatgcattttgttcttttcatgctgtcataagtacaaaacatatacactttttatatatatatatagagagagagagagagagaaacagagccggtttatttattcagatcaaaacaaaaggaaaaaccaacctcattctagatgacctgacccaatatgacatcagacaaaactctctctttctctctctttctctataatacttgtacatacatgatatataattacagagcataaataatcaccctaaactcacaaaagtcacaaaccactctcaactttctggtccattttccaagtgaaaaacaaatgagctctgatccaaattttcacttgccttgagaggcaccaaacccaatgcattttgactcttgctcctcattgactctccccattttcacagctcagacacccaggtgaaaactagctcaaacacccataaaacaactaacagctcccttttattcctctttctttctctctttctctgttcaactttcttatagaagccttttctttgattatatcaacagatcaaaacagaaacaacatctcctctcatgcatcatctcttagttatcattatcatcatgaaacagatcatgggtacattaagaaaagagatattaatgggttgtttctctctcctactattggtgatgataatgattttagtgtttgagaattcatcaacttctgctgatgggtatacagaatttcaaagcttcaaaaaagggtctccctcagaatatgatattagtcctcttcaatccaatacaccaggagaaaacacatatggagataacactgattctactcttgttgatgaaaagagaagaattcacactggtcctaatcctttgcataatagataagtttttataaataacaaacatgatttcccttcattcattttcaagttatgagttcttttatcttctttaatatttttgttcaattatttagattttttttttctttttttgttagaattacttatatataagatggctgattattcataactatcagtgtgtaaatgtccatatgaatgttttaaggcaatgatgcaattgcccatgtaagaaagtttttggtctttgaggatattggtgaaatattgttgagttttttttattttttttaataaataaattttgaagtttttgtacatgtctttgtacatagaaagaaaaatgttaccatatagatagattggtaacatatatggagttgttgaagtatgactctttgagaagggtttgttatggttggtaatggttaattaacattactcttaagaattaaggtgttaattgagagtacagctgtgtttttattcctttaattatgattcaattttaattattacttttcctgatcttataggaataaatctattccacataatcatttatccagagtttggtccatgtagatgacataacattttgaagttttggtgctattttaatttttagctgctgatctatgactccacatatatattcatttaaaattgcacacaagtcaagatgaataaagcatacttataaaaattaaagtgatgtattgttaattgttatatatttgaaggaaaatcgccattaatattaatttgtctcactttaatatctatgtaagaaaaaaaggataattttacaaatacataaaaaaaaaaaaa

SEQ ID NO: 19195 - DNA, 8255 bp, Cannabis sativa
ctaaaacccttacaccaaacacctcgtccaaataacattgcctactccaacgcctattttccaaaccaaaaggtaagcgggagtgttgaatttaaatctaactcggcacaattgctttgggtttcttattatgactaaatttctaggctgaatttagcttacagatacagagcatatttgtgtgaaatacctaacttcattttagttgtcgacattcacaccctttgaatggcattgttagtctaaaattgaatctttttgtttgtttccgttaacatttctaaaacaataacagaataggataagtgaatacctccaatatccctggattttgcatggctactccaatgacacgtcttcttagtccgttgtagaccaccgtattgattgttccatctccgtttatccatggtaatattggcatgcataattcactagaagaaacaatacaggttttaacttcttcatccccttcagatgaaagatcactcgcttgattttcgttaattgagttgggaatttcttcagaaaaattaaggatagagactttgtgtatatcatcattattcacgatggattcctgctgtgtatgaggggcaacgaaatcatgactgctatcaccttttacggtcttaacagcagaacaatctttgagatcttgacacttaacagctgttgatgttaaaaagtacttggaacgatataaagcatcaacaacacgtaccgagttgaatgcattaacctgagtagggaacacaaataaaacactaattaaatctagtttttttatgagacatgagatagaaaagcctatctttatggtagtattgtgattctggtgtagttttttgacataagcaaaatcataacaacagttacatagacgtactttaggttcatttattttctaaaactaaccttcataacacgaccaaaagattcaagcacagaaatgataagctcggtgatcttctcacctgaaagagaacaatacagaagtgaatgatgattaccatctctctgtcaggcacatggcatacatcaaatttcaaaaatcctagcatgcatccatacctggcatagttatgacttcagaaatttcatccatgctcaaaccttggtcaccagcctttcgaatgccagcataaacagccttaatgagatcaggattaatagaactagagcttccaagatcagcatgttcgggaagcaaactttgagcatagcctgccatagctatccaaggtgactcattcgtgttctttattacagaggtatcgccttctgaattaaggatttcctttacttggtccgaatcagataaacttgtcggacctgaagtagtgacacatacattatttccatccatatgttgtggttcaacagagcaagtatccgatgctctgaacaaatatacaatatcagctgtagaaaattctgcccgcttaatcgatatcattataccagggaaacctttttctcgacgagaaataatttcaccttctgctgtcaccaaggattttagtttcttagccttatcaccatcagaaaagtcattattaacaatttttcgtttcaagcttcttgtatcctcaacctcgccaacaccttcatctggcaagcgtggagaaagcgacaattgacccgaagaaactaaagcaaacaaatgaaaaatatccccacactgcaaatctgcggggagatcaattcctccttctgtaagatctttctctatttcgcaaagccagttggcaaagtttgaagctcgtgtccctgaatcagttggaaatgatgacttaaaaacattacccatgaactgttgcgacagtgaaaaaggttgattaccactaccaccaacctgccaaatattacagaaaattcattcagggaaaaagaaatgcatttcctaagaaaacatatttttaaagtgacaattataaataagataaaccaaaatcaataagacaaacacttaaaatgaattcaatagcacaagaatgataataataccaaacattatcacgatattagtattgtaaccagctaaaccatgtgaagagacgaaacctaaatgcacatattcttgacataaagaagacaacatatagatagacatcaaagctaaattctgatctcactgttctgctaatccaattaagaatcatttgaaaatactattttcttacataagaaaatgaacccactagtcagtaccatcaaaactgttcaaggcaagatagctcaagctttagaaatgaaaaatttctactataaataatagacagctactccggataaaagggtgtcctaattgctaatatatagaaaaactataataatatcaccaaaaattaaaatatatttacatgattcatcagcctttatttaaaataagtacttgaaatgaacagcaagaatatacgtggaggcttagcaatcgttaccataactctcttctctctaaggtagttaaaagctgcaaaaaggtcatgctcagagtaacggcgaagaatttttgccaagatattgggtaccgctgatgcactagatgcactcaaaaaaataagcttaaacagctctacagcattagatatagccaatgatttgtatacttgtcttctgactttaacctccccagagtgttgagcctgtgatcttggcatggaactctgttgtagttttccaccaaggttttggacatcctcaggcgtagtagcatcagttttttctgactccagaaaatcctgcaaggaatagtactatacgttatagaaaacaatgctgtctactcaaataccattttaatttaaacaacaaatataaaatattaagtgtaagagattgcgtgttaacatgtttcttggcattcatctttatatctgaccgctcctcatatgtagatccaactcttttcgaatccccaagtttaaccatcttgcaacgaagaaccccatcaagagcagtttttagactactgatattgaaatcatcccagccctcttccttagcatgttcattgggatcagacaaatttttatcgataactttacccgacgaaccttcatcttttccaagtagcacataccgttcactgaggatgttacaaagcttcattacagcttttctgaaattgtcatcatgtctgagtattgccattcttctacggcaggtacttggaggtgctggaagatcaggaattgatccccaagatgcacggtaatattttgctccaagtgcagcacggtgtctagcatattggatcaccaattgcctgaaagaaaaaaatgtgtagaagaaaatgaaatgacaatagaacacatttaatttcttcttagacaaatatattgcttatcacaagtttacccattatttatgtgtagttctcgccatttttttcattataattattgctgggtggtattaaaaataaaattcagggttggaaattctcataatgtccccatgtttttataatgactcgtctgataactctgctaaataattctcaagtctatagtaatatctcataatatgatttacctatcagcttcgtcggtccatgaaaaccttttttgtggtgatgccttcatcttcaaaatgtcttccctaatgttcatgtgattttcatcatccagaaacctttcctcatcaaagtctccagctaccctgtcaactttcctcactttcactgacctttcattagatctttcaataggaatttgatcatccttcatcacacgcttcaagttcttggcaggctgacccgatgacgtaactcgaccagaagcccacgattggaaacggtatacctgcaaaggtatggaaaaagaaaattattattgaagaaaaaactagaagctatgcaaaggacaaggcaagtccctttgatgagaaattaagttgcaatagagtgaggacaccatttatttacgatcatgttcttctatccagttttagtcctttccttcttttttttttttttgagtgaatagtcctttccttcttgacataaacattttaatctttccctaattgtgtacaaaatttgccgtggaataaaatgtaggataaatggataacttcattaattagttgtataattattttatttattcattgtaattagatcaaataaaaaaaattcaatacacaaacttttcaagtaagaaagaaaaaaatcacttccatacatgcatacctcattaacagcagatccagggaatgcatgtaaaccagctcttggatctgcagcagcatagcaatcttctaaagttttccaatactcatcaacagcttttctatttgagaggacaaagtcatgtctgactcgtggacggagatcagaaggtctaaaactcctcaacgtaatcgtgtcttttgagattggctcctcaatgtaaggcttaagctcaaatgcatcaactaagacattggatccatcttctggatgttcctcatttattaatcgaatcaactacattaacaattagtattaagcaagatagtggaatataaaacataaaaactaaataatgaaatttcaaggatgcaaaagtaagcgggacaagcttttcggaagaaaaaaatgtggagttagttgaagcaaagcttagttcgtagggctgggaatcgaactttaagtgtacaaatattataatctatatacaaatattgataaactagtaaaacattcaagaacgttacgaatgatggatgagatgaaaaaacctatgttctaaccaaccaacaatacctttaaccttcgcaagatatcgatgaccgatgaaagcctttttttagttgaatgagaatccatcaaagacttgtactcctcagcagtaagatcagagagacacaactctctcttgcgcttctcaatcatattttcaatgttttcggtagatcctacaacttgtaagaaaagctcaatgggaattgccttcattgttgcttcaagagaaaacgctttgctgcagctgtaaggattctggagcttgtacgcatctttttcggataataaaacatcattggaaccttgagatccatagaggtgatcccagaaaaaacaatgcagcaactttgcacgaatcatttttgccaaaatgaaaccgttagcacgcatagcttccgatctagtgggtctgttatctgaactggcaagtttctgagtcctttggacatcattcaatacaggaacagatttactgttcttcggtcgagaagagcactggccacgactttgaatctcaaaggatctcaattgatcgtgaatattagacactagttcaggagacaagcttttaacatccaggtccgggtgcaagaccaccttagtaatgcgattactgctacaatttgtgataaaaggaaccttgatatctatgcacttgcagagcttatctttttgaagttcatttagaagactatttatagtttttccatcagttgtgctacctttatctttttcaagactccttatccacttacgaagctcacttattaggatgaacttctcattctggataagaaaacaaatatatacatatatattaattatataaacaaagaaacacagttattttcaagtgaaaattttcggttcaatgaagagacctgtaaccgttcaagtacaattttcttcctccatgcattctccacagtgaacggtcgaccgggatatctctgatttgatttcgagctgagcggcttcaatgcaatggaagtttcagatgaagctaaacttgtttccatgttcaccaagtcaagcccagtgtcagaaaaggtctctttcgactcgatgcgtatcactttagaatcattacaaagaagattagattcagtggcatcctgaagggagctgctggatgcatcaaaacttgtcactttttcagggctagaaatatgctctttcgaaattgaaggcccatactctgaataggtctcagtaggcctctcaggagcatctaaattggcaatatctacagtagacattctattgtcattgaccatatttggtaaccttggttcaccaggaaatgcattagatgattgaagattgtgtcgcccgggtgcccaaactcgatatactatacatttcttatgagtttctgcttgcaagtccattccaaatctggagaacatactgacaagtcgatcgtggttctttttattgtcaatcccaagtctcttgcaaacctgtttgtcacaaatgcattgatggaattaacaattgaaacacatcactcatttatatgcaactttaaaaagagggtaaagctgtagtaacaaaagcctcctatagaaaaccaaaaacctaatacaataagttaaataaatacaaccacaatacactaatgcaccaacctccattacagtcaaaccctgagaaccagcagcatcaatcaaatcatatatttgatgctcaattgggagttctacaagctggtcattgacttgacatttcttcccgaacctcacctgttcttccttaaaatcatcatctacacattcaagagttttggggtctaaactctgtggagcaaaactcttcagtaaacgcaggcaacgttcaacctgcccaaagtaggaaagaaaaatcatgccatgacctaaaaaataactaactaaatggccctttgttattgaaaaaacaaaagatatattaaggtaaaaaaagtgaactttgataactcaaataatcacatgtatatatttataaaggcagacactataatgaatggagtgaacatccaagagcataaaaataattaatcacatattcaaagatcaaaagttatataatagcaattaattccaatgtaacagaaagttattttatctacatacatacaacatctaaagcagcagctatatggcttataataaaaaaaaaatataagtgcaaagaaaaggggggagaaaagttatagactggtattaagtcagtaacacaaggattctgaattcaaattaggatgcaaatttactacaaataaaatcagcaattttgatttttattcgagaattcacttagtatgtaactataagaaaaaatagtaaatgaaacataaaaataccttcccgtttactttagcatcaaactcctccacaatatggccatctatcaacctggaacgtatctggtagcataaattgcgattagaaaatctgaaaaggccatagtaaaagtaaggcaaagacttttaattttagcatgatagcatcaaatccttaatcatttaccttcctccactccctatgacgagcccttgttccaatatacctgaactccttctttatatctgaaacaacaagaacctttcaacagaaaatgtcatggtcaggaaaaggaaaaatagagaagctccttaagaaattccaacaaggttgactgaccttgccagttgctttttcaagtttatcgcatactgccttcatttctggaagataatcctttaccaaaacatcctctctgccttccaaatcatttacattactaccaaagctctcagtacttggttcccccttaatgatctcaattttttgctgtgagcctaaatgcttcgcgtagcgagataagtagactaaattggttgtcacgcttggaatgcttcttattgcctctccttcatcatcatcatcgccagcttttagtgtcttcacaacagcagattgcctcacgattaatccttgacattcaaggctcctcattacatagaataagttttttcctttaacgccaagctctttgccaagttgattttgtgtaattccattttccctacaagagcacatgattctcaaaattagtcgtttgcatcactttgcatatttgtttgtatatgcgcacatacacacacatgtgcagtagaaaatgatgaaccataatgttaggcctcaatatatgctcacacaacaaatcagttagagagttagtacagtttaaattcctatacggctggttgtattgctagttagttagaatttttctattcttttcagttagtggttgtgtctatataaaggttagtcctatattcccagaggtatcagttagaatatgtgttaaagaaagtgaaatattttctacggagaataccaaactgtctcgaaagttgggaactttgtaactctttctttgatattgataaaatgcctattttctaattctttttgagagctgaatgggaacaataatgtatcacataagcctaagaaacaaaacatcattttaacttatggacataaataatagt

SEQ ID NO: 19196 - DNA, 7339 bp, Cannabis sativa
tttttttggggcctctaaagttgtggggccgggggccgaggccccgcctgccccactctctggccggccctgaatataacactccaatagtagttatccgatagtggtctttaatggtggtttcctatggcagagcaatggtggtctcaatggtatcagatgtatgtttagggaagaaaaataaatgaatcatattgtaaaaatgaatataaaagaacaattataaagtaaaaataaataaaaaaatgtataataatataaaagaaaaataaaagtaaaacataaatcattaaagtatatgaggcgattcttcaataaataaacaatatgatcatatatttttcgaaaaacttctcatccatctcttttattgcctaaactcctaattggaatgggcaatgccaacatcttgtaacgtcattgggtgaaaatgttccatgtatgagtagtaatactatgttatctgaattattataattacatcaataattttttactagattattgtaagattttaaagtaaggatgtgcattacttataatttgatcatgtatatatattttttgaaaacataatttgattatatttgatataaaaaaaaatcgccatattaacattttgagggtataggctctaagctgctttaagctttcatttttttttcgaaagaatgctttaggctttcaattcccaaataagaaattaaaaagaaaaattgtaatagaaatttctattaaccatgattagattgcattatttatactttcctaataatttttcataataatctttgcacttttccattaatttcttaaaataaatatatatgtataatgttggcaagatgaaaattaattttagtattaatggtatacaacatgaaacctaaaatttgagacattggataaaagatttaaagaaaaatttcttatattccatgtcaattattgtgttttacgtacaaaaattaattcaatatggaaacaataaatacaatattatgagaatacttttttttttttaataaatcaattaaacaaaatcccattaactcccaatatccatcgttggatcaaacctagactatatcgagacgatcgtcgaagctgttctccgacgacgaagaagagagagtgatcatcataccatcattacagtcagaaacactgtcttgtaaactgagcaaaagatgagaagtactgaaagtggtggagggcttagctctcggaaccaccggcacctcagcctcacccaccagcatttggaccaccgctctcatagtgggccgggccaacgggtccggatgcgaacacaaaagcccaacaagcaaaacccttctcatctcaccctcttcgtactcaccctcgagtctatcgtccgccgccgttagtagcttcccttccctgtgcaaactccaaacccattccaccaaattgcttgccaccccaaattttccggcccccgtgacctctctctcgatgggtcttctcccgctagccacttcgagaatcaccgcgccgtagctgaacacgtcggttttctcgctagctcttccggtaagaagatattccggcgctaagtaccccattgttcctgccgcgactgtggcatccggtgatttgtcgtgctctatctgccgagctaaaccgaaatctcctaaccgggcattgaaaccttcgtccagcatgatgttgcttgactttatgtctctgtgaatgacttggttttcgcactcttggtggagatatgcgagagctgaggccacgccgagtaggatttttttccggtgaagccatgggagaggagttcttgcttcgaatagtgccttgtcgaggctaccgttaggcattaaatcgtagactaagagaatttcccctttttcgtggcaccaaccttgtaatctaacgagattgcggtggcggagtgttccaattatggataactctgatagaaactcctcctttccttggccactatggctgcatctcttgacggcgataatgtcacctgtgtctggcaatatgcctttgtaaacagtcccgaaagcgccatggccaatgattctgttagcgttgaagcacttagtggcgactctgagctgtttgtatgtgaattcctttggcattctgatgatttctgatgcgaatgaagaatctgaagatttcttgagttgtttggtctttttggagtaagcccagatgagaactccggccaataaggcgaaaacgaaagcgctagctgtgacaactccagctacagctccaggaccctgtttgcagagttggttatggcaagatgaagatttactgttcttctccgtggtggttgtacttggtgctgaattagagggtgccattgatggtggtggtgatgatcttactgtgttcgccgttggattcatcaaagtagccgttggaggaggaggtggcggagaagaagaagaagaagatgcgtcgaaagaagatgagaagctccaccagtcaatactatgaacctcagtgcttccctgagtcgaaccagagaaccccacgtacataaaatcgttcacgaactgatcgagatcaagcggaaaggacaaaaggggttctttcggcttgagattcgaatacgaaaccgatacattgaagaccctagttgacccgtcgtactcgatccaagcattcacaaggtcaccgctttttagatcgatatcaacagctcctaaatccgccactgcagaggaaaccatactgttcagatcaaaccctacatggttaccatttatgtccttgtactccacgtccataagggtatcgaattcaaccgccagaaaaccagacccagaagctggcccttctgtaatcacgaggcccagtgacccgccggcgtcgccgactgcctcatcgtctggtgatattatgaaagcaagtcctccaccgatagaagaaggattgagattcatgactgagaaagtaaagaatgtggagaagctcgtcggtaagtgagttccgatctgccggaatctaactggtttggtgtagagtgctctgccggagccagagttgggaaccggaaggtctcgtgtcagtcgaacactgccattgttcaaatgggcatctcccaaaagcttcaaactactcaaagtcagggtgccgaagtcgaattcagtggcggcaccggtcaaaattgcggaacacaaggcgaagtaagtgaagaagaagttaaaggttgaagatttgggagaagggtttgacattgtcagtgattgtagttaaaacccattagagaaaaactgaagaggaagaagaagatggattgagagtcacgggtggagagaggagagaagagagggatgggattgtattctttgcctaataagaagagaataatgaggaaacaaacaagaaaggaatactagagggagagagtgtggaagagatgggatatggtaagagtgattagcttagcacagagaatccaaaggagacaggtggatccactgcctgccacgtgtccatttgtaacggttagttttctctttttctccaataaaagtctactttctctatttttttttcttttttttttccttcttaatttttatttatttctgttcacaccacacacatgcggattttcacattacactgctctcctccttcagagctaataatttaatcaaatagccaaattagtacaaatgtatttcagaacataatttaatcaattttttttctcaaaataataataacttaatcaaaaatattttttaatatattcagaaaaaaaatacttttaaatatttttgtatttatgaaatgggagtggtttaaatattactgaaattatccttacaaagtagggatactcgtgaattgtgttgactgaattagaggtattttcatggccaactcaattatgatgctttggaaaaactataaactattcaattatttttaattgtacaatctaatcttgtttggtacaataatataggggttgaatttggttgattcattagtttgagatggccatttaagctttaatatttacattataaacatgattaaataatttaatctagaacatacaaaaaaaaatgatatattttaatatatatgtgtgcatgtaagtattgggctttaaaaaaaattaaagtggtagaggtggtatcgtgcgagtgacaatgttataataatgattctatgttatatttattgatagaggtagtaagataactatagactacatgttagtaaattacttgtgacaataataatataatttatttataaaaaatgtaaactacatatttgtatatattttgtgaatgaaaaatatattttaagtatgaaagttgttttaaatttagaatgtttcttgaaaaataagttagattagattatatagagttaaaataaattcaacctataatcaatctataattatatgaattattacttttcagtttaatcaaccattaacataatcctttattacaaaaaaattagttgagttggctggattaaataatttggctcatatatattttgtgcacccttattacaaaaggctttcttttacttatacattcataactaatttttttattcatttatatatcaaatttaatgtacaaatacactttctttagcaattataggatttgttcctcttctccatttctaacagaaaaaaaaaaaagaaagaaaaaacaacagagctccagcaaatccaacaatctctagccattctcaccatcttcatctgaaaattctccctccatctttggcaacgtgagtttctttcaatctcactcaaattaatggttgctttgagtgggctattagctagtagtggggcttggacttagtattcgatctggatttttttcttcgttttttgatctagagatagtaataaaaaaatcaatattattgtattatactacaaaaaatcttatttttagtcataataaaatttgtaactaaaagtaaaaaggttatgattgattataaatcaatattgctatgttttgactaaaaggttcgtagctaaaagttgtagttacaaaaattataatttgttatgatcaaatttgtttttatttacaatacttgttgagacaaaaactaaattagtgacgacctgtatctaaatacaatgttttaggcacaagtaattttttgtttgcgtctaaaagttacatttagtcacaaaaaatttatattatgactaaaaaattatcactaaaagtaactgtttttgtagtgttagcttttgaagtttgagtctttataaatctggacaattactagctttacattaattgtaaaaaattgcaattacagttagttaaatgggatttatagagtttaataggaaaaaaggtataatctttgttttagcaactagtacttaaatgaggttgcaaatctctatttacttgtgttgacttggaaaattagattgcaaaattgaattgaattacatgtgttgaatggaaaaattatgtagcaaaactctattaatttacttttttttgtgagttgcaaaattatttgatttatttgtattgagttgcaaaatcaagctgcaaatctctataaatttatttgtgttgtgttgcaaagttaggttgcaaaattgaattaaattacttgtatagattttgctaaaattgacgaatggaatgtattaataacatttgatgctaattatcgtatatttgttttaagttgtagagtgcagaacatatccaacaaaagaggagacgaaaatgttttaagttattgatgatgatgatgatcttccctccctcccttcgtttgattttattctataaattattagcagcaacaagagaaatttgggtttctctttgtttcattagtttttacttaaatgtaaatttaacacttagttgcaagagtcatgttatagcttcttgctacaagagcctctttattgatttcagagtgctatgtgcagtggtgtataagcttctaatttttatattaagtcaattcttgaatttttagtttgacaaaagcaaacttgtcattactctcttaaatgtttgagttgcaaattcaatgatacaaaggaaaattgaataaatttactcatatgagtttacaagagaaatggtccagcagacatgattgaagctttggtatagtttggagaaattcctttcccgatcatgtgaagaaaacaccatttaagtacaagtctctttctaatatccaattccagttctttcactatttatgagctacatcttcatactttgtaatctgattaaaaagaaaggagcatttttgtattactactactactactttttatagcctcatagaggttaagtaaactattattattaaaattattatacctctttgttggatctattattaggagcaagaaatctattcccttggctgttgattgtaggtgaagcaattccaccaataccatacattttccaatgcgtataacattattcactacatggaaatacccatgtttacatctgcaattaaatttacaaaaatttcagcataatcccataatttgttatcaaatcctaaactttttttataacatttacattaaccttggcatgctctagatacaccaaaaaatggatttaataacatttgaaaatgttagtattacctagttttaatgacatttattggtttagtaacatttttgacaaatgtaggatataacagtgtgagtaaaaatacaaatgtcactttattatcttttactgtcatttgaaaaaatgtcactaaaatggataaaggaaatagtaacttacatattcttgtcctatttataactatggatgtgacccagaaacatgaccttattataatgtgtcatgtaattactagaaacagtaatggttgtgaatccataaatggcatcaataaaaaatgtaagagttcaaaatattatcttttgacagctatcacatttggacttcacagaatacacgaaaaaatggctctctctagactcttcaggaggtatgttctcccgtctccgattggtacccgaaatgggtctctggtccacccatatgagctacgtggtggtgctgggcatagatccctcttcctcttttgtcaacctttcgtttcttgcattaattgggggcatttattactctaacgaagattatatcccaaatctcagatcagagggttttttttaacccaattaaatgcttcttaccctttcggtaccccccaaagtcgttttgcttctcccttaatttaatttttctctttagcaaatccgactatcaaatcaataaccagtttgcaaatcctctactctctctaa

SEQ ID NO: 19197 - DNA, 6554 bp, Cannabis sativa
  modified_base (115)..(119): a, c, t, g, unknown or other
tgttattgttaagtttccgtcataggtgaaaacattatttgtacaacccttgaggtctaagcaaatctatgtattctttgtagagtatgtgaaaagtgagagagagagagagagnnnnngagagagagaaagagagagagtataagcaaagaaattttgttattactcaactggcttttgcatttggtacatggccttaatataggctgaggaaggagacgagagttagttaggaaaactaactaactatctaacaacctaatctaacttaaccaaaggtgaataaactaactaaagctaatcctaacagccccctcaagatggagtgtaaatgttaattaaccccatctttgatacaatattagagaaatgggtaggcataaagctttaggaaaaatgttagctaagttttgttggaatgagacatgaataaacttgaggaaaccttgttcgaccttctctcaaatgaaatggtagtcaatctcgatgtgttttatccattcgtggtagacgagattttcactgatgtgtattgtagcagtgttgtcataatatagcacggttggacttgagtgagagatgccaaagtctttgaggagagcgatgatccaagttagctcagaagttgcatttgacatagcacggtattcgtcttcaatagaggaacgagaaacaatttgctactttttggatttccatgagacaagaaagttgccaaggaataaacaatagcaaaaaatggatcgacatgtgtccaaacaacttccccaatctgcatctgaaaaaaaaaaaagacttgaacattcgagggtgaaagacttgtttttaatgttggagatgtgtttgagggaaaaaacaagccctgtccaagtgtgcttttgagatactacaagattctattggtagcatgtagatgtgggacttggggacaagttaagaattggcttaagtgatttacaacataggatacgccaggcctcgtaatggctaaatagattaatttgccaatgaggctgcaaaaaatagtaggatcagggggaggattccctttgtctttacttagtttcaggtttgtttccatgggattggaagcagctttagctcctatgtaccatgtatcaaccagtagctaaagagtgaaaggcctttgggagatagagatcccttgtttggtgtggccaatcttgaggccaaggaaaaattaaagagagtcaatatctttcagcttaaattttccatctaagtatgttttgaagaaggaaatggcggaatcattattgctggcaataataatgtcatctacatataccaaaatcgttaagagaattttattggtggttttgatgaagagtgagttatcagagagggattgatgaaatccacctgataataatgtttggctgagcttaccataccattatcgtgagatttgtttgaggccatagatacttttgttagcttgcatacaaagtttggtggagctttgtagcctaggggtattttcatgtagacttcgttatggggatccccatgtaggaaggcaatattgatgtccaattgatgaatattccagttctacatggcagctagtgcaagaaaaacctttatggtattaaacttggctactggtgcatatgtttgagaataatcaatgccttgcctttggttatagcctttggctacaaaggcgagctttgaaccgttcgatggctctattttggttgtatttgactttatatacccacttgcaatcaatagctttgtgccctggtggtaattttgtaatgattcaggttttgcttctttttttttttttttgagagcttgagtctcacgatccatagctagaagtcaatgtttgaattaagctgcttcagcataattttgagactgtctcagagtgtgctgctaaaatagcagctctaattttaggatggagtttaatataggagaaaaatggctcaatggggtgagctattgatgatgtatggcaaatgtaatctttgagatgttgacgtttcgtccaaatgtgaccagttttagtagtaggtaagtcagatgcaactggtttgaacttgtcggttattgaatcaataagtaaagtttcatgtggaaaggtattgtccactggttgttggactagtttgtcttgttttactggtttgacagtgggaaggatagcttgagaaaatagggtatttatctctgaaggagaagttgttgaaaaaaagggaaaaatatttttataaaaaataacatccctagaaatgtaaacttgtttggtttcaatatcaagaagaatgtaagctttcatttcttgaggataactaatgaaaatagatgcttgactctgaggagagaatttgtgtctcttggaatttaatgttgagccataggcgaaacatccaaaacatcttaaatgttcataagtgggaatttactataaataatttcatacgaagtggtccctttgaacatttgagagggtgttttatttagaaggtgggtagcagtttggactaggtgtgaccaataaaccaatggaaggttggattggaagcatagagtccgagctacatttaatatgtgttgatgttttctttcaaaaactgagttttggtgtggtcgttccacacaagagtgatagtttgttatgcctttagaggcaaaaaagattataggttcaattctttagcattttccgatcagattgcttttataaaatttgaaaatggagtacaaatcatgttataaaaggtaggtataacagtttttacttcaaatttgtgcttaagcatatatgttcaagtgaatctagatttgtcatccactatggtgagaaaatatttgtcatcttccacaattatgatgtggaatggtcctcatatatccatatgtactaaatcaaatatgtttaaagtaaaattatgattagagataaatggaaaatatttctattttgctaattggcatatatgacaatgctgattagaaataacagaaaatgaattgtcaatatttttattgaagtaattggaaatgtatgtagatggatgaccaaaataattatgccattggtatacatcgtttttgacaaaatgaagagaagattgactagcagctgctgtagaaaagtaatcctgacgaagcaagtataatttgccatgccttttagttgtcccaatcaccatattcagagtttgatcctgaataacacatgagttatggctgaaaaaacagagttagatgtgttatgaacatattcatagtaggtttatcctaaaactggaaacatataggaaattgtgaagggttagtttaagattaatttgaactgtaccaatattatggacaaatattttatggccatttggtaaaatgacatgtttaggagagtttctattagaaaaagaagtaaagcatgctatattggaacacatgtggtgtgtagcaccacaatcaatgttccaagtaatggatgaggaattagtgtcattactagctagatttgatgcagcaggtgtcatggcagcagagtcagtccgaggaacattttgattgagttgctggctgaggaggaaaattagttgttgacattgagttgagagatcaattgagaccgagattccatctgcatcatctttggaagtacctatggatttgtgatttgccttagctttacctttatcttgtctctttttatccccataacccggaggaaagccataaaggaaaaaaatatttgtcaactaagtggcctggtttgccacagttggaacaagaaggacaagatttctttactcttggaggattgatagatgaaggattaacagaggcaaccagaggaggtgaatttaaagatctaagtgctctttgactttcttcttgaactatcatagcaaaaactcttgacaaatttggaattggttcattgagcaagatttgagctggaaccaaagcattggatttatttataccagtcgagaacagaagaacttgattctggttgtagtaatcgagaaagaatttcatttcaccacaagtgcaagtaatatttggttgaaattctttcaactcatcctaaagggatttcaactttgtgaaataagaagaaacagagggatcaccccgttgtaatggggtgagctgtgtttgtgattggaaaattctagggccattgccttcattaaatctctcagcaagatcatgtcacatatcagtagtaagatcaaagtacattatgctatgagcaatctcaagagaaacataattcactaaccaagacataaccatattgttgcagcgaagccaagaatttagaaagaaattaccagcttctggatgaggtaaagatccatcaatgaaattaatcatgttcttggcagtcaaggccatggtggtgtcgcgtttccaagattggtagttagtgccattgaggacagtggacacaagaacgagcccagggtgatcgccagcactgaggaaaaaaagactggaaagatcgttgttaacatgtcgatcaattgtaaattgagatcatgttggcagatgaacggtggtgttgtcatcgtctgcaatggcagattgatcctgagaatgaacgaaatctagagttgtggagtgattctaagattgaggcctgagattggaggtcctgtgaggaacaactgaggaaaaaagatttggaggaaaaagaacttcgagattgatttctgctgcatgatgctcaattgtggatggaggactaccatcttgagagcgtgtggaaagtcttgccatgaaagctgcgggcaagatgtcttctattattactaaatgacttttatatttagtacatgaggccttaatatagctaaggaaggagacgagagttagttagaaaaactaactaattatctaacaacttaacctaacttaattaaaggtgaatgaactaactaacgctaatggagagagcattcaaaaaataataaataaataaataaattagagagaagatggaatgattttatattttcaaaaataatcattttattgcattgtttttcttttctttttctaatgatattagcaataaattaatgcgatgagcaattgtgtcgtcaagttttattattattattattattatgaactatgaagttttattgtgcaatatctggtgtgacagttcagacaaaaatgtatcttaaatttcagaatttcttttgtcaaatttttttaaccaaatcaaaagaaatatataattcaggtgtgctcgtcatttctaaatgactggtcagtaagaaagaaaaagagaattaaattctcaagttttattaattatttgcatctacaaaaacattggaatggataaaatgctctctctacaatcctaattttggaccaattagactataatgaggtccaccaaaaaaataagctagacaaaggatgaatattggcaatttttcttttctttctttccaaagatgttagaataaggaggtttctctttcttgagtcttgagtcttcagtcttgagtcttgagcttggctaagtgggtggaaaaaatctgttgagattaaatggaagagtgtaaaactcttcatttctattgtctcctctgaatgttctgaacttgacccaccatggcattcctctatctttcttggacttctccacttctaatgtgttatcaaggaacactgctaccattagaccaactgttgggggagatgagaatatggtattcaagaatgcattgaactgccaaacaccacaaacaaatcaatatgtaaacgacatgtcggttcgatcacaacataatatgagtttatgaattcttacccatccagcatttgtatgaaccagaccatgatgtgaggcagtccagtattcattgaagaattgtgggatagatatgccgaggaacagtgaaagcccggtgatgatgaggtttctcatagagttcatgtttgtgaattgaagaaatgataatccaactgaagctgaaaagcccggcaagaaaatgttacgaaatgaatgaatacattttaagtttatgatataatattatacttcttttgttcaacttcaccacataccaactaggccaaagaggatacagtacagagcagagtatatagggaagggtatggatgcaaagacagctccaaatttacctgcaaaaacataacaaataaaatacatcatctccaaagagaaaaataaatcactaagctgattcaaatttctctctataccataacaagtcagaactctagctgcttctttagttcaatacttgaatttactttaaaatctcaaaggttaccgttacttacctaaagtagaaaagaaaatcatgaagccagcagaaatttgaacaactctgcggctcccaactcgggttagtccaagaagtcctacgttttccctgtaatacatgatcaaaatcttgtgttaattataatgctgcaaatcaagcattgtgaagccacagctctctgtcttacacagatacagtagaaccggagcatgttccaaaaagaccatcgagcaggacaccaat

SEQ ID NO: 19198 - DNA, 4713 bp, Cannabis sativa
tattattattattaattttttattttattatattttaaaaaattgtatcaaacgtgtcacattcgtgttaagcgggtcgtgtcatgtcgtgcttaactcgtttttattttttgtcaagttgtgtcgacccgttttcgacccgcgtctaattttttcccgtaaaattcgtgttcgtgttggtgtgccgtgtcgaaacccattttaccccctacttttaactgaactcttaataacagtcaaaattgaggcagcttctcaccctgactcctcaaaaccctatgtctcttctctgtcatatctaaccggcggcgtggctctcgacggtgagatctctcaccggcatccgctatctctccttggaggtacctctcttactctttttctctctatgtgttctgaaggtctgaggtcacggctgtcatgcggggggtcgtggggcttgggtctgaggtcggatttctgggcgtgaggatgggggtcgctgggcttggggtccaaggccggtggtcacgggggctttatggttgaggctgtgaggtcccagggatggggggtgctcgggatggatttattgaatttgttcttgaatttatatatataatatacaattaacattttatcaaaaatttggaacttgctcttcttaaatgcataaaagcaaattaagcacattaaagtttcagaccattgtaactattgtttcgatgaaagaatcagcatagttactgtatattttcaaattatttagacttgaccttataaatccttttcctagaattctgttatctgtatttcttaatgaacctcccagaacactgttttattttcacttttttattgtttcaattatggaaatgttaagattatacattcttggcagagacagttggaaatggaaggtgatataatttctctcttaattgtgtttttgattctcaattctttgtttctaatttcatttggtctgagattgtgtagatactgtgtttaaattaaatagatctgtatattattttgtttaaatttgatgatgtgtgaagaaaattgttggttgattgaactttgctgtttctagttggtttattgcctttttgtaacgtcctcttttggaaaactctctataaaataatgtttaatcgtgttagtttcgtatcgtatcattatacatttactcgtgtgttaaagatgtcggttttgaaattataatgtttaaaatttattttgtgttcgtgttcagggcttgatgcgcttaataatcgtgttgtgttcgtgttaactataaacgtcaagcgtcataaacgtgacaacacaataacccaaattgccagccatattgatttgatgtttaatggagaaatatttggttcccttggaacccttgaatgaagtctccaaaccagtgaggaggtaatttttggtttatttattgttaattttgaagtggtattgtgtataatctgaaatggctccttcaggcaacaatggagacgaagtctcattgaattgaacggtaggtttgatccaaaataccgacattcagtgtccgatttactcattcaatcctactcagaggtgttatccttaaccctagtttaagtagtactgttcttgattttgtatttgcaactctaatttgggtttccaaaattggaaataggttggggctttccctcatttgtatcatcatctcaatggcactccttgtctcacgcatgtatgccctattgccgtagttgtgctatatgtctcattctgattactgattatcatgattcagtgtttatgtgctgattgatttttctcgttttagataaaccgagtagctaatgctgggtatattcatggtcaagcgctcataaaaaagtcagtttttaagtcagttttttccctaataaaatctattgtattaatcattagtttattttaaatttttttaatgaaaggtagctatagctaattgtatttttttccttttaaatttgtttagggagggaatttcagctttggactttgacaacaaggtgaagtctggtttgttaaggttcctgaatttgaagtttgttctgtttaatttagaactcagtgtttgttccgttttgttaaaaaatttccagggaatatatttggtatctgtaacaaaatcagggtgcttaacagtgcatgattttgagactctttattgccaaagtaatcaatcctctgaatgtaagttaaagaaaaaaatttcttttgctttgctgattaaagagtgctttgttaagttttgtgcatttttaatttattctgattcaaatgggtcattctgccatttcatgtttcttttatcaaatttcagttgcatatattgcttatcaaaacaattgtttcagatcttacccacttttctgttaggtgtggaagatgaagcgaaactcgtgctgcaccttactagacaacaacaacttgactgtgtcaggtggaaccttgccaaccaagatgaggtttgcatcaagtttgttgttgttgtttttttcttttttttttttccttttccatatgtggttttgtgtcgacctatggaagcacaactaactacacttgttcagtatttccattcccgtatgaagttgttaattgcactttaatttttacgacattagttcagtttaatgactatgtagtagcactttttaatcttggtttatgatattgtcatttaatgatcagatttgattttagaaatataattattgcctaacctatctttaggtcaagtagatatttgaaggattcaaactacattttgtgtttggattctggagtaggacaacacatgtttttttgtttttgttgatgaactgctgcctgagagattttgatttcttggttaaaaattaaaattcatcatttgtttatttgatgtattatgtaattcatctatgtggtttaggtggtgtgcagttcattgagaagtaacaacttgctcgtatttgatattggttacatcacttctgaaccagcccaagtacgtatctattttcacatgtactatattttaggtggatgatttgtatgtgtgcaatagtaatgatcttatggatgatgcaggtattaaaaataagacctactctctccctccacaattttaatcttgataaaggtgttagtgatatagcttctactgctggtgattccaggttagtgaagtgaaagtagataagttagttatgcgatcttttctcgcataggttcaatttattttttcttaacgacattgagtgattagagtgcaaggtccaagaatctcaagtttgctctaggtttttgttgtagtcttttgtttatgtcaaacactgccaaatttgcatgcgttcggtctttcagtgattacaaattctgtggaaaataatttattgcatttatctaagaaagtgaacgaactagttgaataataaaatccttttgtttttgtgctgagctattataggttgtttgcatcagatacacatggtgtagtcaatgtatgggaccgaagacttggtgtatttccatgtcttgaacttactacaaattctcgcagcacaattaatagtattcaactaaatctggaaaaccaggtataccaatttacattttttctaggatcattattgtgccctttttttcctttttgcctttagatggagtgtgtaagatgttcatcaatttatgtccatggttttatggaggtcaattgactttttgttagctttttttaacagataatctatggagccaacaaggatggggttatttacatgtgggatcttcgtggaggaagaccagcatctgcttttcgtagccataaagaagtaatatgccaatttccttactgtaggtacttgtttaatgtttggaatgaattgtaactgcatgaagagcttgagaaagatagctacaatacaagtagtttgacgaaatcaaagaactttaattctaaaagaatgtttcttgattgaatctttttgtgacatagaatgagtgtccttttgaggtaagtgtgttttaaaatctgccttgaatgatgaatgctgttaagtgaatctaggtcttatgtttattgattggggaaaatagtagagttaatatactttggtaactcaaaaatgcaacttcagtatgaatatttcttgctatattgatatagtggttcttttaaatttttagttgttgatcataacagacgtgatttttgtttatccagatttgtcattctcccttaacatcattaaagttatcatcagtgataatgaaaattggacttctgaaggtataatttatttcagaaagaaaatggtcttatttttattcttaatttatcacacctccattcaaaaaaaaaaaaaaaaaaaaaacgaaaaattattacacctcactatactagtatgatattttatatttcggtttatatgcacacttattagaggaaaatctgttatacgaggcctaatgttgtctttgatacttcatttgtcataaattacttaagtgactaggtggttttttgatatgcaactttaaagtatcattaatattatataactgctgctttttgcaggcccagtctgatataattgctaaagagatacactctattaacatcaatccatcttgcccgcaccaactagcatttcacctagatgatggttggtaagtccgtaaaacaaaggaatttaccttttatatttctatagt

SEQ ID NO: 19199 - DNA, 3523 bp, Cannabis sativa
tagaaaattgtgttgatgccactacatgacattgatgctttctcttttttaaaaaaaataaaaaattgaaaggtaaataattagtgtgataatatttataagattaatttatgatgtaaatatctaataactctcgcaaataaatacacctaagttatatttttggaaatttcttagccattaaatgttaattcattatccaaatgtcattttttattggtatatttaaactaatttttcttataaattacagaagtttcataattaggagttaaggtatttatgttacaaattattctatttatacttaaagtaaataatatattaaatgataatgtgtgagtataattatatgagacttacacttaattagataaatagtaatattaacacaaacactattaatattttttataacatttctctatttaaaaaatactactattgaagatactcttaaaattaaagttgtacattgtaaaatttttctatattatcttagagttatgtgcacaaattgaaacataatgtaaaaaatacagtaacaaagaggggaaaagtgtaatataatgagagggcctcatgaagcttaaaaaggcttttaagaggaatcttatccttgaaagttgatattgttcaattataacaacatgccggccttggaatagaactctcattttcaccctttttttttttttttttttttaactctattagccatatttttattttgcttaattagtgtggtcccttagagagtgggtactactcccccacactctattgttattattgtcctatccttacagaaataagggaatcgtttttctaggggtactttaacgcatatcccggaagaaaagaatctctcaaataacaacatcaaatatcgtatagtaaattaaaaacaaacaacaataaaaaggttcatggtaaacaaaagctgtaatattatataccaaaaacgtacaaaaacaaaatgactagagcagaacaaatatatatatatatcataacaaacagccaaagcatacccaaacaaataccacttttttctgtgccatgtatatatatattattctttcaaacaaatttgttatattaatgccctatttgaaaattaattaaagactgcgtgtggtgtggttatatattacaaatttggaagaaagggataaaaagaagcttctatatatgaattctagtacaattagtagctaaatagtaaaaagagctcgattgaaccagcttcttcttacaatattgcatatatagataaaattaaaagaaactgtacaaacgacaaagtaagaaacagtacccaattctccaaagcaagtaatgtcgtatgcccatttcagtcctaccctatgtcattttagcttaatttccttacccaatatcctatttgtttttgttttaattcttctaaggctttaaacaaacccactggtaccgaccatccaagggcgtatccttcacaacatcaaagttgtacctgcaaggcaacggaaaatgggaaagttgttagttagttagagaaagagggctgattccacttactgctaaaatgcgcatgtggtgtaggatagtacaatttacacagctgcttatcctacgcctactactaaaaaaaaagtgtactcacttttctgtaaagcgcttttgctcagtcttctcggctatggcgaagaattcctcgatctcgttcctcggaggtgttatacccgacggtgtccttctcctgatgttaacagctaacgctaacgcttctgcttcctctgctgattctccgcacagctcgcttgacggcgtagtttccctgctgatattgaatagagagagaaaaatcattattaatggaaccaaaaatatactataaggattaatcgattagagaagaaagttaattagtaatatatacctgaatttgttgctgttgttattcatagggatagagtctgtggtttcaaaactcttgactccatcaacctgtaacattaattttcccgttcagatatttcgaatgaaattcaaattcgaatttcatgttttcattactagctaaacacacatttattacgaaagaagtttatatagaacttttcaaagaaaacggagattttcgtgttgcatgaaaaaagtacaagagaataaataaataatatacataacaataaatgattatgcatagagtctagattttctatttcgttgattgctgctatttttcatccaaaacaagaacattcgaacgctagttttctcgtgatttttcttcccagccaaacagcaaataacatatagacaaaaaaaaaaaagataatgaaaatttataaactgaagcagacctgcagatctacgagtcgcaagcttctgtcgttaacgacctggtcactactcgtttcattgctgaagcagttagacggcggcggcgacggccaatccgtggaaaacatggagcaggtaccaccagtggcggcggagataaccacgccattgttgagcattttcggcgaagaattctccgttaaagtaccgagtccgagttcatcattggtagtagaagaggaagactgtcgtcgaagctgctggttggaggagctaactacaattttccttctcttggccatagctatggcagagcttgaagattccatgaaagaaatggttgcatttcgtttacagtctcccatttgggttttctctctctaaaagctctctttgtttttgtagagagagaaaaaaatgagaaaagttggagatccgagaggtatatatgttgatgaatgaatgaagaagagaataggtaaaattaatagatggctatgatttcaatttgatttcaattaaaattaaaaaaaataataataaatttaaaaatgaaaaaattattttgaaaaaatgaaaaatgaaaaatggtgcgctggctgttactgttaaaaagtgtgggcctgacatggtaaaaggcgacaaggaacggaaacggtgccgttacgacgatctgggccgtttgagggatcccaggaacagaaacgaaacgatcataccaattccattctcttctttttttttttaaattaattttattaattaataataaagatagggttattaatagcgggaaaacttcatatgttttgattttaggctaattaggattttaaatttttgaactttagtatatatcaaattatgtctttaattttttttttatctaatttaaaaacaagaagtttaatatcgatgaaaaatcaaggagtaatatttgatacatgttatgtgacataattttgtagataccaaagtctaaagaacataatttagtacatgaaaaattactgaattagtaaaattaaatgaaattgaacaaaaaattttaaatctaacaatttcaatattttaggagagtttttaacgaccagaaaagttcataagcatgatttgttaaatatcaaagtttaagaggcaaaaatcttaattagccttgaatttatacatttaactcttttttttttttttt

SEQ ID NO: 19200 - DNA, 5056 bp, Cannabis sativa
  modified_base (208)..(209): a, c, t, g, unknown or other
aattaattatacattttcaaaatcatgtattaacaaaatatacctctatataagaataattatatcttaataaaatatatacatatattttgtaaatttatttacgcagaattaataattttattgcaaattgtaatacatgtataaatcttaaatttactcaaaaataattctattatgatataatattaatgattgtttattgttnntattgttacattgatattttttggtatttagttttttcttagtgtaattctatttaattatttgcttaatttcatatgtatttttgaatagaggttttattgtataactaaatttggatacaacattttattacatttactttctacttcattttgtttataaattttgcattatacattttgttccttttgtatttttatattttttttctttatatatttttcacgttgctttcctttagtagaacttttaaacaattgttttgatgataatgatataagtgtttaataagtagaagaatgccaaaattatgtagcagatttttcaagttttacaaatgcacaaactaaaatggaaattagtgatgtcttgtcttttgacatgttttgaaagttctctggtttccttgtttatgtgagttttggttgttttctgttatggcttcgagcagccatgaaggtggagaatggatggatgaatacgcacacttacagttggaagaagaggaggaggggatcctaattggtgaagaacacgagggagaggtccaagcatttgatgataggtggtgtttggttggtaagttccccactaatagaactatcgattttgatgcaatgaggcacatgttggcttccctttggcaacctggtaaaggagtctatgtcaaagaactggacacgaaccaatatcttttccatttttaccgtgaacttgatattcaaactgttattgatggaagtccttggactttcaatagattgcaattggtgtttcatcgtttaaagagaggagaagaccccagattggttcagttgcatgagttggatatgtgggttcagcttcatgatttgaaatatggttttatgtcggattgggttgttagacatgcaggtaattacattggaaagtttgttaaatctgatccaaaaaactttattggaatttggcgagattatcttcgagtgcgggtcacaatgatatcaacaagccattaaagaggcgcatgaagttgattaaatcagatggctcttggctttggactacttttaaatatgaacatgtccttacgttctgttttatatgtggattcattggccattcagacaggttttgtccaagaagatttgaccctcattttgatcagaacatcaaaccttatggtgaatggatgaaagctgttactaggaaaaagaattacctcattggggctcaatggttacgttcaggccgataggaagatgatggtggggctgctggcagtggacagtctcggagtatggcggaggcaagagaatcaatcattccaacaatggtgcgatttgatggagataattcaggagacaatgggggagtaattcgggtatccaatcaaggagggaataaaggaaacattatcatggttaataatgaggatcatggtaataaagatcaccaggtggaaagtccaattgaggattctgtgcttatattggacaataaaagaaggcgtactaataaggaaataatgaaggagtctcatgaagtggaagatagtaatatgggcggtatggaggatttgaatgatagctcaaaaaacgattcacaggtgggccttggtgcacaggcccaccgatcattatgagtatcttggcttggaattgccatgggcttgggaacccatgggttattcattcttaaaggatttagttatccaaaagcagcccaaagttgtgtttctttgtgaaactttgtcaaagtctgaagtgttggaaaagacacgtgtgtctctaggttttgagggggtgttttcagttgatgctagaggtaaaagtggaggagtagctatgctctggcgtgatagtaatgatgttaagttacttggttatggtgggaacttcattgatgttgaaatccttgagaatgatgggaaacaatggcgcctcactggtctttatggagagccaaaccaaagtcttaggagaaacacttggaatcaaattcggtctctaaaggatagctattctttgccatggtgtgttattggggaccttaacaatgttacttctcaatcggataagaggggtggtcatccatatcctaattggctcattgaaggatttgggaacatgttggaggagtgtaatttatttgacatggagttgtgtggatatccctacacttgggagaagggccgtggtactagtgcttggattgacattcaaattgatagggctttagtctttcaaacttggcttgatgttttcccacttgctaagttgatcaatcttgaagtctcaacttcggaccactgtccgatacaattgactcttgatattgtaaagaaacaggagtttcagaagaagttttgatttgaaaatttatggctcagggagccgccttgtttgcaaattattcaagatatctgggagtatttttcaggctgttctgtaatggataaaatcagctattgtggtaaaaagttactggtttgggggaaagactattcaggcaactttaaagctcgcattcgggattgtaaaagtgagattaaaaggtggaagaatggtggagatgatgcctctattcagaactataaaaatgcagaggctcgactgcaagaggtgttgattcagaaggagattttttggcgccaacgatcgaaacaattgtggttaaaggagggtgatcagaattctaagtattttcatgctatggccacttcaagaaggagaaataattcaattcagaagctgaaaaatgaccaaggtggatgggttgattgggagaataacttggaaggtctaatgattgattatttcagtcagttgttctcttcttcttcgttggaaattcgagaggttactgacactattccaagtgttgtcacggcatctcaaaatagtttgttgttggaacctgttactgatgatgaagtttgaagagcacttttccaaatgcatccagataaatcacccggacctgacgataagactccgggtttttttcaaaatgatggaatgtagtgggtggtgatattatctcgcaagtccaaatgtttttttacacatgttacttttctcctttgcttaatgaaactaatattgttctcattcctaagaagaaacaacctgaaactatgatggatcttcgtcctatctcgctttgtaatgttgtgtacaaagtcatatctaaggtacttgccaacagactgaagattgtcttaccttgtgttatttctgaaactcagagtgcttttatacagggaagactaatctctgataatataatgatttcttttgagataatgcattatcttaagagaaagagaatgggcaaagttggtactatggctttgaaactggatatgagtaaagcgtatgatagagtggagtggacttttcttgaactgatgatgattcagatggggttctctagtaaacttgttgcgttgattatgtactctgtttcttcagttacatacaagatcactcacggtggtaaagctttgggtcccattgtactaagcagaggtattaggcagggagatccattatcccctacctgttcttgatttgtgctgagggtttctcttatctggttaatttgtttgtgcaaaaacattggttaacgggatgtcgtgttgctagaaatgctcctcttatttctcatatgttgtttgcagatgatagttatattttttgcaaagcaaatgagacggaggttgctagtgtactttggcttcttgctatctatgagagagcttcgggaaagaagatcaactttgctaaatcctcagtctttttcagtaataatgttcaatatgaggattggactcacctgtgtaatttacatggtatggttcctgcttctgacagttcatacctgggtttgccttgcactatgggaagaagtaaaaatgccattttaggttttctcaaggagaagatgataaagaagatccaaagttgggagactagatttctttctaaggccggcaaagaggttttgctaaagtctgtggctcaatctctcccaaactatgctatgagtgtatttaatctcattaaagaaatatgttcaagcctcgaggggttaatggctaaattttggtggaaatcgcaaggtaagggttcatctaagggagttagttggatgagttggcgtaagctttattgtcataaagatgttggtggacttggttttaggaatctaagggattataacatggcttttctagggaaacaggggtggcatttgcttactaatgaaacttcattagtggcaaaagtttacaaagcaagatatttccctaaaggcaatttcttatcagttgagttaggaccgaacccaagtttcatttggcgtagtatattggaggctaaagctcttgttcagatgggtgctataagatctatctgtgatgggaaaacaactattttagaagacccttggcttccaaatgtggacaacaagtttgtaacaacttaccacccaagtcttgtgggtcaatctggtgatagcttgcttcaagttgattcaagagaatgggatgttgacttgattcgggatattttcaatcaacatgatagtgatttaattctttccattcagttgagtagctccagcggtgttgattgttggtcatggtctaaagagacaagtggggcgtattcagttcgaagtgcttataaactcctacaaattgttaatggggattggccgagtactggtgggataagccattggaagcaaatctggcaattgaatgttcctgctaaggttcaacatctgctttggcggatcattgcagattgtctcccaaccaagttacatgtaacgccctaatgctaaggcacgctacagt

SEQ ID NO: 19201 - DNA, 7790 bp, Cannabis sativa
ggtctaccgacaatagaggaccttacaattggtatgattatgatatagtttataattttatattttatgtaatttattaaatttaattgaatcatattaatatttgtattaatagctttgttattgaaaatatagatgatactactactaccaccgctactgctacacccactacctcaggcgattctagttcattaatgcagtcaacttcagttagaggatcttaatagtaataagtattgattaagtaaatatgtttaatttcatatgtaaatatttttttttaaaacatattatcttaagattttatttctttgattgttaattaagaaagattcagaactttggagtatggatgatgcaatgacagaaaaagagagtaaccaaagccaagtcatctaacaactttcaagtttcaactttaggaacccaagccattatgtaatatctttatctttatatatataacgtgtatgtaacagaatttttagtttaacgttttattcttctctttgcaaaagttaacgccaagttaacccctccgctaactctaaaaaatatacataaacaatgaacacctgttaaaacctaatctcagcgttctcatcttaatttctctctcactcacgatattcaattttattctaatggcgattgtgcattattctttctctttccttgcgattttcaggtgaaaagaatttacttaggttttgggtttgattgaatttgataattctattcagatactcaaacttattattggagattatgatatctgtttaatttcatggctatgtatcaattgcccttctttcttatttattgtttgagtatcctttttattttgttttaaaaataactatatgtctataataattatctccattaattttttcatcttctctattctcagtttataaaacttaagtcctaaatttattttcattttcatctcaatcttaacacttttcactatccatggatcttaaactagttaatcttgtttctttcgatttgtcgaaaaaagagttacctcatcgatcactgccatctttttctcgtcgaacgcccgcctcatcaagattttcaagtctttgaaacaatagcatcgaatatcatcaagtaaagttttgataaccaaaatagtttgattttgaattggtattaatttttcatctctctggctccttctaatcccatatgcaaacactaactggtgagagaatataaagattatgtattacattttgttcattagtctctaattatttcatggatattgtggccaacttattagttttagttatagatttttattgtatatacagtatagagtaatttgtggcataattaattttgattgtaaataaatatttaagtttaatttttgatagtaataatacttaagttacgttttcggaactttcataagtatttggccattaaattaactgtcaagttaatgatcacgtgcaattcatgattagttcatatcattaaattttttatttaaaaattaatttaaataaacggctttcttagctacactaaatttgagagaaggtgttagataagcttaaattagttagaccttttattttattttattttaaaactataaacaatattgtcctataataaattaattttatattttcatttgaaaatttgtattaaatattttttaatagcacaatcttcatttagtcaaattatatataattaatgaaatatataataaaaataatttattaaattatctcaataaaatcaaacatatatataattaagtatacgtgtgttgtacattagttctgtctaatttatttattttataaatgcttatatgaatattaaatttataagtatttttttttttttggaaattaacgctcattaataaaaaaaagttagacctcatggtcattacaaataatgttaactagaataattgacacctcaaccataccagttaaatttaggtatacacccacttagcgacattgtgagccgcaaaattacaaaatctaagaataaaagaaaaattacaactcaaaaaataattaaagagtctatttcactgcagtatatacttatcaatactccaagtgaagcaggtcccttacaacgccttgatatcttagagttgctcttaattaaaataaaatagtgcttccactcagctgccgtctctagagctagctggcaagctgcaacttcatcaataagagaatcgtagaaagcgagcatgctggtcgcaacctacaaaaagctttccaagttatatcgagttaacactgcaacatacatcgactcattccccattttaacgtcacaattaatcttgatcgagttctctgatggtggggaccaaaggggagcaacgccagtagcaagaggagagaataaagaggagccataagcattttttagtttagacattgatattgagtatgcgataatatgaatatactaatatgtactatgtatgagttatagagtatggattatgggtatggagtatgggtatgcagaaagtcatcccattaaattataaccaactgatttaatcctaaccgatttaatttaattggatatttaattataattggatcaaatcggatgtaaattttgaaaatctaatcagatcagaccagttgttggatgggacatccgatccaatagataattgaaccgatcaaattattatccaattatatttatatattttcaaaatacatttataattttgtatatttaatatattttattttaaaaaaatattaattaatttaatatatatttaacacatgaaattaacgaaaaaaaatcttaaatctaaaatattatttttcatcttctaaacgctaataaaattgtcaatgcacattggataagttttatttttttgcgattttattatgggatcatgaaaattaggttagactagattaatatttattatgtatgttggattattatgttttaaattatatttcatatatatatatacacatatatttctttttaataaaaccaacttacatggtagctacaataaattggatggatccaattcaatccaaaaagccagttagtgcatccaatggttggaacagatccaatccaattcatccattggatcagatcaaatcggatgactcaattcgattagattagattgcatgaaaaaattcaatatccactaaaaaattggattggatcagttgggtcaaaattcattaaatgtgatccaatgaacatgtggagtaaagatttttaatttttattcacattttattttgagactctttagtttttattatcatgaacatgaagttaaatgaataacttttggtaattatttgattttagattgatttttgtactttagatttgaaattaatatttttttcctctaaaacatatagattaaggtgttatatttaacttcataaataaacaaagtagaaaaaaataaccatataaaatttgggtttaagaaaaaagagctggtcaacttatgaattcaatcaatttgtccgttactattttttaaactcgaaattcagtcaattcatctgatgttcaatcctaattattgacactttttgttctaaaatgcttcaattaatagtaacactttaaaaattattaaaataacattatgttattatttaatatatattaaataattatgacaaaataataaaaaaaaaaggagaatataaaaaatgttattattaagtattctttttcactttagtggtaagtatttactaaaagatgccaaacataaattcatatcatcaaatattcttaaaagcatttttatttgaaatgttcttagtgagaagaaggatacatatgagttcttttagataaaaaagattgttttttttttttttttttaattttaaaaggaatatgaacaaagagtttgataccaaaaaaacactcaattataagaaagtgtaactaatatgtgtggaagcaaaaaaacaaaaaaattgagatggaacaagatgaaaggaacttttaacaatgatttaaacaaatcatttgtatgaaaaaataattactttttatttaaaaaaaaaaaaacattgcaagtaggcccttttcccacatgctattacaatttctttcttttttgaagagattctatttacataatttaattaatttatttccccaatttgcatattttaaattcaatttctcagatttacaattaaaacaaaataaaaaaacatcggatcccgacaaaaatctaaattaagttttttttttttcttttataaaacacaagtattaaacaagtagagcccacctaagtttttgtttcatgatcaagtggccacaaattcccaagtgaagaaatcttgaatctcaaaacttcaacttacccacatcagatttcacctcattctcctcaaatctcaaagctttttcgagtttagactcaaaaagcaccgatctttgaggagaagaatgaaaatgggtttcacaatgggtctgaatcttcttcttctcttagctatggtggccacaaacatactctcactttaccatctctcttccaatattcaacaaccgaataatctcaacccttcatcaaacccaactcaaaaccaagtccctgattacctaattcaccaacttcaaaccatacgcgccaccataaaccacctcacgcgccaccacaatcaccaccccgaacaacaacactcaaaacccacttcaatgccttcagatctcattctctactctcaactttctcctatagcttcatcttgtcataacaacccagaactactctttacttacatgaattacactcctttcactctctgtccacttggatcggatgatgttgttgaggccctaatcttacgtggttgtcacccacttccacgccgccgttgtttctctaaaaccccacaaaaaccctcttcatcttcactcccacataacccttttccacctaagcttttagatgaagttgttatgtggaaaaagtactcttcttgtaagagttttgattgtttgagtaagctaaatcccaacatgggttttgatatgaacaatgaagtttcaaactttttgagttataagtctgaattagaccttcctgtgcctcaacttcttcagattgctaaggctgctaattcagtcattagacttggtcttgacattggtggtggaacaggtacatttgcagctagaatgaaacttcataacataactgttttaaccacgacattgaatgttgttgctccttacactgaggctgtggcattgagaggtttagtgcctcttcatgtgcctttgcagcaacggtttccaattttcgatggggttgtggatattgtgaggtgtggtagagctattaacaggtggattccttctgcaacacttgaattcttgttgtttgatgttgatagagtgttgaggagtggagggtatttgtggttggatcatttctttagtaaaagtgtggatcttgataaggtttttgcaccattgattgggaaattgggttataggaaagttaaatgggctactgctagtaagactgattcatctggtttgaagaatggtgaggtttacttgactgctctgcttcaaaagccaataccaaaatgagattttttacttctttttttgaggtaatgagctttatatctatctgtatatatatctatatctatatcatttactgttttaattagtttccatatgaattttagttggtggggttggtggtgtagctataatttcagctacttaaagtagatcaatgagtttatgatactcaaaactcagatctttgtgagttactagttaggttgtttagatggtttaatgttggccttttttgtattttgaactcaattgatgtatcatttgagatccaaagaatatacattttaggaagtaaaatcttgaagagagtttatcataatatgttgatccaattcatagtgatgaatttgtatgagaatttattagttttggtgtttgaatagatagtggtatcagatttggtaagcaataaaagatctgatttattgccccagctcataaaaatttcatctttatttttgggtgatatgttctttatagtttcccctcattttgttgggatcttcttagagtttttgaaaacaaaaatgaagcaaaaaccacttatagtttagtttatgcacttgcaaaagtttgagcactgatagtattacgcatcgctgaaaaaaacgagctcctacccaagagggttagctcaaataattaggcacgtggtttgctccgaacaaattctgaggttcgagtcccttttgagtatctacataacaatttctatagtttcctgatcccgaaatattatgtaccactaaaaaaccgagcccctatccaagaggggtagctcaaatggtcaggcacgtggtttgctcccaacaagttttgaggttcgagtccctcctgagtacctacatagcaatttttataatttcttgatcccgaaatattgtagggtttggtaggaatcttagtttcaaaaaaagaaaaaccgagctcctcgccccttcaaagattttaggtactcagaagagactcgaccctcagatcttgcgaaagcaaatctcagatctactaactttttgaccaataacatattcataatcataattaaatcaacaacaactcaacaatgaacatggccctacattatttttacataatgatcttaattaatccattttcttgatcttaaacaatttttttttgtttttttgcaggaagactttacagaaaggattacttctgttcaagatttaaagacttgtcttttctcactttgagaagatggatataataaggctttgaaaatggaataagaaagaaaacatatttatttccattgaaggtgggttatattatactttttctaattggtttattaagattagggggcaaaatttgtggaatagtagatgaacatagttgggataaaaggtgaatttgtaaatccaccaaaagatccaattgaagaaacaaagaaagaaagaagtgataatcttttgttggcatcttgaatgttttgtaagataaaattattattcctttaatttttttttagaaataaaatattgtgaaaaaaagttaagctttaatttgagacaattcttagcaagaaaatggtgaaagttgtatgtgaggttattattttatttcattgcaaaagctttgagtccatgttagaaaagtttagaaggaaaaactcaataaaggtcttgtcatgctaattgcttactccactttgtcttcacatttttctttatacttttacaaaagcttttattatggtaatattactctaatattgaatgtacatcttcatacaaatttttctattagatattgaaaattattgatgcccattgtttctctcattggatgtcttaaagtgtaaatcttagcaattaagttattgactattgaattaaataacaattaacttctttacactaaaaacaattaaattatatatatatatagatatataaatcatatgttcctcgtgtgttatatttgaaatggggccatttttattttttttcttaattttttttaaaaaacagatcatgttcttcaatctagttagtatttagtagcaattgaacttggatgatatatttgttgaaagaaattattattattattatttttaaaagaaacaattataaatagcaatcgatgccatcaaatacacttaaaatttaaga

SEQ ID NO: 19202 - DNA, 3438 bp, Cannabis sativa
  modified_base (3321)..(3347): a, c, t, g, unknown or other
  modified_base (3398)..(3402): a, c, t, g, unknown or other
tggccataggtggccttcaggggtctggccggccatagggactgtgtccctaggatggctggcctatgcctggaactagggttcctggtcggccactaggacttggaatcctggccggccaaggccaaggctcgaagtgggcagctggtttttctccctctttcaacctcagctagggtcttgtggcgaccttagaggcatatacaactgtggccttatgcgtggtttctatttgaaactctgtataaggctaggtaaggagtctattatagtcaattgtagaacataggacttactatatgtcttagtaggtgtacttaagacggtacttggtcgttgatcgaccttgtatcatgtatcctttgttttacctagaaggtaccctttggtacaattgacttgaatatgtttgtagctttgtcacgttgctcacctcccgttatctcttccatgtaggttgtgttgtgagttgaatatgggaggtgacagtcgcgtaggtctcttgtttacctcatacttatggccagaacaaactaggctatgcgtagggtgcctttgtatgaccctcacatggccatggtggtcacaaggggtcaagtgagaatggaggaggagaccactcagccccatgttgatgctaagccagagattgactcaggagacgagagttttgatgcagaattagagctagaggaggttgctctagtgagaaggaggaggtataggacttgctttgttttccctcactgtcccttgggccactgtaatgcccaaggtaatccactgaatgggctcagtaagccttcagagctaagattggaccatgtcctagagcaatctcttgaactggagatactggatgcgaaaccacctagagtgagttaggtttagcctacttctactctttttgataaggccctcagtaaaatcattactagttattttataggggatgttaattgcgagactcctcgtagaagctatcaggcgcacaagcccctccggattggttggcgtggtctgggagccacattgaacatggggtgggtgatgctgcttcactagtttttttggatgttgccgcttactttgagatgtgcccaacacaactcatgtcaaagagcatgtacagggagctaggctggcctccgcctaccccttatgagattgggtattacttgcatctgaagtctgcgccaaagcagagcggtactagatatttttttatttcagccagattgggcacaaatggctgggtgacactaactgcacaaccatgtcaaaggttggtgggtaggccaaaaatacttaattacacaagttcttcatgggatcgggcaccacgatttttggtatgtgccactcttcagacgttccatccctactttgctagtaagggatagagaaattcacatcctttctttattggctgagtaaaaaatcattatccgattgaccagtatggacaatttctggaggtatggcatgtatcctcttactgctagagttgcaagagggccaactttagatggggcctgtcctcgagatgggcaaggccctcgcttggataatgatgaagtacctctatctcgtattgcacgaaatttagagaggagagagaaggctctctagtggcacttggctaccggaggtctagtaagtgatggttatcttcatattgggcctagaggccatgtttctcagagatctacacaccccgtgcctgcatctaggggcaagagcaaggctgtagttgaggactcttatagtccttcttctgatgattatggtatttgatagttaataacatcatgcctttattcttatattgaatgtttgttattgctttttgactatactaccttctttttgtaaacatgtcttccaagttgagaggtcttatagaaggacctttggatgagcctactggatgggtaaaggccaaggtggccaggactttccatggtgaggatgttgtcggaccatcactgcctcttcctccactagggcctgcaccaattggacaacctatgatactacctgccgaccaaggtactcaggggcccagcagaggagcacggtcaggtactggatagaaggctgctgaggtagccaaccagcgcatagagagggctcttcctttcttggatgaggatctgaaggagctgggtgacggtggacctaacaggctctagtctgtcgtgctccaggatctttctctggcgatttatactttcagcttttttcatcttcttggcactatataggctagccagccatgtggcttcttgcatgtggttggccggccttagaagctctttgtgggggctagctggcaatagcagtcctaaggggggactgaccgaccagttttgtggctctgacactgatgttgtttttgctttgttttcaggccctgatgaaactgagctcagcttgtgatggctttaggggatattcatatgcctttcaagagcatgtgaagatattggaggcttcccttgtaacaaaggacaaagccaatttggagctggaaatccttctagcggagagacagaaaatggtttttggcttagcgaccatgcttggcgccaggaatgcagagaacaccgcccatactgccctcatcttccggcttcaaactgaacttgatgatcataaaaagaagttgtaggaggctcttgatggacagtagaccattagggaggagtatgttgacctatcatgcaaacttacctttgaagaccagttgcagaaccctcgagctaaattgtcgtacattggtagtacaactttttggagaaaacgttggcctgtggaaaggcagtgttcaagagttggatggagacagaccaagttgctgcctattgagagggttcatcatcggggacacacgacgaagagttggccgacacacctgtggaggaggtggctgtctaagtcactgaccaccaggctagccagcatggtgatgatgggaccagcctagattctatggatctcgatctctaagctctagattcaactccttctgcccttgcacacttatagaaaacatttttattagtatcatttagcattatatttgtaacgcatagaccatgttttcatgttctgcatagcctatggccttttagctttagaacattacttacttttgtgttccatgtggcatgtggcctttttaaaactttactttcatgtcctatgtggcctgaggccattttaaaacactactttcatgtcctatgtggcttaaggcctttttataaggttactatgttttcagccctagggccttctgttgggttttgtgccctnnnnnnnnnnnnnnnnnnnnnnnnnnnatttactaattaataaagataaaaaattgcattttatgttgcatggttcannnnntttatttcatgattatgcttaatgtataaattctat

SEQ ID NO: 19203 - DNA, 3079 bp, Cannabis sativa
tacatatctctcgttatttgggaccctattcacttctttgggcttctattgaattgagaaattacctctggagacaacacagttgacactgttggaataaaagagacaactgactggaacttgttgaagataactctaagggcatcatactccacatttttcaaaatgtcatcagcaagaacagaaacctgcaaaaggagtaagttacagacttgtgtcatcattacatggactgataatacaaaattttacaacataataagctctgcaaaagaaaaatagttcatcaaagagtattaataaatcaagcgatcaaccagataaaatttactattaacatgtataaagattcaaaggcaacagaatatcaattggctaatgatgagatcaatgattaaagcttaaaatagttaaagtagtttttcagcataatgactaacagaattaacctaagaacacatgaactgataattttaatacatgcaaacagacaagatcgttactcagtcatatcataaatgggacaggatcctgagataccaacctgagtataattaagaggattcttctgcaactcagtcattgtcaggtcaatatgtttctttgagtcacgtatcaattgagcttttgccttctcacccaatacaacatattttgtatgtttctcaggacctgtagtaaataaaaaaaaaaatatatttatattcaactttaatgacattgaatcttcacagacattaaatactaaacaaccagcctgcagatttaccagaattcatcttgaagaaacccttgcttatcctgaccgaggtggaattaattccaccacaaagtcctttgtctgaagatacagttacaataacgttcttcttaacatcaacacctagtataacaccataaattagttagcggaaaaaatactgtagaaagttttaaaagtcaataaaataaaaaagaaaaaaaaaacacataaagaatatacatatataagggggtgattgttatgggatttggattcttgggtatgggaatgtgaaaccaaatctatgtttggtgtatgattttagtggaaggtttatgtttgtgtggttgtatgttagtttatttatggggtaatctcaaactctttgaacacttgagtttgagattccctttatctcaacccctctcaaccatagtccaccaagtaaaacactaacaccaaacacccccacaaataaaagtaaacaaaaagaatcatgatgtatcacagcgatcagagtgtttgcagcttttagtaatacagagacttcttacttgtataaatattattcttcgatgccaaccttcaactcacaaaccaactacttctagaagagcaataaaataaccaacataatcagtcgcaagtttattctactttatgttttttaccccccatgttgcagtctacagtggcttctagatctacccttcattaacatggaactttaaggagtaaaaatatgataccaccgtgttgagaaacatactgggaacatcaccaagaagtgcagtaaaaggctgccataagccacgggaattttcagctttattttgaattgctcgtagctttgaggctgcaaccatcttcattgcctttgtaatcttttggatatttttcacactcttcattcggttcctaactaaataaacaagacatcaaaaagctatcaatacaatatgtgatgttaccatgttttgccaaaataatatcacgatatacacatttcctttaacagaagaccacaagtataccagcccattaccaaaaagaaagcaacgtataagaacaacacttaccaatttgagttgaaatagagcgtactcctccacaaggagcctgctccctgcacacccaaacaaatcaaatatattcattgttagctacatgctactgttattagcttcttatactagaaaaaaaaatgcacaaaatgcagccgcagctgaaatgacaatgcttcaaaacttttcacgtatattttcattcaaacttacgaccaaaataaaataaagatgtaactattcagaccacttaacgttctcaccgcatctcttaaaatggcgagtaaatcaagctaagtaccaaaccatatatttaagtggtttaaatacaatggcgcagaggtttaaaacacaagactccgcaaaagaattagaatttcaaagatttcacaaagcacaactatgcttgatgccaccgtatatcttaatcaaagcagtagccgcgaaccaaaaaccaaacccaaagaacgcccaaattcaaatcgttcaaaaaacatccattcattggtttatgttatggatgcatcaatttaaaattatatatgctgcgtgcatttttgtgtttaccaataaatagaggaccaccccacactcacacacacacacacacaaaaaaaagtctttgactattattcattaaaaagaaatttgaacattgttattcccttacccaaccttctcggaaaccaaatagtgaaacgataataagatttgacagaaataaaaatcatactcagcaatgagagaggatcggagggcggcggcggcagagatcggatttggggaggtcagaggggagagatagcgcctcccctctcgtctcagagctgccatggccattggtacagatcgataaggaagatcgtgaaaaccctagaaattggaagcttggatcggaaacccttttcttacgagtgattagagctcaatgacggagagagatgtgagcgtggcctttgggttaatgggaaattggttttggcaaggacgagaattgattcgtacaaggtcaaaaatgaaatgacgtcgtattgtattttctttctttctttctttcttttagggtttttgtttgggataattgcagcaagtactcaaaaatttgaggttaatgcagattagtctcaatctcaaaaattggcggtgaaaatactcaaggttgacaaagttgtttgtccattcatacacaatcgttagtataagtaacgtgacacgtggacgccccagatttaatccctttttaacctttttttttttgaaaataaaggaagct

SEQ ID NO: 19204 - DNA, 1767 bp, Cannabis sativa
ttctatgatactcaaaagtaagaaatacatattcaaatgtatgatgtgttagggatttactttagcttttgtagcatcaactagattgtactgcaggacaactaactaatatatattgtgcttatattgcctgagttatttgagtgaagattctaatgtattgtttttctttttagcttttcttccccacatttggccatgatccttgttgataaagatgtttgggatagtgaagctggtctaacattccataagttgctgcggcagctaaggcaaacctgtgctacagaatcccttacaaaccctccaaagatatttctattgactacctcaattagcactagcgaacgcaatgcgctcaaatctgccggtggggtggataatgttctgacaaagccacttagattaagtgttttaattgcctgcttgcaagatgcccttgcaaatggtaagaagaggctcatgaaccaaaagaaaaaattacctcttggaacattattgagaggaaggaaaattttggtggtggatgacaacatggtgaatagaagagtagcggaaggtgctctaaagaaatatggagctattgttacctgtgtggattgtgggaaagctgctttagaaaagcttgaaccacctcacagcttcgatgcttgcttcatggatctccaaatgcctgaaatggatgggtaatcaatctgctcgttcttttgatatatagtctttgtacatgaaggatctcaagtaataatgaaaaataagagatcagggcccagagttaacgaaaggcctcgtatcatttattaatattctaatggctcatttaattacacaggtttacagcaactcggaaaattcgcctcaaggaaagcaatgtaaacgagaaaatagcatctggagaagcatcaagcgagatgtttggaaatgtgactcattggcacactcctatcttggctatgactgctgatgtatttcaagcttcaaatgaagaatgtatgaagtgtggaatggatggttatgtgtcgaagccgtttgaagaagatcagctttactcagcagtggcacgcttctttgagtcgggttgatagagagtaaagagtgaaaataacactaatttgtttgtccattccattgtggttctgccaagcagttgatctacgcgtcactatgcttggctcgagcagttggagctttatgtctctgcaactaagtaggctaactgcaatttgctggaggacctaatcctgtcacaccttgttttaacaactacggtaactagtactcattgtcactgtatttggcttagttgatatctcatttttttcataatctccctctctttgttgtcacagcctggaatctcttaaactcatttggaccgggatgttttttttgttcattttccaggaaattaggtttgttatgaccaatcagattcaagtgtgctcagaggtacggctgaagtccatcgaagacttggcttctaaggtttccatcccttctacaatgtcacggcggctgttgaagggagttagagaaatggcttcttttgtacataagtcacaattcttttagttacttaactgtaaatggtgtcctggtggtacactttttcttttcttctccctccatagaaactggctgtaaagttaaaatgttgtaatgccagaagtatccattttttgaactctgctcaaaataaataatctctcatctttctcaggcttagtactgggatgccaagtggaattcttggagggtgtaagattg

SEQ ID NO: 19205 - DNA, 3096 bp, Cannabis sativa
caaattataaaatttgggtaattttgtcacaattaaccctgttagataaaattagactttgtattacaaattacaataaaggttgtgcagggttccaccttttaattcttgaaacaagcaaatcagcaagaaatagcaccaggcttcaaaagaatgtgaggtctaagtacagcaggaatagaatacatctaaaaactccattgtcgaatcaatccactcaacccacttttaccaaaatccacctcatccatgttgacaaacaatgctgagaaagatgttctggtagatcgacctaccacaagacaaggaacaatatttagatactcaaaaagtaaaatgagcttttctggcattttggttgggataaaataaaacaatattaaaccagaagagaaatatcttaacctaataacaataaatgaaaaatgcagagcatatgaaggcctagaaaagagattgtgaagaaaaagatcactctaatctgtgcattgtcaaatgttaagagaataatgaatatcattaacaaattagacaactcataataaaaatgaacgctgcagattaaaacttgaaaactatattaagccaagctactttactatgactttgcctttgatagaagagtcgaaatatttgcaataatctaaacagtagttctaagagtaaagagaactaaaattatgcttaacttacaatgctccatgatgtagagtactcatcagtcgaaagaaaaaaagtttcactgttagattgtagatccaacccatcattcgtagtattgaaatcaagaaactcattatcatatttattgtcacggtcaagtttcctcctctttttcttactactttttctcctgtgcttggatttttttgacactccatggtccaagtcagaggcacattcttcagatactccatcatcatttagtaaagtatatgaattagatctgcgaaaacttattgcatttttcgtgaagaatgactcccaagactcaaccgtctggcgtccctctaaaagcctgcaataaaaggcccatgactgaagcaccagccatttaaatgcttctactgtcttcagtttgaagcacccttttatgattgttgccaagctattttcttgatcagggatagcaaaaatttgggacactatatctttggtttctgcttctgcttcctcatcacctccatcacttaaaaggcgtagaagctcacgtcttttagtcagcagcgcatttaataataatatctgatcaaaagacccaaaatcactgcacttggaaagaattatctcaaacatacacgacgagttacctaaatccttatgctccatactaggttgaagatatctttgaagcaatttcagaaattcatacaagtcctgctcttcaagagtaataagaaggtgctgacacaggtaagagaaagattcctctgttaggaactcggtgatggcattccatacatctcttgacttttccttatacatcatatcaataaaataatctcgaaagaagtttctatcaatgaacaaaatctcaccatcttttagtgactcagcaaactcactcgatgaccagaattcaggaacattttgaagaaaattctccacagttctttgaacatccaaatcaagaaagtaatggggctttgtcgcaaccactgctggtgattgcccatgttttcccttccactcaagttcctcccaacatatatctcgatttatgaaagcaaacttggataatgccttagcaccttttccatgctctattccgccaccagttgcaccaaaattagagaaccacttaaatattcgtgttgggtggcctgtaaccaaatattataccatgatcagaattctacaggatccacaagaactggagcagtctgcaaaaatcctatatatgagccatgtattcactattcattaataggaaaatgaaattaagaaccacaatgatcattcaaagttatgcaagcatcaaacacataaaacattgaattgctcgcagaagacatataagtatcagagattacttgagtgcaggataaaattaaactaaaggacttaaagttaaactcagaattgaaaaccatcaggaaggaaagactatttcaacacagcataacccaaatctaattagaacttcacttgccttcaaagaatttctctagtatgtaacttttcttggatatgagataccctgctttttgtggcatcttgtcgaatatcatttcaaggagctgagatgctaaactatactttattggcttagacctcagtaagtccataaacatctcacattgatggcggcaggcaatggtacttatgccagaaatcgtcttacaaagccatagccgagcttccgatcgacctttagatatcaagaaggactgaaccacagactccaacttacttaagagagatattctaagcttggtagagtcataagctccaacatcattccaattgggttccgtcaagaacaaatgaaccattgtaagtctggaatatgaagagtttctcaaaaccttaacaagatcctggacaataaagccatgaccaatttgattaaacagacactatatataagacaatgaatatcagaatttaaaattttgggatttaaagaagagccgttgacatcatagacaagcaagcttcgagctttagaaaaccaacaaatgtaaagtactaaggcaagcgttttcatcgtcacattgctaaagctatgaagggtccattggacacagcacgttttctcttaattgttttaataaacatgtttggagaagaaacgaataatcatcaatcctccaggattactcaaaaaatatgaacaataaacagtaatatagaatacctggcagcgatgaagggtagagaacagccctagagagttggctggagagagagagaagttaggggtttcaagggtttgtcagtgaatttgataaagaagcaaaatgaagagattcaagagaaagcagtgtgtgctagtaatcaaggctgaagaatgaagaagaggaaaggatggagaattagcagctaaagtattagtcaatattttcgcattcaataaaataaacaaacaaaaaa

SEQ ID NO: 19206 - DNA, 2844 bp, Cannabis sativa
gtagtgttgtgtctctttcccaagattccaatgtttcagtcagagagattgaatatctttgacactggatttagtgagattagttacgactatgttggacacgtataactcaattcatcaggaaagtagcatttttggctccctttaggacttgacatgtgatcacaacatgctaatttgagtcccctacttaaataatgggatcataacattcatataattataaataagcacaaattaaaaacacttctaataaatctcagcattaattcagttggtatttcttttttcttcttttcaaagatattgataatgacttgaattatacatcactagtagaatttctaattctcgaatctaaaacttataatgaccaaattacccatgtacaacagttgtacgagtaattctcgaaaagctcattagatattacagcagcaaacaacacgtgaatcttcttgtaaactccaaactcccttactcttttttatccttacattcctcacttttccgcattgcaatctaaagaaagatttttactttctttgtagttttttaaatttaaaaattgaaaaaaaaaaaagagtaaaataaagaaaaaggagggaaagagattttcctcttcctcactaccaaatcaagcgcacccgcgaggggaaaacccgacccgagaacccgccaagtcatacacaacccgaaaaccttgctgctggatatttccgatgatggacaatccacccattgtcccggcgaaggcgaaacagaacgtcccactactgtcaaccggaatcaagtagttcgccgccggcaatgacacatcagctcccctgaaatggagcaccaccgtcggaaccttaacctccgatttcccagacaaatcgaagcaagtatcgaagagagagaactcgggagcacgcttcaagttaggcgctccactacggaaagcgtcacggagagcaatgtaagcgggtcgggtcaagcgagtcactgacgtacctgagtcaattatgacacctccgttaccggctccatcgagctggaagagtgaggcggagatgcctcggacacgtgtcccgcccacgctgattcctaggagctcgaggtagtagaacgtgtccaacttcgggttggagagcaaaggggtgaaccgggcggtgcgggaaacggccgcttcaccaaagacgatggaagaagattgtttggacgaggctgaccggtccaccaagcagtaagagaatttccggttgaacctgtaacctgtctgagaagggaacgacaacctccctcgccccaggcccaaaagtccagcagcacccacgaacaaaccctcgtcgtcgtggccacaacccagagctacacgcgccacgcgcgtgcgcctgaacgtcaaagtttcggtggagaactctcccgtggtgaaggagccgtcgccgtaggatacctggtagaggcaggactttcgttgattgcaacctggggaatcgagcttgcggcagagcggagatccgcatgcgatccgaccatatgtggtggatttaaccgggtcgaatatcgggtcagcctgtgtgtagcatttcttacacggggaacactggagccaaacgacgtcgcttccagtatccagaaccatataaaggtacctgggaggcgtacccactccgagccgagtgaaatactcaccgctcccttgtgttagccccgagatgatggagctgctgaacccggatccggatccagatcctgccccgactccacttccgttccttgctgcgactaacgaggcaagagacctgacccgggttgcatcgcggtggagcctgaggtggaatagctgctccggggtcaggtcagtggtcaaagcgtcgatgtgatgtaactgaagggtggtttcggattcggattctgggtccggatccgaagccgttaactcggtttcgggccatgagagcgttggcggagttgagagggtgtttacgagcaaggtctggtagtgtgttgagtcagtgagagcagaggagaaagctacgaaaatggcggtggtgaaggaaaagaagagaagggcatttctcgctttcccttgcattgtagagagagaaagcgaaatttatggcagaagccagaggagatgacagagattataaataagtaaaataagaaggcggtcctcaatcttaaagtgttatcagtttatttatttatttattttttttaggaagggaggataacagttattcattcacccttcttttgttcaaatatttttttgagtaaacaaaattaataaaaataataatactttcttttcttttgtttgtttggctctgctctgttagtcactttctttcttctttattgggttttgatttttatttgtcctcttcacactcgtcagtgggtttacagtttttcaggctcattatttttgagataccttttaaattggacccactcttgtctaattttgcttaatctttacaaaataaaccttatatttgtactgaaattatgatagagtagttatcattgtgatgtggataaatatattgttggtttattttatttttgttaactttagatgcatgcatgcctcgctacttatattaaggcagttattgctttgtgaggtgtggttagatcaaactaacattcattttggttttaaataggatgacaaatgtcctaattttacttggttttgctggtgaaaagttgggtttgtattgattgtttttattcaatgttttacacctacaattttagcatggggaaatgtattaattgttttgagtcgtcctaattgtatgcttgctttagtttacatggtaaattaaatagttgtgtgaattt

SEQ ID NO: 19207 - DNA, 2411 bp, Cannabis sativa
ataagcattaaactttactagatttactaaatacttttatccttccttctgttctttcagctgacagcccttttgcatggacactcgtattcagcacatgctcttggatgtacagcagcaaccaaagccataagatggtttaaagatcctcagacaaacaaaaatttgaattctgaaggaagttcgctcaaggaggtacatgtaaaactttgttttctgtattgttatgagtatgcacgttaccaattcattagattaggcctacaactccaagaggcaggttgtttaaatttcttgatttagttataagtatgtaaagttacacaatcatttgattaggcctccaagaggcagaagcttaggaattgttgcatctctagtcataaagagctatccatagtttccccggcgttttagctgttaggtgtaaatgtggcattgctctatagtgtctttttagactctagcggtgttagcttcaagcgatcgaacatacagccaagagtccaaaaataaaaacaaatccgggggcttgtcatgtttcctaatgatgtttaacgaaacactgccgagcctcctgatgttttattatgtcctaattgtttgtagatgtgggataaagagctagtatataagctttcatcacatccagcagttcagagagtggttgcattgggaaccattttcgccttggaactccgagcagaaggttctaatgccgggtacgtcactcatcactactttagttgctatggtcaccttttccttcattccaaagattggatttttgagaggtatttgaatctgtgtaggtatgcatccatttatgcaagatcacttcttaagaagctcagggaagaagacgacctctacatgaggcctttgggtaatgtcttatatctcatgtgtggaccatgcacatctactcaaatctgtacccaagtactcttcaagctttacaaaaggcttgatgaatttagcaaaaatcagtgaaaaaaaataaacttaaagcttaattttactgtaacacagaaaatataatacttgttattttttagagaagttattattaaccataacaaggtttcttattcttataaatgcataattgaactttttaataaatgaatatttatatgtaactagtcattaaaagttagtaactttatcctcataaaagaaaattatatatttattttaattcaaactctataagatcttgattatatttttttataagtaatttgcggtataaatattaagtttaatttttagcggtagtaatatttaaagttatatttttggaactttgtagatatgtaacagttaaatgtcaatttattatttacgtgttatttttttattagtatattaaaattaatttttttaaaaaataaaaatttatgacatgcaccaattatgaaatgttacatgataatttatttaatatttaacaggtatttgtagaagtttcagaattaaaatctaagtattattatcactaaaaattaaacttgagtatttacttttaaacttaagtatttatattgcttattattttatttatttattaagacactagtggttagcactataaaattcattactcttaacctttataatggtaaatctccagcttgtataccttattgtagatgtgagatgaagtgggagtttctgttaaaacgtctctttttaattaataacaataatataaatcatattttatagtttatattaaattttactcttgcttagaatttctctcaaagtatgtgacactttaagagtaagtcatataacatggaaccctcactacaagacatgttatattaaattgcattcggagtttaatacttcgtaggagttttagaagattagtcacatctagaaggatccattaagaggatagtagttttgtctcttctcctagagtgaactcaactcagagaagagatagagggatgtacagagcatatcgtactgctccaagctaaattactatacacgcatttaatgtggcatgggaaaaaacattctactccttactctgaaaaaatgtgttcaagtatttaaactcataattccctaattttacgatgcctcatatagtatgtatgcatcatttgaggactacaatatgatctatcaaatcaacggtaagagataagtttagtatcaccaatcacctatattaaacccagacacatcatgaagaataggcaataatactctataatcaagtttgaaaaattgtacaatttatacaaacacgataatagcggccaacacttatctttatattatcaatagtaattacaaaacacgtgaaagagaaattaagtgcattgcacactgttttagtcttgcttttaaaataaggagataataaaaatgtttttgtagttttc

SEQ ID NO: 19208 - DNA, 3693 bp, Cannabis sativa
  modified_base (650)..(652): a, c, t, g, unknown or other
tcaaattacgtttactctctaactcgaatttacgcttccattcagcagcctcagcttgagcagcagcttttccttcagcagatcgtctcaaggcctttgcaacagctacatagggattttcaatacaacatttgcatcttatacttagtctatgtccaaaattcagttcaaattaatcaaaagttacaaacaaaaatcttcttacttctcaaagcttcagagaattctctaaggtgatcatcagatcccataactggattctgctgaataagttcctgtactgccttttctgagttcagaagcgaaattgaattgaaaaaaccactctcaggttgtgaggatgaaacacttgcatcatcctgaacaaagtttcaacaacattcccttataagctaatatagttatatcgtcaaacacaataaatgcattccagaatacccagacaataatgcaaatttggtactcaaattaaattatcatattacctaaacacaacaagttactctcacaaattatagtctcacaaagctaaagcagccattagagaatagaactcacacccttaattttaagaaatcaaaactgaacactgaagatacaagtacaaaaatttcagcaacataaacatatacatgtatatatatatatannnagagagagagagagagaggaggtgaaattacattggaattgagtttgctgggagccatggctggaactgaaattggatcctttgatttcttctgaaaagtctttcagaagtatatgatatgactagtgcataccatttccggtaaaaagatttgcttacttataggaagagagaatagggagagaaagtaaataaataatggttggaacttggaacttgggactcaatttcagaagagaagatatgggggcgtggaccccacaccccaaagcaaacgcgtggcgagtcaaggcaagttttggtatagggctagaatatgtatcatctctctcttggagtctcagtcaactaaccaaaccaaccacccaaacaaacaactatttcccttttaagttatctgctgcttcatcgaccacctggtccttcacttcagttacgtcttagttgacttttacaacacgtgtcaatatgacacaggtcggagttgttgcggattcaattttctgttttttaattaatccgtaatcttggaggacctgtcaaatctcactctctttgacaaatgcatttcttttatcctttcaatttcatgattttactgtcaaaattattattatttaatttttttagaagatttatcgttgttttttttttaaatgttctttttcctattctagggcatgtataaagaattttgacaaaaaaaaaatggaaataataatttttatataaattttattagaaaaaaatgaaaactagctccgttaattactgtaactctttaaacaataaaacaattgcagtacatgactcaaatttgtaaagagtgatcgtattttgcttttggtttatggttggtatttacaatcaaattaaacaattattttgatttgattttttataatttcaaaatgtgaatttgaataatccaaacggattttttaaaatttatatatctcttttctaaaaaatgtggttatttaataaaaattataattaaaccattcttttaattttttattaaaaatgtctatttcacgaaaatagttagttaaatagttgttttttaattttttcttaaaataaatggttaaaattcaattaattttttttaattaaatttctaaatatctaaatataatttatttattgcaatataatttaaataattatttaaaagtatcaaaaaatttaataattattttttatataaattttaatttaaatttaaattagacgttaattcaaaatttattagttatatatttaaaattctaaatttatttatttatttattttatagtttaataaaattaattacatatagtttcttataaataaatttaaaattaaattaaattttatatatttaaaaatataattaattgtattgaatttaatttttattattattatttaaaaattaataattaataaataataattctaatataacgttaatcaagcatgcctagtatatatatatagatataatttaaaaattatatatatattatttgtgaagttatcccatcccatatgataggagtaaaattgaatattctattatctcttttacttttttaaaaaatattatttgaacaagatcatttttggattggggttttagaattttaagatctattttataagtggaattaattgaagaaaaaggggtccatgtgattataccgataatcaagaaaataaataaaaaaagactaaaaacatgtgaaaaagaataaacaaagaatcactcaagtatatataaataagtatttcgtcatcaacgacgtggccgatggatttaacggtctacactctatgcaatcgatttaaggccggacagacaacacgaaggtaatcattgacaaataatatttctccaaaacctatttagcgaaaaaatgttggacaaaataaaaaattgtttttatttacttatattcaacattatcgataaataaattagtaataatatttttatttttacggtcaatttgcataacaacataatttttttttttctgataaataaaaacagaattattttatatattattttttaactttttaatgtacgattttttattgtaaattaagagtgtaaaaaaaaaaaaaaattcccaaaaaaattacatcccatattttataaaaaaattgtggaaataataaaatatcattgaaaataaaattaaaaattatctattttcaataaaaagaagacgcttttttaaacagttacttttgtcgtattacaaaaactcactactttctttgacttttataactggttttgttgaccagccatgaatttttgacatactcgattataggacttactttaccatcctataataaaattatgtacaattattataagtggctaaacgagtaaagactttttcaacaaatgtacctcaattatatgttttcttaggttaatatactaaatttggacaaaagatgattaagttagtgggttgttggggaaagaagttgagttgatgatacaattttttttttattattttatattttagtttatcttgaataaactatataaatacaattttaaactaatgataaaagaacaaaaaaaaaaaaaattaaaacctaatgatagaaatattatttcttatgttgtatacatattgcaactagcaatgttattttgtttcccatcaaattacatacttatggattttgaggcattcaaacctataggaatttttgccaaacattgtttatctttaaaattgctctgtgactttgtaatcgtctactatcagttttttctttgtttttccttgttttctacctactcacgcctccttttttcttccataccttgtttctctcctatctcaggcgtacttctttcctgcttcattttgactgttttttctctgctatggagcccttccttattgatgtttcatgtaaagaccgtttagctttaatttggaaattagcagataattagggttctattatgaaaatcatttattaatattaaattaattatttatgatgattta

SEQ ID NO: 19209 - DNA, 5365 bp, Cannabis sativa
caattacattagtaattagtaattgataaaaagagtacataaaaatataaatatttattgtagtgtaaatttaactcatgctatagttttagaatatattttgcgattgtgcctctaatacacaatattaaattaagacgcaaattgacataaattatcacttatgacaattaataaattaaatatactttttttaaaaaatgacaaaattataattaaaaaaaatatattaaaaacacttattaatattaaatggtaatataataaataaaaagatgtacattatttttgtgtaagttttagcatgtatcaaatttgctatattttcagcacactaattaaaaaatatattttttttacaaaaatatcaaaatataatattacacgacttatttaatgctctattaaatatgtttttacacactacgattaaagtaaaatattataaggataagctaaagtatgtatagagaattactaaaatagtaatattagtgtctagcactctcctcggtattataccgcgtgtgattaaatatcaaatcacatatagcttaagaaaataacttttaaaaaatatcattaactaactaattgtaaagtgccaactataaaagttattgggtatcactgctacggaataacaatgctcctactatatacacactacatttatagtattccattatagatgctattatatttttttacactatgttttttttttcctttctatttactattcactggttggtggtggttcccagctcttctcttttaccccttacctttatttattatgattaatttttcccattaaataattttttcccagcaatgaatagagatggtggacaaatttaatgcaaagatttaggcatgcaacggtaacatttcagtttgcaagttccttaaggggtatatttggtaatatacaaaagttaacggaactttctgttcatgtaaataaaataaagaaaaaagaaatagtttttatctgtctttttctttctctttactttcaactttttttctttctctgatcacagaaattaaacttaaaagaaaaaaaaaagcagagcttatttagtgggcggcaagtcctaatttttaagcttgtgttcacactagactgactagactagtgtttgtgtgtttctctctctctctctctcatacacttttttctttcactttttttgttgttgatacttttagatttggttactgtactaagaaaagaaaagctctgaatctgtatctatcttagctctattctgttctttgattcatttacttgatacccttttgggtatatttagtgaaaaaagataagcaatggcagctcctaaaccagaagaggttattcatccaccaatggatcagcttcaaggtttggagtattgtattgactcaaatccatcatggggtatgtttgtttttgatgaaagttatggagttttgatggttttttgtttgttgctaataaaaatgtgatctttattttgttttgtgaaaattaggggaggctgtttttctgggttttcagcactatattttggctttgggaactgcagttatgatcccttcttttcttgttccttacatgggtggtaatgatgtgagttaatattattcccttttaagttttaaagttaagttttagagtaatttgtggtgtaaaatatgtaagtttaactctctcggttgcatatcaatactttaaacttaggtatttatctgcaaccgagagttaaagttgggtatttatgctgcaaattactctttttaagttttatgtatcgaaattgaaacttggttaatgatttgagcagggtgataaagtgagagtagtgcaaactctactgtttgtagaaggaattaatacacttcttcaaactctatttggaactagattgcctactgttattggaggatcatatgcattcatggtacctattatatctatcattcatgattcatcattggctagtattgaggaccctcatattgtaagtattctttcccttttccttgatcaatactaaagtattctttttgttgtagtaattctttgctatgctatctatgtgttctaaggaagctaaattttctagtacattttgtagtaagtaaaatttttggtatacttgaataaggcatttccttttccttgatcactaatactatgtttttgtagtaattaattcttagctatgctatctatgttgtaaggaagcgaacttacttttctagtgtattattttattctagagatttctcaacacaatgagagcagtacaaggtgctttgatagtagcttcaagcatccaaattatccttggatatagtcagatttgggctatctgttccaggtaagattttatctatcttgaaattacatgggtggtaagttttggtttttgtttggttgatgaatgtgggcatattataatctgtctacagattctttagtccgcttggaatggcccccgtgattgcattgacgggttttggtttgttcgatagagggttcccagtggttagtagcgaatacttaacaaaatactccttcacattacttctcaattagtgcttaaatttatgtcttaaggcttcttatattggtttctcttaattcctttcaggttggaaggtgtgtggaaatcggtatccccatgcttctcctatttgtagctttctctcaggtgcgcttatttcacttgtcacgcgtatattgtttagtttgtgttacagagtcgcacattgaagatgtgtcggttatttcacttgttgtcgcgcgtatattgttcagtttgtgttacagagtcccacattgacaatatgttggacatgagcatacttttctcattgccaattgattttgagattgaatcccatttctaaccatttggttttgctgtcaatacattacagtatttgaagaactttcacgtgagagatctaccattactcgaaagattcgcctttcttatatcgatcatagtgatatgggcatatgcacacctcttgacagctagtggtgcatacaaacatcatcccgaactaacccaactcaactgcagaactgaccgagcgaatctaatttcttcagcgccatggttagtagtagagacgtgacattcgaaaatagcctcttttcggtgaatacctatgtttgacattttcattttcaggataaagataccataccctcttcaatggggagctcctacatttgatgctggtcatgcttttggaatgatggctgctgttctagtctcattagttgaggtagttaataactaaaagttcacaaatgtagtaaagaagaatactttttggaggcaataatgactaataatctttgttttgacagtcaaccggagcatacaaagctgcatcgcgtctagcaagtgccacaccgccaccagctcatgtccttagccgcggtattggctggcaaggaataggaatccttcttaacggtctctttgggacgttgactggctcatcggtctctatgtgagcatgactaattctttcctttatttttaagacttgtataatgcaattgagactaattctttcggtaaaacaacagagaaaatgtaggccttcttggaagtactcgtgttggaagtcgcagggttattcaaatctcagccgggtttatgatatttttctcaatgctcggttagtcctcgtgcaaaaaaaggtcttgaatttacatttctgatgacgcctttctaacttcatgtgtacattacattgtccatctatggcaggaaaatttggagcattgtttgcatcaataccgttcaccatgtttgctgctgcttactgtgttttgttcggtcttgttggtacgtagaaaaagctatttcccgcttctttcccgtctcagcttgatgaatttgaactaacttgctgttttgtttttgtcactctcatccagcttcggtagggctatcgtttttacaattcacaaacatgaactcgatgaggaaccttttcatcacaggcgtttctctcttcttagggctgtctattcccgagtacttcagggaatacactgcaaaggctcttcacggcccttctcacacacgagctggatgggtgagaacaaacatctctttctttcgagtactttcctttttctcatcgatggttcgaaattaagttgttgtattgtgttgtgttgtgtttgtcaaatgcagtggaatgatttcctcaacaccatcttcttctcatcaccaactgtggctttgatcgtttcggttttcttagacaacacacttgattacaaggacggagctagagataggggaatgccatggtgggataagttcagaacgtttaaaggagacagccgaaatgaagagttttacactctcccattcaacctcaacagattcttccctccatcttaaaatggctcagctcaaactccatagagaaaaagatgtttagagagattggaaaagcatcatttccctcttttatttgtatatctattaactcggattatccgggtttaatccaataaatttaattaacttgttgtgaaacttgtccactaagtcatcagcaacaaaaaatgtatctccaagctgtgtgaacaagtttccgaaactcgttcttggcgccatgaagcaatccaatctcgcttcgaatgctgctgcagaaaccagcaacatgaaatgatgatgatactaattgatcttagttaattaagagttaaaggatgatgatgatgactaaggtagaatactagctagctagatgttcttaattaagaaactcatttcctcaatgttttattatttttgtatacatatatatatttatttcttgatgagacaaatttaattgatgtcgttttgattttgccaaattgtactgtttcttctaaatggcatattaattggtaattgatgttgaaaccaaaaccattgaatgtaaaacaattgacaaaatggacttcaaattacaattctgtcacccaaatccaaaatcctaacaaaaaaaacagccaaaaacctgagcttcggcagccaaaaaagcgccactaaaggtcgagttctgcaggcacaaaatgccaagcaaagatctgattgagtagttgatgatggactgaatcatgaaaggcgagaggctttcataaagacgcatgagaaaggaagggtcgagagagcgagaggctttcataaagacgcatgagaaaggaagggtcgagagagcacgatcttcccaactcagctaagctaatatatgctgcataagagggtgatatgttggccttattgtgtctctatcaacaattcaacttcatgaactgtgttgctgcttatggagatcaaag

SEQ ID NO: 19210 - DNA, 2365 bp, Cannabis sativa
aacatatgttgttttgtacttgtagctattccttatgaaaagaggaggagaagagatatatgtggggccattaggtcgacattcttgccatctagtcaactattttgaggtatgatgagtagaattacataatttttttatctcaactttcaatagctatcttccttccttgcttatatggatacaaatatgttgttttatcaaggctattgaaggtgttagcaaaatcaaagatggttataatcctgcaacttggatgttagaagtttcgagttctgcccaagaaatagctttgggagttgattttaataaaatttacaagagttctgaactatacaggttagttagttttatcaagactgtttattgtaatttgctagagaaaagaaaaaagactaattaagctatatattttcattgttgttaacaaactttcaggagtaacaaacaacttatcaaagagttaagcacacctgctcctgattcaaatgatctttacttccctactcaatactctcgctcattttacactcaatgcattgcttgcttatggaaacaacggttgtcttactggagaaacccaccttatactgctgttagattcatgtttaccgctttcataggcttgatgtttggaacaatgttctgggacttgggatctaaaaagtaagtcttaaagttcaaagaaataattagttgtcttgtgtataatgtcatcttctaaatataatcctctgcttttacaggtcaagacaacaagatatcttaaattcaatgggatcaatgtacgctgcagtgttctttattggggtccaaaatgcttcatctgtacaaccagtagtgtccattgaaagaactgtcttttacagagaaagagctgctggaatgtactcatgttttccctactcattcggacaggtaaatctttttacatatttttggaagggtaatctgtgaaacctccatatgttttaatgtctatttttacacttaaacttcattttttttggagcaatactccattaactttatttttgtcagttaaagtcaaccattaaatgtcaacaggaattgtcactctatatacgtatacctagatgtaaagagtggcaattcaattgagatttaaggtaggatttaattaactgacgcttcaaatttgcaaacagaaacaaagttaagaggtattgagacacaaaaaaaaaagatcaggattaattgtataaaattaaaacaaattattactactactaaattgtggtccttatgtcccgtactattacaattgagcctcaaagttttctatttttcaggtggtagtggagattccatacattttcattcaagcatcagtatattgcttgatagtatatgcaatgattggatttgaatggactgctgcaaagtttttctggtatctatttttcacattctttgctatgctctacttcactttctacggcatgatgactgtgggagtcactcccaaccatcacattgcttccattgtttcttctgccttctatggattatggaatatcttcgccggcttcgtcgtccctcgcaccgtaagaataattcacatacctataaatttcttcatttaaatcatgtcgtttaatcacaagaagtaattgaataataattaagtgaataatttttgaagtgagaagtactaatatgtaatattgtaatgttaaattacagaggataccaatatggtggaggtggtactactggggttgtccagttgcatggactctgtacggactagtggcatcacagtatggagatttaagcgaagacatcattgttgagacaggtgagtctgtggaacagtttctccgacgcttttttggattcagacatgatttcttggaatttgttgcactcgccaatgtcgcctttgctgtcctctttgcaatcatctttgccttttctattaagctcttcaatttccaaagccgataattttattttttatttttttacttgtttaatttccgcttatcattttaatgtatttttcaaattgtaacccataattatgtatatttttttttatgttatttttattaataattcaacagcctttgttttcctttttattgatttcaatcatacaaatatacaaatagtatttatttatcaaaactcaaaacttaggttaagatttggtagctataaaaatatgataaattgcaccaatcactcacatatgaataatgtagtacaaaacatacacacataagtttttttttttacatttcaatcacacaagtttctttgttttatttaattgaaattttttaatttttacgcttttaatttttttatttacaaaaaataataaattatttttttt

SEQ ID NO: 19211 - DNA, 2190 bp, Cannabis sativa
ataacttcatcatttctgacactatgatttaattaacaaggatacaaatgataattagccatctttaccttgtctggtcgattctgggtcgttgatttttggtgataatgaatcttagttttggttgagtgtgagttgtaatgagaatttggagtttacattgttgtgggggtggttatagtaacttgataagtacatgcagattagtcatattttcaatttgataggtgttacaggtcagtagcaacaggttaccaatgaaactggtttccattagaaaatggtatgttcaatagatttaatgaatcttatgtataaattctacctaaaaaaaaaatatgttgagcttataagagctaacctttgcttctccctttcagattccagatattgagagatctcgtacctcacagtgaccaaaaaagagacacggcttcatttctactagaggtatttttttcgtgtacaataagctataacatagctgttagtgttcataaaatcattatactctttgacataattgattgactatttggttttgtgtgcaggtgattgagtatgttcaatttttacaggaaaaggtacacaagtttgagggttcataccaaggatggagtgcagagcccacaaagttgataccttgggtagatttctaatttgtatcttttatacattgttctattcgaatgtttgctaacatgcttgcttgaatgatcattggaatttgtagacttagttctttgcaaatacatgagcttagcatctttttattcattaaaaataaatggtgtattcattaatttcgatcctcatttttataatatagtgcattttcagccagtaaaatttgctttgattttcatctgacatgacaactttcttaattgaatggtagaatttataattatgaggcaaacaattgcagaatttccatttaagcatttcccctaaaattgttaattgggctataatgtcatgggcttaatttataactgttgcaactgttagtttgatagatcatatgttgtaatggggtttgtttggaagagttaactgactgctcaaaatacttatgagtgtaccttgtttatttcttgcataacacagagaaacagtcattggcgtgttcagaattttgttggtcatcctcctcaaaacataaaaaatggaccagcagcagcatttccgggaaaatttgatgagagtcacatctcaatctccccaactatgctcacaagtccacaaaatttggtggagtcggatcctagcagggatgttgcttgcaagaccttggatcgtcagccagaggcagcaaacaagggagtttctctaccaatacctacattagcctgtatgtctacacgcacaagtgatggtatgctgacacagcctcttcagataccagtagaatcacaatcaactcagtgtcctacaacaagcgatgggcagaaccaaccagatgaatttatggttgaaggggggacaattagtgtcacaagtgcttactctcaagggtgggtgtgtcttttacaaactcagtttcttggtcggtatatagagaaagatgaattactcaatcttatgagatatttagagaactagttttatgttatgtcaagtttgcagacatttagtcttttgaatggttctaaacaggttgttaaacactctggcccaagcgttgcagaacgcaggtttagacctgtcacaggccagcatctcagtgcaaattgatcttggcaagcgtgctaacaaattactatcttctgggacatctgtttccaaggtatatataggcctttgagcattgattttcttattgcacctctctttaaattatccaatgcgtttattatggcttaagtagtattgtcattttgggtcttcattccaggattatgaaaatgtcccctctagcaatcaaactattgggcatcgtagagatgcaggtgttggggaagattcagatcaaggccaaaagcggctcaaaacatagaagagtatttttttctgggacctcattgttctttttggcttataatttactggctgcttcttgttttttcttgttttgaacctccttgggtcatctcgagtgggtgcggttgctctagtctgctatatgggttgtagaatacgtagattattctgaatgtatcaaaatgagcttgttaagtggttcatttt

SEQ ID NO: 19212 - DNA, 3979 bp, Cannabis sativa
ctcgccgccgccgccgccgccataactattcaaatataactttttggctgaaagattcctgatacaatagcagtcaaggttatcggaatctatggtggaagagcgagaaacccaagtgaagtgagagaaagcgagggttgcgtgaggttttggtgggctaagagaggaggaggcgaagaagacgatctctgctgttatataaaattagatgaaaaacgccccaaacaaaataaaacaattattagtttttttttattattattattgattaattaatgaaattcttttttatttatttatttttcattttataataaatcatgcaattttattaatagcaattggttaaaataatatcatccaattcaattaaaacatttttctattggagacacgattataattagaactaagaaaaatgagtcaaataatcatccatctcattctcggattgtgacaaaaaaaactgcactattaacaaccttgcagttgcagagaacacttatattcagttttatatattgctcaggagatacaatagtaaaagttattgtaactagtttgagtactcgatgtgtaaggttaagtaattgcactactaacaatcctcgcagttctagaaaaatgagtcaaataatcatccatctcattctcggatcgtgacaaaaaaactgcactattaacaaccctcgcagttgcagaaaacacttatatttaattttatatattgctcagaaaacacaatagtaaaaattattacaactagtttgagtactcaatgtgtaaggtaagtaattgcactactaataactctttcagtcgtggagaacttgttattcacatccattaagagtgatttgatgacaagtcatcgaagaacaaagaagaactaacaacgaaactaaataaaacaacatgactaaaacactcaaaatcatgacttagaaataagattaatcacaatagcaaaaattgaaccacaatattaaatatgcacgtatactaagcgaaagtcagcaggtcatggtcagaaagaaaaataaccttctttagctataaatttaagaataaaaatctctaatttatttttttgattggatacaaatttatattttaaaaacaaaataattatgaacttcaattatgttaagaaaaaaatattgtagtttcgattattgttgtcttttaacaatgaattttttttcttgagcaaagaatatttatttcattgatcttttattaccattattatatatagatttttaaacacacaatattaaataataaaataattgagagatgtatgtatgaccatttattttaaatattatttattaatattaaataaaaatatatatgattcgatattgaatttctttatgtttttagaatatgtatagtactattagatagattatagctataaccatgtaatgcattataatttgacacaatcttaagattcttaacattgttttgtttttgtttttgattttgttttttaaagacaatctaaatctacttttatgcataaaaaaaaataacatttataataagatgaattcaaattatattataattaatgctatgctattttctctttccaaattctttttgtatttactcttgttgttttgtttttcaaataaaatagaaacctcatgttaatgtaaaaataaatcatcatatgtgaattgatacatttttctcctagttttttaagttatagtgtcaaacatcctctaatgaagtattagttgtttaaaagacttgagtaagttattttaccataaatatatctttttggttttacttaatttaatatgagatatggcttaattaccctcttattaaagaataatgctatgtttgttttactacatataaatatatactaactaatactagaaaaaaaaaatgtttttctagcattgaattattgagactcgcatttgtattagagtgatggtcatgaggagagataagtacttttaattgaatgatgataatttattttgtatctgaattatttgattgttagagcacttacaacaatactttcaaaataactcaaaaagtaagaaaataaaaaatatatatatatttgttaaaattgtgctccattaagtaagttaaaataatttaaaattttacatgtttttctacttgtagagaaacactatttatttttttaatgttaatttaataatttctctctgttctttttctatttttttcattcaatttaattattttttgtttatataaaaaaaatataatatttaaatgatataaaaaaaaattaaagaaacatgaatggtataatgtaaaaatgtgaggaaaaattaaaaaaaaaatataattttaatgaaatattttaaagaatagaatagagaaaatgataagagtgttcattgttactagatctacaagtgtcatctaatcattttagtttatatattttaaaataggatgttcaacttcatctcatacaataagaagaagacattgatatgagatcataggttttgttattaggtattcatttcaatggtttccctttttgtaccctaaaatattccctaagcttgtttctttatgttgtgtcttcatattcatctttctaaatctaacccatcatttccttccttggaatataaaataccaaatatagatcacaaatttcttggtggatgacagctatttacaaaacatgaaacacgtatataaagttatgaacattgcaattattcgatcaaagttcaaacttatgttctcttcaaaaccctttttgttattactaaagataataatatatgattattgaccatatcaatactagtattttctctctcttcttatgtactatttcttgggcaaagccaaacatgcccttttatattgtaaatgtacatgatttgcacgctagccttaaaataaagttgagaaagccatgcctaagtaatcgaacccttttttcaagatgagacaaagcaagttcataagggtgataagtttttaacagctaaattctcttaactataattttacttgcagttaactttccaaatttaaattttagcaataaaaccattcaaactactaaactattagtaagtttaaagtgtcatccggttttatcaatataaacgtacttatacataaatagatgacactttaaatttactaatagttctgtagtttgaataattttgccatcaaaatttgaacttaaacggttaagtgcaaataaaatgataattgagagggtttggccgtaaaaactctaaaggtaaataaccacataagtgcaaattttcattttgagaatcccaatagaaagactagggcaccactaacggagcatgcgggtgttgctaatctgaaactcttaagcttaataatcacgccaaaatcattagggtgacaccaatattttcaaatccccaattggactttccatgcaaaaatgctttaatcccccaaacacggtttagagtaatgatgctcccaacaccatcacatgcacaacgaacctgtaacgtaatagattctgagaaagaaaaaaagatggaaacaaatataaaaaccaatgtgatttatagatgatttcagtctgtatttgagataacaattaagcattgtatgatgctctttctgagtacaacaatatgagcacttgcctagaaggaaaacgaatatatgatcgagattgaaagtcacataaataagcgttagtaaggaacatttacccgaatctgaattcaggaaactcgtgtcgttgaatgattctaaaacctcctcccgaaacaatgtttctacttctgatttttctgcttttctgcagcctattcaacaaaagagatcacaagttaagaaacagaacatgaatattgaacgaataacataaaaacataaagcatgcttaggaaaagtattttccttgtgcatttatttattggaattacagcattatagt

SEQ ID NO: 19213 - DNA, 2967 bp, Cannabis sativa
ggtgtttcccctttgttgttttggacttctacgagcgattcatctgcctctagaatgcatttgcacattctaacactccccatagacaccgcgaaatggagtggagtgcaacctatctcgttttggattcttaagacatcttcagtttttttctctcttatacgctttacaagatcttcaacgacactttcttgatgttcggatatcgccaagtgtaacgcagtgtcgcctgatttggtaatctttgccttgtgagctattggcttatcattgtatagctccacaactttgtcccattttcctttcatcacgtagttgaagaggtctttctttgtactatacatttcatcattatcatctaataagagagaagacattttttttttctttatgtttagatatcttcatcaatttcttgtcttctattctatttatatatgacaatttaatttgttggtttttaaccaaaaagaaaagaaaagaaaaagaaatgtaatcatttgtccaacaagctaataaattaaatatgccaataaaagtaaaagtaccaatattaatattttataaagtagaaagtatacatctctacctatcactttattatttattgccaacttataagtttggatggaaattatactaatcatctctccaaatttaaataattagtttagagttcaataataaagtttgatatataatattatagttacccacaatcaattataacatattaatttagttgtttatattacattaagcttgctatgacatgttttgagtgccattacaagccattttatgttaaccttttcatgttaaatttcttttatttatttatttatagcttgattaccaaaaaaataagtactatggatattaatttgcggtataattgctcaaaattttatatttgtaattagtagaaactcgataatttatttaacggcaaaacatactctcaaagttgctaaatttataattcatatttttttgaacaattaacttctattaaatggtgattatctgattaactcaatacttatgaagtggcccaactaagtggtgaaagtatcattgattttgtgattcacattggaatcaagccttaataaagaaaaaaaaaacaaaaatagaagaaaggaataaaatataaattgggtctattttcttttttttttttacttttggaatagatacgaggggtacatagtagtaaggataaatattgagataattattgtaaaaaataaaaaattaattaagcatttgaactttttaaaaaggatgatactttaaacctattagataaatcattacttgtgacctcaaaaaagaagtaacatgtttgtgtttcatgcctctataacgtctttatataaaacaagtagtttttgaaattaatttggtaataaacaaaatttaatttattatttattaggacttaatttttgtccttaatataaaaaatattattgcatttgtaggagcaaagtgccaaataagacggccattcatagagaaatggcttaaagggatgagttggaggatccgatcaatatcaaaactagtgaagtgtctttgcaaagcaaccatgtcccaagttcggctaagagtaattaaatcagaaactcttaaatcttcaacggcagataaaactcaaatatgctggaaattaggatcttgagcacaagagattgaagtaccattaccaattttccaaacaaaaacctttagtgatcagcagatcacgaccccaaatgctactacaccatgcatgtgtaggatggattattacccaaacgagcttgcatgaagccactatcccatcttacaattcctaagcccaacaaattgtaagggatgattccaatcagaagagacattcaattgcaagtgtttattatcaagtgataaatccagatgatacaaccttgagagctttgagaaaaatactttagaaatcacaccttctagctagtgagttcatagatcaatgtatatgttaagggaagtccaatttttaaaagtattcttggaatgatatcaccttgtattaatttgattataagaaagatatcaattaatgtatgttaaagtagttgtcaaatttccaaaatcatgtagaaaggaatttaacaagttatcagcaagattaagatggacaaggtttggcatattacaaattaaaaggaaaataaaattctcttttgtttatttttaaatcatgaaaattgaaaatgtagataatattacaaattgaaaagtagaatcgatcattggatttcttgaattgaatggatgtcataattttgaacattcagtgagatttctgttgggaacattagttgtccaagtgaaacatcactaaaacgtttggctaacaatgttttaggagcaagaagttgctgagaaaccaacttcattgttggtcgacaatttggtttggcatttagacatgcaaaccctagcatagcaataagaacaatatcaccttcaataagtctatttcttggtggtgaggggcgattgtctattatttgactcaataaggtgtgttgaatagatgatgaagaagatgacattaatttggataaaagatctccctgatgcttacccattaatatttctagcaccactacaccaaagctataaacatcacatttctccgttatcaccattgtgtaagcgaattctacatgtcacaaccgtaaaacaacataacagaacaattaaaataacagtgaaaacttaacacagtacacaatatttttgaagaaaaaaaaaatctgatttttaagtgcattgtgtaaattaattttccatatgacataagttacctggagcaatatagccatatgtaccagcaatcatggtttgattggaagaatctggatcaagtaatctagctgttccataatcggagacgaaggcctcaaattctgagtttaacaagatgttggtggt

SEQ ID NO: 19214 - DNA, 4444 bp, Cannabis sativa
tgtcaaggatgattagctgttatttctgttagttgttataactaacttcaactgtcttgtaatctttttgttacagctttaatctgttaagattgtctacattcattgaacctaagcttgtatataaatctctgtacattacattgattcaataagacagtcttttacttcattctgttatcttgtgcttctctgttcttgactgcattatcacatggtatcagagcttgaattgttcgttaatggcgaatcctccatcaacaaacggtgcagcatcaagattgaacaatgctcaaccgaacaacaatcaacaggttcctctgccaaaatcatacccagtctctttcaaccactctctatccataaagcttgatgaacacaacttcctaccttggaagcaccaagttcttgcatccatcaaaggaagcagactccaaaaatacctcgactcctctctagcaccaccaaagttcctgtcagcagctgatcaaagaagtaacacagtgaatcctgagtatgatgactgggaacagcaggacaacttactggtttcatggctactatcatcgatgtcagaaaaaactactaacagaatgatcggatgcgaaaccacggctcagatctgggagcaactgacggagtattatacagccttgaatgcagccaacataagcttgtacaaaacacagcttcgaaacactaagatgactggatctttaggggattacctgctcaaaatcaaaggtctagttgatcgattagctaccataggccataaacagactacacaggaccacattgaagcaatattcaatggactacccatggaatatgatgtgttcgtaacttcggttaccactaggaaagatctatactctgtagctgaaatagaagccttactcatggctcaatctgctagaatcgagaaaaatgccaaaaaccttgacatttcaaaggctgaagctaacctatctcagaccagaaatccagggttcacctatggtaggacacaatactctgcacctgcagttccaccaggctttaacacctacacctatggtcgtagcatgaacaatcacaacaattacaataacagtggtggtacatatcagcaaaacatggctcgaggaggcaatacatatggccgtggtccccctcaaaattcagcatccaaaagtggtcccccatacagtcgtggtcccaacagtactatgcatcaaaaggtacaatgccaactgtgccataaaatgggtcacactgtcaagcagtgcttttaccgatttgataaatcattcacgggtcctgagtcatttaccaactttccaccagtagcaaatattgcagagatgcaagcaatgtatgctgggcctgagactgttactgatgaaaactggtatccagacacaggagctacacaccactttacaccagatcaaggaaatctcaccaatggcagtccatacacaggcagtgagcaagttttcgtaggcaatggagcaggactacaaattgaaaatataggtaactcttctatcctctccccatttacatcacagctacttaccattcaaaatcttttacatgtccctgacataaccaagaaccttttaagtgtatcccaatttgctcaagataacaatgttttctttgagtttcaccctttctcttgttgtgttaaggacataactactcagaggatcttgttggctgggaaccttgagcaagggctctacaagtttcaaccttcacctccctacaatgtgaccacatctattaccaagaatcctgtgtcaccaaagtctagtcagtctaccaatgttcaatgtcacacacatgtaacagataaaaataattcagttttttctttgtggcatagcagactaggccatcctgctgccaaagttgtatcaatggccctctccaaatgtaatataccctattcgaataaaaatgttacagatgtgtgtaaagcttgttgtcttggcaaaacacataagctaccgttttctagatccactactcaatatcatgcaccattagaactcttgcattctgatctatggggaccagcacctattaattcctctagtggatatagatactacattagctttgtagatgcatacacaaggtacaactggatctatctgttaagaacaaaagatgaggcacttcctacttttactaagttcaaaacacaaattgaacttcagttaggaactaagataaaagccatacaatcagattgggggggtgagtttagatcatttacaaatcttcttgagacctcagggatagttcacaaactagcttgcccacacacacatgagcaaaatggggttgtagaacgaaagcatagacacatagtggaaaccggtctaacacttttagctcaagcatctcttccactcaaatactgggatgaggcctttagaacagccacatacctcattaatcgtatgcccacaccagtcttgcacaataacaccccattagagcaactatttcacactcaacccaactattctatgctaaaagtttttggttgtttgtgttatccaaatttaaggccctataataaaaataagttgcaatatagatccaccccatgtgtctttcttgggtatagtatgtctcacaaagggtacaaatgtatggcaaaagacaagagagtttacatctctcgtgatgtcatttttgatgaacataatttcccatatacacattcagcaaaaactcaaacaagcaatgactcctctcaccaaaccagtacaccaggtctgccacctttatcttctctgtttcatatgccaaatatagacaattgtactctagaacctgttccagctgtcccactcactctcaacaactccttgagtcaaccatgtggtcctaactcctcaagctcgaatgtccaaacaccaagtatcaccactgccataacacctgtcatcccacatcaacctacaacacctcatcccatgccttctcccataacagctacaacttcaacactgccacctgccaccttaacctcaactcatccaatgacaacaaggttaaaagcaggaatacgaaaaccaaaagccttattagctgtctgtgagccaaaaacagtgaaagctgcattgcaagagcctcattggaacaatgctatgaatacagaatttgtagctttgaaaaagaataaaacatggatagtggttcctagaccggccatcaaagttccaataggctgcaaatggatattcagagtgaaacttaatgctgatggaagagaagccaggtttaaagctagacttgtggcaaaaggatatcatcagcaagcaggttatgattttcaagagacattcagtcctgtggtcaaagctgtcacaataagggttgttctaactgtagcagtaacaaaaggctggtctatcagacaattagacatcaataatgctttcctcaatggtgacttgcaagaggaaatctatatggaacaaccacctggctttgttgatcctgactttccagactatgtgtgcaagctcaacaaagctatatatggcctcaaacaagcacctagagcttggtttgacaagctttcatcagtgttaattcatcatggatttcaattctctcaagccgatcactctctcttcacaagagtaacttcatctcactgcatctacattttggtgtatgtagatgacattcttattatgggaagtgatgataacttggttaatctacttgtgagagaacttagtgatacatttgccttaaaagatcttggttgtgttgactatttcctaggtatccaagttacaagaaaatcagagggaattttgttaactcaaaccaagtatcttcaagaaattttatggaaggcagatatgcacaatgtcaatacacaaaacacacctatgaacagtgggttaaagctctctaattatggaagtgagcctgtcaaagatcctactctctacaggtccatagtcggtgctctacaatatgccacggttactagacctgagattgcctactcagtcaacaaggtttgtcaatttatgcacaaacctctacattgtcattggatggcagtaaaaagaatactgaggtatattgcaggcactttagactatggactttggcttaaaccagcaccagatttttcattagaagtgttttgtgatgctgattgggcgagtgatccagatgataggaggtcaacaacaggttattgtgtctattttgggggcaatctagtcacctggaaatcccaaaaacaacctattgtcagtcgatcctccactgaagcagaatttagaagcttggctagtgctgtaactgaagtaacatggctgcaatcactcctcagagaactccatatcacctctccctcgattccatcagtgtggtgtgataatcaaagcaccattctactcactgccaaccc

SEQ ID NO: 19215 - DNA, 4563 bp, Cannabis sativa
agaagaagaagaagaagaagtaatgttgtttgtggctttgtcctcatatggaggtgaagattgagacaaaaataaagtcatcgaattgttcatagtaatgatctgaacatgatcactttgtgaatcttcacctaattttaaaaattaataagacaattcaaacaaagtaattctaagtcaatacaatacatcatattatatcaaatcaaatgaagattagatcagtgtgatcatattaaacaaaacatgtagaattgaataaaataaaaagagaaccttttccaacgtacaaaacccagacgaaaacggcggcggaaattaaacagaggaggagcattccgacctttttccggccggcgaacttgcagatccaatgaaataaagtctctctctcctttaacatcttggaaggctttcgtgaagcttgaattggaattattacaccgttctgaagctgtttatccaaagagccataacttccagaacgaattcccaaacccaatgaccctccacctccagccattgtcattgctccgccacacccagatatgcttctctcatttcattcagtcaagtcactcagagatcagatttaaacaaactccaccacccaaattatcattgctccgccacacccagatgtggttctctcatttcgttcagtcaagtcactcagatcagatttaaacccactaccttaaatcccaagaaatcaaatacccacttacccaaaactcaaaattcacacctgaaactctctcactgaattgacccacgcctttctcttctgtaaagagagaacctttggtcttagaatctgataacaagggcactgtgagagagggaaggaagaaaaggaattatttttttttagggtttctttgaaatctcaaaaatgagatcatagaaatgatttttcgtatttaatttataatatagttattattattattattgaacatgatataatataaattctatttattttttttctttatacaagaaaatatatactatgtattaattaaaattaaaaacattgatattgtataaattattataataattaatatcaaaaaaataaatagatgaaatgataagcttaacgtgcgccatgtggcgatggttaggatgagattatgatgtctctccttagatttgcataacatttattttttaatataaaagttagcataaaaaaaatgaaaattcataaagtatttatacattggtaaataaattagagcttctctacccaaaaaaactagagatttaaactgaaaatagttactaaaatattttcaggttttttgaatatccaaattaatatatatgaaaaacttttaagaggttagttataaaggagaaaataattaacaaagaaattcataacaataacaaagattttggtggttggaatactttttttttttcctttaacaaatcttatgtggcatgtttttgtttctgccggctataaattttaattttattattaatttttgatggaaatatagttattgtatttatgtatcttttcatattattgaacaacaagttatttttctttaaaaaaaaaagaaatattttgtttggaaatatatgtgagtttttttccttctttttttctttttttttttaatataaatttcattgaaaaaaaaatcaaacataacacaaactcactggtgccacaggaatgcaaccttccgaaagaaattaaacgagacacaaccccctcagccacccaagaggcaattcggtgagcctttaaattcaaagaccgagagatccaacaaacatttagaacaaaattattcgagactttagaagtcttcaaagcagtgaccactactttacaatctgagaaaaacttaacccgcttccaatctcgatataaacaaagggacactgcctagaaaatagcaaaagcttcagcctcgagctgagaagacactaaagacatgatcgttaaagcctcaacaaactcatagcagtggttcgaccaagattgtagcgaaagacccacgtccacaaattgcagcaacaacattgattaaaaaattgacaccatcctcaatctcaccaagggaaacctcctcctccaaacacggatccaccacaaccctctcagaagtcaccctcaactctttcatagcataataaactttctacaacaaagaaaaaggtgacacaatcacattctcatggaaggctaagtttctagcctcccataagaagtaacaaagtaaagcaacccatgttgacaatatatcaatctgggcgttgggcctagtgccaagtgtcaagttgggcgctaggtctagtttcaggctacttggaagttctgtttgctccccaaaaatagttgaatcttaatctttgatgaaaatagagaatatgcctggaagacttttcaggacaaactcctcaaatttttgtcaacttggctgttgggccagcactaggtgttaacttgggcattggaccaacactaggtgtcaacttgggcattggtcccttgttttggcctctaggttggtttatttcttccttcgaaaacacttgttttcccatttttgatgaagacaaataagaagcacgggtcgaattttatgtttgatgcttggaagtggcctaggttgaaaaaatgtcgacctgggcactagatgctcgggcaccaggtgctcaaaaatgaaaattctctaatcagattctgatgcctcaaatatgttcgtggtatgtctagttcatgtaccaatataaagtttgacccatttgcaataaaacggtcccggaaactgaaaccctagttaggttgtcaacttgggcgttgggtgaaaccctaagcgcccgagttgaattctaaggtgtaatttcgtgtattttcagctcccatggcatgaagttcgatgcgccatgtcttcatgctacagaatactgaaagatagtgagttggaaacgactaatcagaatctgaatacccattccggagttcctagagtcaacttaggcgcaaagctagggatccctcccaggtttattgctatgtctcgcgactactcaactctgagatattatctttcttgctaagtgtcaaatattgatgtccacgttaccagaatttttttttttttttttttattaacatgaagaaagagaaaatattcatgattgtgttgtattaagaaaaagggtagagcaaaaacactattattgagaaactaattatgctggaaacttgtagacgataaatgcatatcttgtaatctaaacttgagcattatagtaccagcaagttaaatataggagacacactatctttgaattagggtaaaacgttttggtagtgctctttacgtttctgcgcattacattttttttttgtctattttgtcatatgtgacaagtaatttaaactaattatctttcatctagtaaactacaatgagtttacaccactcacttgtcaaactacagtgagtgagtaaacttaattgcatatttgggcttcattgcactttaaccatggtgaatagtagggttggcatccgatctaatcaaatattatggaaaatttgtaaaaatattagaattttgggtaacttttacaaaaatattgtcatacagaaaagtttacaaaaataccgtgtttttataaaacaccaatagaacacaaaacagaacaactcaaaacaccagtagaacaactaaaaaatactagtagaacaccagtgaaaatttataaaagaaacacagtaaaaaagtaaaaaatactacatgacagtatttttgtaaaaaaaaatggcaaaagttaatataccatgtaaattttccaatatttttctcctcatctaatctaatccaattagtaattggatttagaaaattatctgatccaatctaattagacctcaaaatctaatccaatccactccaattactaattagattagatcaaatttttaattggatatctaattacacacttaaattttaatattaatttaaaaatatgaaaaaaaatacataaaaactacatatcacattttatttaaatttaatactccataaaaatattattacaagtgtaatgcaactaaaagtttgaaataattaaaagaacaacattactaagtaataaaataaaacgaaacatcattaaaataaatacagaaaataatccagtgttacaaattcaacaacaaaaaaaaaccaataaaaatataattaatatatattttatttttaatatttttattatataaataattttttaacatatataaatgtaattgaattggatcgatttttaattagattttgagattaacatccaataatcgattcaatccaattaaaatttatcttttaacatctaattatgttagattggattagatcgatacgattcaattggattggattagatattatccaccgctagttgtaacgtgcatgccaagatggcacgttacaagctaagtgatgcccacaagttgtccaagtggtggtcaagtggtggcgcatgttgaggcagctggtggcatgttgatgcttagt

SEQ ID NO: 19216 - DNA, 2798 bp, Cannabis sativa
aattaacaaataaatattaaagaaaaataaaactaaaagaaaaaccctaattcccaaaacataacatgcaccatagtttaccctctctttcttcagcctatctaactctctcgatcacctcaaacctttgaaactctagacgaagaatgtcggccaaaagatctgtgttcagcttacattgctccttcgcctctttgttactagaacaaaaaagctaaaattacaaattctcacttgacccaaaatattacactcccttttagctttgcaacggagatgcattgttcgtggctggagatgcgttgtttgtggccgatgatgttcgtggctagatatgcatcattcgtggttgaagtttggcttgccaatgtcgacgaataattgggctggcttgggcagaggtattttgctcttcttgtttagtctctctcccgatcttctcatattattttttaattttactttttttttgtttgaatctgataacgagattgattatgaaattttaatgttattttttattagaaatgtgtggaagatttcatatgtaagtttgttattttagatatgagtttgttgttttaaatctgagatagaggaggaggtgttggtaaacttccgtaagggtttcgggacaaacatgagcaagagagaagggtgagtaagggaggataaggagttttggggcctatgggttccatcagagtcatgtggtggtcgaccatcaggttttctttgcaattttgattggggtttttggggttatggtgatagtggagagagaggagttagggttaggagagagaaaaaaaaacattaattttcttaataataatgtactttttctttaaattttttaatatgatttttttttatttttttttttattttaataatgtaattaggtggaccaataaaattgtgtcatgtatatacactatgtctacgtagacactctaacatgacatctaacaactaaaattaaatggaaataattaaatgctaatagaatttgagttgggggttttactgacaaaaagtgagttttaagggttaacggctagcaaagcgatacttttgaaagttttgccgtaatttattctatgatctttgacatcattttatttgtatactgctctaatatacaaatgcaaacttttttttttttttatttgtatgtaaatataatttaatatttaaaatagttttataatcaatttattatcattctcttattatgtaaaataataataaaaaatttaaatatttatggtaatgtaaatattgaatcatagcaaaatttattataatttttggcatagagcaaatcttttacaaggcaagagctatatttgtttattggagatgcttttgcatctttaagtatagaaactcaaatttgactacttattgcactcatatatattctattagatatgtatatcttaatgaagtatccaaagccacattcattttttgaataattaatcataaataaataattacataatgcatgggtagcttgaaaagttcaaacatatttttgtgtccgtttagcactgcaatagacacatgtgttggagatgaatgtctaagattgtagactatggaatagcacatgtttgtttgaatagaaatcggtgatgcatgctataatactaattatatataacatatatatttgtgtgttaaaataattaagtctgtgtgctttgattttttatttttcttttggagtatgactctggctaaagggatttgattatatataatacatatatgagataccccacttattatgatgaacagctaatcttacttaatatattaataatgcagaagaacgtgtggtccattctgcttataattatgttttatttttgttctttttataattatttagtactcaaacctaaaaattgatagccttaaactactgttttctgtttattaggcttgtaaattaatcttaaaaagaaagataaatctcacatgtcaagatccttggtgaacttgtgtctgttgtatacatactgtttaattacttgtcggctaattttacggtcccatcccatggaaataatatctgcagaataatataggataatttaaaatagggttattggcggcttttatattttgatatatttttacacttaatgttttgatttttttttttttttcaataccccataactccattttcgtttacaaaattgaggtatgagttaaatttatagttcaatgtcaattgaggttgtcattgtatacagatatgtataggtgatgttaaaattccaaaattaataaaagtatgtcaaatatatacagatacatacagtgacaatacagttaatatttaacggtatgatttaactaatatctcaaatttgccaacaaaaataaaattaaaagggtttcgtcaccaattacctttaagggttaatggtgacgaaaccctctcatgtcaacaaatttaaataatgtaatattttttcttatatttggtactttctgttttattaagatacacaattactgtgtgtttttaataatatttatattgtacgagaataaaaatggggcaggtaataagcagggaagtattcgtatcccataaccattaactgtttaaatatccatcctcgcatattctatattgaggatagggcgtgaaatccttgttgaggtgggcaatttccatgggagactcatttattaaaaaataaatgaaattataaataaaaaagacatactatataaaaattaaaatataatatatctcaaatttataatat

SEQ ID NO: 19217 - DNA, 3023 bp, Cannabis sativa
attttgtgacccagttgaagctcagcttgagctttaaagctagtaaaagttggtaaagcttcacacttggttctaagcatgtagatccaagtatgcctagagtaggcatcaacaaaactaatatagtatttataaccactagaagaatttataggggctggcccccataagtcagtgtgcaaaagttgtagtggttgagtgtagtttgttgtggatataggaaaagggagtttatgatgtttacccaaactacaggcatgacataaatcggaaaaaccagtacttgttttattgcttattttgatattacaagtggacaaggcatgttggacaattctagctgtgggatgtccaagcccattatgccaaagagagtattcagcatttagaggtggaattgtgtgtgtattacactgtggtacagaatttattgagtgagaaggtgaagtactggatgaacatggctgagaagaattgacagaggtatgaagttgcagggcatcgaacttgtagagaccttgatcaagcctcccaaccagtaaggtcttcttggtatccaaatccttaacaagacaataagaggggtaaaattcaaaccaaaccttgttatcattagcaaattgagaaacacttaacatattttttgtaatagatggcacatgtaaaagattgttaagaagaagattttttggttgaaaaggagaaagaaaggttgtttttcctatagtgtgaataggaaaacctgaaccatcacccatttgaatttgttgttctccttggtagtcttgtgaaaatgagagattttgtgcattggatgttaagtgatgagtggctcctgtgtctggataccagctggagtcaccaaccacttctggagaggcataaagctgggctgcttcagctatgttggcacttcctgcaaaagattgcagagtttctggtccatgaaacgatttgtcgaatctgtagaagcatttggcaactgtgtgtccgattctgtgacagagttggcactgaatcttttggccccaaggtgagtattgatttttgttttgagaaaatgagcctctgttagattggtgagtaccacgagattgacctccacgagatgcagaagtttgttggccaaaaccaggagggggaaagtaggccgagtactgcaggttgatgttttgcatctgatttcctctagacataattgaagcccgtgttagaagaattggaaagataaggtgaagaaaaggtacctcttccaccagtgaatggtttagtgtgtgcaagatttgcttctggtttggagatatccatttcttgagctgatttttccaggcgaacttcttgtgccatgagtaaggcttcaatttcagcaacactgtattgatcagttcgtgtatttacagatgtgataaacacattgtaatcgctggtcaggccgttgaagatagcttcgatgtgttcagagggagagatcacatggccaatggatgctaaaagatcaaccaatcttttaattttgagaagataatcacccaaggagccttgcatcttggcatttcgaagcagagtgcggtactgtccaatattagctctgttcagagctgtgtagtactcctttagtgtaatccagatctgagatgctgtatcacagccgaccatacgagtgagaattttctcagacatcgatgatagtaaccaggaaacgagaatactatcttgctgctcccaatcttcgtattcagggctaacagtaccggagtgccgatctgcttcggagaggaattttggaggagtggacagaggatcgaggaatcgctgaagtcgacttcctttgattgctgcaaatacttgatgcttccatggaagataattgtgttcgtcaagtcgaacggagagggaatgagagaaggtaacaggagtagatctggggagattagttgtaagaccaccggtctgagacgaacctccattgttgctggtgaagaaggtagtcattgcaactgagtgaagacgaagaagaagaagaacgaaaaaagctctgataccatgacaaggtaaaataacagagagaaagagaaagaaactcaaggaacgaattctgttattcaaccattagaatgaactgagtacaacagtgagtttatatacacagttagaacagcaaagcaagaagaggaagttgttattacagctcagcaaaactaactaacagagaataacaaacttaacaaccataactaactcttatccttaacaatagcatcccctagggctactaattaaagtgttgggttttgttgttgttattgttggttttgaccattcatgaccacaaactcacaactattgtccaatcgcgagggcaagctacagtgtccttccattttaggcaaatgtgaggacccacgcctaatgtactgtccaaacgtgttgcttccacttttcgtaagtcaaagaaatcaaagcgttaccccaacctcttggctgtcctggagggtaaagtcctatgtagagaaattcaagagcattcttggcaaggagcttcatttactaggtttgtagcctttgtcccgacatatcttgttcgagaccaaatatgtaaacttgtgtccaatctccgctatctttgtatcatgtgagaatgcaaaactttgctaggggaaataagtggccctatctatttcgtgccacattatcatttaaagaagcttttctaacgatatgtcttcaggtatctctggtactataaatttaacatataataaatattaatattgaaataaacctatttactacaaataatttgaataaaatagcaacaaaaaaaaaatactaaaaacagatataaaagaaaataaattgtgtactatattaagactaacaccacatcatcaagggcggctatataatatattatattatttaaatatacaaattgcatgattttttctataattattcaattaagaagaaaaaaaaaatctaattaaattagctaatcgacattctttaaaaaaaaaaaaaaa

SEQ ID NO: 19218 - DNA, 3537 bp, Cannabis sativa
gccatgctctaagggaatgtcactcgttcgtgcaacactcgtcatgcctttcttggcaagatagctacggttagtgaaatcttcctaagaattgaagacgaacacgactacggtacaattgcaaggacaaagcatttgtgcaagatgggtacacacatgcctcgtgcaagttttgatgtcaaagaggtacaagtagtggaagtaccacgtcctgtaagtgttgacatctcgaccaagagtgcacacaaccactaccactacaactcgggatcgcctgacaccagacaaaggtacaaggcgcaagaccaccacctgcaatttgcagctcatcgatgtcatgcatcttgtcccttaggatcataattgtactcgaggtcattagagcctataaatatcctattttcaaacatgagagggggttggaaaattattttaacacttcactctgagaaatacaataagcatttctcttctttcattgttgctctgaaaatttctttaagtttttgacgtgtttttaccgttaacaagatataatgaacaattatttttatgttacaatttgctttaacattcttttgagcattctatcatgttgttatttttttttttattattatagtgtttgctatgctatctacttattagtgtttttaatttatgttcttgataggtgttaattgaccacaattattattgttgttcttgctttatatgtttaataagtgtgttgtgtttgtgttggcatggaactatcgatatatggttaataataattatgttatgtttgtgttgacctaattgtattgtgtcaaaattgtatatgcacgaacgtacaaacatggcgcatgtggcaaacaaaatgctaaaatggtgtacgtgtagtttaaaataaaaataattgaagatatacattttaaaataattattaatgtaaagatcaattataaaattaaaaattaagacagactaatattaaaaacttaattttaaaaaaaaaaattacacatataacgctgatattagggatggatccacattgcccctaaaaaaatcaagaaaaatatatatgtattttaattagttacgatatatatttaaaatgaaaaataatatatatagacagaatattaattttagtgtaaatgattaatttagattgtatttatgatagagggtcaagagttaaaatttcactaagagtatttttttttctttttaaatttacttttgccgatcttctccttaaaaaaaaaaaattaccccctcactttaaatcttgaattcgccactgacataacactgatttaaataactatattaatattggccacgtatgaatagtttgaggactattttcaatagactagaaaatgataggacacaataatactttttaatttttttttttaatagttaaccctaaaaaaattctaatataataacttaaaatgaaggatcaaatttataatttataataaaattaaaacatacatagtacccaaccaaaatgaaataaataaattaaataataattattaattaaacatattattattaattgatgggttacttttcttgtacggtagtgcatatggagtatgggagtagagtacgtagagtgtatataaaatagtataatatactattatatattattgtatttgtatatttggtagggatcgatgttagtgtagggtttggttggtggatatttatcttttgtggaacatgttggtgtggtgtctagctagattctatggtgcatttattattggcttctgctgagttttgatttaaaccctaaatcattatatattatgactatatatatatattgcttactattcttggccaaaacaaactcacctacgtgctcatattctgtcaattctatatgcatccacaccccatgtacattctaatcaaaactataattaatatatatatatatatatatatcatactcaatctccatccatccaaattacacatttacattttgtcttttctaatacatgtaacattcaattcaaattaatggttcttttttctatttacaaaataatttccaagcttatagaagaaatactttgattatttgcataacctccttgtaataatagttgatctttgatatcttaagttgaaatcatcatatttttttactataaattcggagtaaacaagtgttgaaagatcttcataaaaagggatgccgattagaaactgcactaactaccaccgctaactcaaaaagttaaaaaaaaatactaaatgcgagatgcagggtaggcctgaattttaagggatgttatacaaaatatagtttttttttttaatataaaactaatttatatatagtgataaatttttttcaagcacacattgctcagacagatccatgtcaatgatctgatcttgcccaaatactcatttcttattcagatattcaaaccaccaagactaattaatatgaccatagccttctatgctagatcattattgatttgttgttatctgaggtggtagcattaacatgattattggatgaagttccattcagcacatagatgcactactacaaaaatagtttttccgacatttttaaacagtcgtttaaagtcgtttaaagtattttaaagtattttaaagtatttttgagtatttttgtcgtctataaccgtcgcctatacaaccgtcgtaaaacgggcaaaatagttactacgattttattagaaaatgtcgcctattttatttactacgattttaagccgtcagaaatactaaatttttccagacgattttaaatagttacttaatctttttagtaatggtcccaaaaaaaaaaatcgtttttaggaccgttgcgaattctgatatttgtagtagtgatgtcattcctactaactccaatcataactgttatagatcccatgattacttttaacacactattttcaattttaacagaacaaccatcttgattcatcatagcaactgagataagatttcttttgatgtctggtacatgtcgaatatgccttaattcagtaacattttctccatctagattcaacataacagtgccaattccaagatctggataagatcgattgtccccaagcttcacattaccagttttaacaattgaatggcttataaactggtttttatcgagacaggtatgaaaagaacaacctgagtcaattatccaaacaccttctgatccattcttggatattgtcaaaatattagcactatcatacctatcattgtcctctccatctgaaactacatcagcatcaccatctttcttgaaattatagttcttcaaaataggacaatcctttcttagatgagtagtcttgttacacacgaagcatcttcttgaacttagaattctggttgcctttattcgaattgttctgacccttattttccttctttgaagatttttctctgatcaaccactactacaaagttggcttttcccaacggttaataagggggtaaattatgaaaaccgttggaaaa

SEQ ID NO: 19219 - DNA, 1974 bp, Cannabis sativa
tgctaattgcctttactaatccttttactagagcggtcattacataatacgacctaatacgatgttccaaacgacccaataaatagtaaatatacatcaaacatattatctaaaatgatataatattttttttaaatgaaattgatcatttttacaaatatatcactacatttttatataagaaaaaatagcattacattagtgtgtttaatatttgatgtattatatattttatgtacatatatatagagtgcataaattattgcagccataaaaattaaaaagaattaaaataataaataaataaaagatgaaagggcctcaatctaattgagatatatatgtgggcgaagaaaaatggaagacaaaaacaagagggtagcatcaataagaccagagccacataatgaaagaagcaaacaaagaatatccaataatatataacaaggataatcaagttgtggagctagctatatggttatcaatattattaactttaatgggatggggtgggtcatggacatttctctatagtctctaacatgctcccacaattcaataattttctatagtaataacattaataacaatatagagcaagttaccttaataataatagtatgggagtgttggccaacgtaaaggaaaaggtgttggagaagctggcggcagctgctgtcccagccgaggcccttgacaaggcccgtcgcttgttagaaaccactgttcgggatgccacgcaggctgctcacgccatctccaaagacgctatatttcgcatcaaaactcatcttgttgacattttcccctctttctctcctgccctcacttcaaaggtatctatttctttctattctatacataataaattagaaaacaacttcactttaggtgcacttattagaacacatagatttagggaataaacccatgtgttaagtgttcaatctacaaggtggaataagcttactacaacagtttgtatttgtgttttttgagccgtaaatgaaactttatataattggtcttaaaggtaattatgatgctgtaatttttttaatatgatttaattattttttagattgtttatcgaatgatctgagaattaagctgctgattatttgacacttttttttaaaaaaaaaattaatcttgatcatgtctccagcagagagatatcctgattagattgaaaactattaattttaattaattgctattaataaaattctatgatttattaaaaataataataatcaaacaaatcaacacccctaatctcatttttagctatgggtcaaaaattgtttctaccaatataaataatatattaatataataatatttccaaactctatgagtccactttagaggtgtgcagaaagttatttaattgaattataatcgttcgatccaatcctagctgatctaatagttacggatattcaatcataattggattggattgaatttaaattttgaaaatccaattagatcagatcagttgttggatgagacatatgatccaatgtaaataaatcaaaagctttgaacttcatctttccaattactaaatttaaagatttttttgtggctaaattctatcagctatcgttttacttgtacttaaccctctaagctcaaattttggcggtaaaatcttccaaactactgaactgttagtaaatttaagttgtcatctggttaattgtcatcatagtctatttatgtgtacactcttgtacacgtggtatatttatattaatacacctaatattattattttaaaattatttcaaaattcatttcaaaactataaaaataaaaaataaatatttaaaaaataaaaaatattataaattttgaaaaataactttttataatttttatgtgtaccaatataaatgtatcacatgtacaagagtgtccataagtagtccatattggtagctaactgtaaaaaatagatgtcac

SEQ ID NO: 19220 - DNA, 2552 bp, Cannabis sativa
agagagagagagagagatagatatataacttgccttcatttcatcactggctcttggtgaaattggagggctattctcacttgacagttgctgaaatatctgcaacaataatcttatcaatcatggccaaaaataacaaaacaagcaaacataaaagatacccttttgaacataaaagtagagaacatacacatattatctataacaacaacaacaacacttaacgttacgtttggaagttaaattttggtgggaaaataaaaaagtaagaaaaatataggcggaaaaaagaacttttcatgtttggtatggaaaaaacaattttcttttctacatttttcttacttttttctttcccgactaaaatccaacttccaaacatacctttttactagcaagatgttagtattctctaaactaaaagtttaaaaaagtcttacagattccttcaaagccatagtagagcttggatgatcatgatcaccaccatgagcttcagaagaagagtttgttgttgaggtgagaggattctgatgtgaagtagagagagctttggagagttcaacagctgaaacactccatgatcttgccaaaaactccatggattcagttggagtttctggtggctttgcacaagtggaaatcactccttcccaacttgtaggagtactattttcctctattatgctcttcaacctattaaaagagctacatttggtagcacaactactcactactatcaaaccaaaaaaaaaaatcaacaaattagcacaaccaaatatacattaacactaatcttgtttaagtctctaaaaaatgaaaattttagacttacaatcatgaaagtaccttccataactctctccaaagcaaaaatgaagttaaacccttaaaaccctttactttaaatgttaagttaaggcacttagtttgagaacacttttgggagattattagagtatggtaaggttctatctttatatgtgtttttaagaaagaaaacatgaaagagaaaaatggtgatgatgaatttggaggaagtggactattagataatcatttaaaaaatggggtgaaaaagaaaaaagtaagaattttgagtgttggtattgtaaatttttgttcttcttttctactatttggattggagccatttgatttttttgtattttttataaagaaagtggtaaagaatatactttatttttctttatttcttggtttgagagcggctgtattcatcattactaaggattctcttgtcaccattactatctgaaaatggcccaaaagtaaaagactgaggtgaggccctcttctgcaatatattattgtgactattggattggatgataaaaacaaatattaatatatgtgcaatgaaattgtagtgcatgcctaaagttccatgcacaataaaacaaatattattaaaaagtattaatggtatctaacactattacatgacgtgatatgtgttattactaacgttctcagaaggagaaactaaatattggggggtaaattgtaagaaaaataatttagaggggcaaaaggttaaagtctcctaaccttttaagtggttttgatgcttaattattagtgtgattaagtatcgaatatgttagagcgaatatcaaattataggaattattgtttggtggtgttaggtatttaggtcccatgaggcttattggtacgggtaccctttgtacttgtttatatatatttatatataaataataggattatttgtagcgaaattttttcatgttttaattttttacactttatttttttatgattttttagcaaagccacttatgttttttttttttttttgcaatttctttacaaatataaagtgtcacttggatatcaccgttagataccaattagattattactgtattagttttaaagttttattttcacgtatacacaaatgtacactatccaactgaatatttaactaatgctttaactaatgctttaaattttattactgtattattttttttatttattttttgctataaaaaataaataaaaaaaattaaatgtgtaaaattaaaacataaccactctaaataatataaatatgaggccatgttaaatgaattgtcaatgcacatactttttttttcgaaatggggagatgtgaaaattaaaatagagagcaatgataaggactaataaatatgattcctaatattatctttaatcatatacattttagtatgacaatgtcattactttgttatctttaagcatattcctaatatagaagagtaacaatatcattcctaatatttctctttaagcttattattttttaattaagagttgagatatatttttttttgcacttcaatgtgtaaacacatgacacttgatttttttgaaaatataaataaattcatgtgttaattaataaaataaaaaatcaaatgttagaaagttgaagtgcatttaacaaaaaaatttcttataaagtataaagaaaataattataatatatgtgtgaattttatagtgggtaaatattttac

SEQ ID NO: 19221 - DNA, 6433 bp, Cannabis sativa
  modified_base (4200)..(4200): a, c, t, g, unknown or other
  modified_base (4658)..(4659): a, c, t, g, unknown or other
  modified_base (6323)..(6323): a, c, t, g, unknown or other
tggaggcttgaagcggggacgttacagttaggtgggagtgctcccaaaggggcctacgaatctagagcctgtaccgttcctctgggtggtgcttgagctccggctttcccttctctcatttgtggaactcatacaagtggcctagacgtattaagctctccatcttgtcttttaaatttttactttcattggttgtatctccaatatcattatgatactcgcatctattgttgggatctctcgatgaactgtcttagaataaaaaaggcgacctccagtagtgaacattctatcttgtagctaaatacacatgttcttgtgtgtccaccaaattagtatattgagtatgctggggattgtatctggatcctctctttggcgttttgttctcactctgggtgcttcctttagatgatcttttactccagaaggattctggatttacaactatgcttactgcaagtgaagcggactgagtgagataccacgtgaaagctccaggagtggggccactaccttgcggtctgtagtcagtgtagtcagattgggctggggccgtagctggattttgtaaatattcgggtgtttcttgaaattgcacactaggtgttacatttgtttgaggagtggcaagaagtgtgattccagggaatggcacttcgaaatcatacctaggcctctaatagggtaataccatccaaaacccgttatttgagcctcttccaaattgacatatttctgagcttctttctgaaaatcttgaaggctagacgcaccttattgttgtagttcattccagaagggagttctggtacagataccagcttgtagctgtccatcatcaactttctttatcttggaagcctcctccttgaatctcttaataaagttcttctaggtttccaaaggtagttgttaatgttagtcagggcactgacttcaagatttatctttttggctgcaacaaactgtcttatgaaattagtctacaacttattcccgtaattcacgaatctaggttctagctttttaaaccattcttctacagatcctcccaatatcagtgagaaataaacatttggcatcattgttaaccctcataactgccataaccttgttcattctagacatgtgatcacttggattcgtgtcacccgtatacaaagtcattccgggcggcattattttgaaattttttgagagttcagcctcgagtacatttctggcacaaggctccccatcttcacaatttgactccaagtcatctcccttttgtcttcgggagacccttgctatgtccttctggaggataacaagttcagccaaagtcccttcatttaggatactctcggaggctgaagtgaattttttttctgattaagatgtaccttgaggtctctgtgcctatcattgcactttttttgtaagttgatcggggggcctttcctagcagacccctttttttccctttgttcttggtgcacagacacttttccaatctttgtggtattgggggccagttttcccttgggaaatctaccctttggcagacctttcctttttgggagatcagaacaaactttttatggatcccatgatatttttttcttttcaggtatgaccgtagggttcccgttttggggaggtcttccaagagggtacctgatgggactaggcttcttatccttctgcttttggcctcttgcagcctgagaaggtctttcccccgtattctcttacaaatttaggactgcagttgtgtttacatgaatgcctgcattttccattgcctttttcataatgatcaatatttcctgcattcttttgttttgttctttttttccacaaactccgcctcttggtcaacaaattttgggctcaatgccaccagttccgtgtaattgtcttcatcatatgcttcgaactcctcttattttgtatactcaggatcgttggtgtctccttttccttcagcatccataagaaaatctgcctcttcttcttctagaccttttgtgtcttaggctgttgtggatgtgaagtgttccttatatatagcaccattataccatgaggctttttatgatttcctcttttggtaagcttcctacagttctcaatgaaagcactaagatgttgatcgagatttttgacaaatactaattagagttgtttgtagtaattaatagaagttaaagaagagaacttttttacatggttggtgattaatgagccttaatccatgagtcactgttattaatgtatttctttacagagaattcctaagagtctattcttctatacatcattagagtatttatagactcataattatggtaaaaggtcattattgtcgtgtttgtatgagtcatgctttgcacaattttctaaatttgatcataggacatgattgcctattttttatgatttgtttagatatattataggtgtttagtgagactatacttgtcttttgcttcattatgtatccatctattgatgtatgagacattataaaattaggaaattatggatttaaacccttgagcatgtcttttcaggataatgtgtaggatatttttcctcatgccgcattaactgcatatacaatgacttaacctcaaacagtatgctatactctgtctatcccttcgtctcttcttcgagtcgagtttactcgcgaagaggaaaagacaaaatcatctaccatccatgtggactcctcctagaggtgaccaaaccttcgtaattctcgcgattaatagttatttggaagtgatttaacatgacacgtctcgtagtgtgggtcccaatgccacgtctcgcgattaataccatctgtgtcttttctgatactatttgttattagaagctttattaaatttatttatggtctaattttgtttaatttttcatattttaaattttgatttttttttaatctcataaatattttttatattatttatttatatcaaacttcaatttttttttctcaaatttatgtcatatattggttttgattttgattttcttgacaataactataaaatcaaagagaaaaagctattgcttatatagtttttgccatttactttttgttattttaatggaaacttataacctaatgctttggtcttggctttaattagttggttggagaatggagtgattatatgaaaagtcggccgataagagtgattagatctactaaatcagcacgaggatttgttaaaccctttctaattatacatctcaattattaataaatacttaattaatatgtacatgataaatatgtatggattggagtggattaaatcattattttcacatattaattataaagcaaattttagaattttaaatcaaattaagccaatttatacaaatgtagatattcacactttacaaattgaattagatttaatcatacgaatttattgaagaatattatcgcacatgaattaattgtaaaagtaataagccatatataagaatataaactactctattcatcaccaattcgactcgtccttatttttttatgcctaataacttattattaagtaatacataatttggttttgataaataaaaagggtcaccactagctaccctattctgttggcttttaaaaccatgcattgacaagatagatatgtgtaaacaatcccctcaacctaaaattagaagaaattacacattacacaaaattctccacattttttagttaagaaagtaattgtgttgtggcctaattgtgttaagtagataatgtttcaaaggcaaaccaagcctgctgttgtccttattgggaatttttttcgctttaattatgcctagtttgttgtttgtttagtcatctttacatgtgatattttttgcagctttatttttatctaacttgatgggtttggtcccatttgacttttgaatgaaattctcaattcaaaaaaatttatatggtcgtacgtcttgagttacaatttgtactatatatatttactaaaaatatatatttatatagatataaaccacacatcttgtgacataaaaagtgactagattgataaacaaaacttggatttattaatttaagggggaaaattttccacaatttcagcacagacgagcagtagtgctggaacctcatctccttcaatatatacgaagttataaatatttatatatatatanatttatatatatatatatgtataccagcgtgatccaggaagcatgtctctaaaacttatggaaaaaatggtaccaccctatatgcacagccaccaagaattataaaaatgataatgaaaaaagattagagatccttaaattacttgtattgttaaaatcataacctctaggcgccagtaatatatatatatataatgcatttcctaaaaatattataattgtatatgaaactaactttatcttctgtttttaagttatgtgtttgtgtttagtacattatataatggtccccatggccatggcgctatagtactcgtacaaatatataaatataagagatttgttgttttttaaataggtatatatatataatttatggtaaccattggtggtcgttgcttatgtatagattacatggtcccccaacattagttattcctttatatatatatatatanntatatatatatatgaatatataaaaatagataggtttaagcacttggagacatgaaaatttttccacataaaaggaaatgtgtaagttctaatgggatcactttcatcagaattttgagcttccgtaccttaaacaatatattaaaaattatatatatagcaaatcccacttaccaacaaaataatatattatatcataatcaacccaaaaatatacacaactaataaccatggaccacacattgtatatatatatatatatatgtatgtattattaatattaattgttacagctgggtgggaacaagatacctctcctagctagcaacaataacaatgtctttttctggtttctttttctttgttccaaggatcgacctaattcaaaccaacttctatgtgcttcacacacagtatatatatatgtatatatatatatatttatatagggatggtgatggtgtttggacctctctatatatggtaatagatagacaacagaactattagctagaaaattaataattgtggttagtgatcattgactttagtaattatgattttcggaaatgtttatgttatataaaatttaaataatatatttatttttctttagtaattatgtttatgttatataaaatttaacttttttttttctttttcaattcatattctcaaataatatatttatcaaataaaaataaattatattttaaatattacgattaaaaaataaataaaattttcttaaagaaatatatcatcatttagaaaaaaaaaaaagtattgaaattaatataaaataatgtgaaaaaaaaactctaaaaaaaatattaaaagtaatttttaaaaattatttaaattataatgaggtgtactaattattatgttatgggttgcaagtagaacccttattttccctttaatttcttttatcttaattatgtttttttttcaaatattattacaatatgttacaatacaaagtgttacatgtcgcgagctttattaccatgtgctattgaatttgattatagacatactttagtgactttacatagtaggtcctaaatttaatttcgtcctctcaatattaagaaaaaaaaaaaaactaaaacttgctaataaaaacaaatacctgtatatataattagtataaatatattagatataaaaatgtatggatttgaattttgaagtgggttatataactctacgttatcaagtatagaggcttcaccattgattccaacttgtgttttatcttcattactttacatttcacaaccaactagagtatagcaagctatatatagtttataataaactttgaaataatataatttataattaaataattaattttgaggaatacggaattagaattttgggttatattttaagtttatcttagataacgcaataaccaaggttgagaatcttcaaaaataaaaatattcgacaataattgaacataaaaaagaaaaagaaaaaagagcttaacaaaaatcagatgttgcttaattaagctacacttatcatcctatagctaggtcataattaatattaattaaacacacatgcacactcacacatatatatatatctattctatataaagtgtgcttatataaccgaatgagtcactttttatttatatatantaaaataaataaaataaatcttattaaattcaaaacaaaacgattggatttttgctattgtacatctacgattgggttttctttaattatttattgtattccttttccta

SEQ ID NO: 19222 - DNA, 3012 bp, Cannabis sativa
tcaaatattataaatattctataactatataataaaatacaagaagaaaaagagtataaatagaatggcagctagttattaatagattaaaaagaacatatatagtaaaatttgattggatgaaaagatgaaaaacaaataaatatataatgtctcctacaataagggcttatctcaaaaggagtcaaaacctttctttctattgtttttgtttttgaactcctaaggttatggaggttcatacataatccaaaccaagtaaataaccaacaacacaatactataaaatggcagttcaatacatcatttctcaataaataagcaaaagggttttcctttctcacctccaaaaatgactacctcaaaccatttgatacaattccaagttgtagtctttatcatcttggtctcaatttctttctcctatacacacaccccaccacatgagggttctcctacttcgcccccacaacaacaatctccgccatcgccacaaaaacaatcttctcctcctccatcttcgcaacgaaaatccccaccatcaccacaaaaaggatcttcttcccctccatcttcacaacatcaatctcattcttctcaaacaacagtggaatacaaaggatgttggtcaaaggtctttgcattcggagactcaaacacagacactggtaacggttacttggttggcggtttaaaatcgttcacaaacacatcattctctaagtcattctatagttcatcatcaaatggttacttaaaaggtcacagactttccaacggtcgattaatagttgaccacttgactgaatctctggcttgtcctcccttagcagcatacaaatcatcttcagtcgatatcaactacagcggtagtgtcaacttcgccattgcaggaacttcaacactgtctagagattacttttataacaataacattggtcacactttcatgtggagtcgagttccagagagttatcgaactgagatgacttggttcaacaactttcttcatgaaaggactcaaagacatggttctaaagcttgccgaaaagaaatggctgacaccctcttttgggttggtggtgttggaagcaatgattacctccgcatgtatggatcttctgttacctctcgtatgcttactgacctttccattggtcacgtatcaagaattttaacggtatatatgtacatttgattcctaatttcctatataagttatgttaaagaaatgatgacaactcaagaatgttttatttcagtcactgctagaccaaggggcattgtacatagttgtacaagggttgccacctttgggatgtcttccgtcgcagctgtcaatgtgtccattgttagatcgcgacgaaaggggatgttccaaggccgccaacaacatagtaagggctcacaacaaactccttcaactaaggttggacaatattagaagacggtatcctcacgcaatgatagcctacgcagacacctatggtgcttatgaggacatattggctaactaccaaaaacaccatttcaaagagccattcagagcttgttgtggctctgatgaagatggtccttttaacttcgatgtacattgcctttgcggggcttcagggacaaccatttgtaagaactctggtcagtacatgagctgggatggtatccatttcacagactccatgaatggaaaactcactgaccttttcctcaacaaaggttactgccaaccttcatttaaggaacttgccaagaagaagaaacagcaagtaatatagaagagacaagcttgtcaagagcaataataagatgtttaattagatgaagctccgaatggttacactcacacattcagagagctagaatgtaatatttttttattttggagtttattcccacttagtaatttattttcccattctacaatgtaatattttattcttttttttgagtttataccaggtgagtattgtaatgtttttcacttcttgtcatttggtccaaaaaagtactagataagttctttttgtcgttttagcaaaacatgtgttagctcctatgaacgacatgtcgtttcctactctgttaaactgggaaaagacaagcttcgtagttcgtgtgaaacaaacaaatttgtcgtttctcgtccaaaaacttcaatctcaagttttccacataaacaacacgccattttttattgtataaaacgggccaaatttcaagcaataaaaaacaaaatagtcaattttggctaagtgagggacccattgaggaggctgctaaaggaggaggaggggtataaggcaatagaaaatgtgaggtggaagctgaaagtagctgagcaatatatatatatatatacaaaaatattatagtaatggctagagtaaatgaattccaagcagaaaaaaatgaaaataatgagaggaccatgataagaatcagcaaccacaaatgaacaagtatcaagtttcaaccataacttatctcattagcattattcaattaaatgcatatttttttgattgaaagtggtgaaattgaaacaagttagtacaagaagtgagaacctttcatatattactaaacaaggtacctcacactaatacttaaaaaaagctcaacaagcatacatactatggtagctgtaatttttcctgaaagaatccaaaaggacattccttaccagactctatttacatttgagggtcggcattttctctctgtacaccaccaccaacaccaccatcatcatcttcatcttcatttacttccaatcagattagattagatattcatagtatactaagaaaagggcatcagggtgaacttttgggaggctgttgatatagagatagaacctcaacaattcctcttgtgaaaccgtttcattgtcaaccacatcatcatcacaagtgagtacccataaatcttctgaattaaccctcttgatactaccacggcagaaggggcatgattctgatttggtgttcctgtttgaattggaggaaaaat

SEQ ID NO: 19223 - DNA, 16672 bp, Cannabis sativa
ggggggggttgaaaactactaactagggtaacttgctggctgctatgtaattgagaaggttgaaatgttgttaggtttgactggtagtatgatataaatgttgcaggggagatgacgatgagaaagaatatcttataaagtggaaagaacttccttatgatgaatgctattgggaatttgaatcagacatatctgcatttcaaccagagattgagaaattcaatagaatccagtctaagtataagcagtcttgtaataagaacaaaaacattgttaaagatgctgctgaattaaaaaagaagcaaaaagaatttcaacagtttgaacacagtcctgatttccttactggaggtaataactttctctagcatgttcatatggtttcacatttttatatgttgttagtcactttattgtaaatttctaagtgcatttgtgtgtgattaaaggtaccctacatccttatcagctcgaagggttaaacttcctgcgtttttcttggtccaaacaaactcatgttatacttgctgatgagatgggacttggtgagttttcttatatacatacatacatatatatatatatattttgtttctttctttctctttaatagattgtatattggtttggactttgtcaatcttttgatctttgttgttttcaggcaaaactatacagagtattgcgtttttagcgtctctttttgaagataacattggtccacatttggtggttgctccactatcgacattgcgaaactgggagcgtgaatttgcaacatgggcacctcaaatgaatgttgtatgtatatggtgggatttttctattagcaacatggtcggtttgttagtaccatcctaagtggaaatttatttgctgcaggttatgtatgttgggtctgcccaagcacgtgctgtgatacgtgaatatgaattttattttcctaaaaatcataagaagctgaagaaaaagaaattcagtgcagttagtgaaaacaagcaagaccgcatcaaatttgatgttctcttaacttcatatgagatgatcaacttagacacgacatcactaaaaccaattaagtgggagtgcatggtaacatcctgtggctccttgtttagtttctagcttaaggtctgacttcctgtttaacgttgagttcatatgtagattgttgatgaaggtcaccgtctgaagaataaggactcaaaattgttttcatcaatgaagcaatattcaactaatcatcgtacccttctgactggaactcctcttcaggtctattgttgaattgtgctatttttcacacacaacacacacacacacatatctatttatggatattacttaattcattacagttaatcaaatcagattaagttgttagaagactgctattctttttaagcaatagtatggttatatacttttattatctctacaaaatctcaaatttacttattttccattggtctattatgctttcagaacaatctcgatgaactatttatgctcatgcacttccttgatgctgggaaggttagtataagaacatccaagtaactgaatatattctggtaaattttaaagtggtttgaattgatttatagagctcttttgtttcgtttttcttgtttatttaattgcagtttggaagtctggaggagtttcaggaagaatttaaggacatcaatcaagaagaacagatctcaaggctccataaaatgttggcaccccatcttctcagaagtacctatctcaaacttttctacttataagaaattattgataattttcatgttaggtagttttcaaacaagcattaggtgtctgatgattacactgcatctcatgatgaaacattagaggttaaattttgttttacattttaacttgtgatgttcaagcatgttttcaagaaaaatagttttcattactctctttattacataatgattataaggatccaacaatgattaagaatggcattggtttgttattataagtacttgtgcactcttgtctcataggttagttttttgggagtgagttctacccaagtggttgtaccattataatgcaaataagtgggtatggttacataagcattggatctttaagtaccattcttgctgtttattctttaaataattttattttatgtaattcccttccaatcgatttcggtatttttgtacgctgctgtagctgggacaaatctttcattatttatgcatatgtattcataacattttgagaattatttgcatacaagctgttgaaaaatatggtcgcctgaaatctgtttacattcatgtttaaatgtcaatactcttttctaaaaatgtgtgaattccattgatgttctccaggagtgaaaaaagatgttatgaaagaattgcctcctaaaaaggaacttattttgcgcgttgagttgagcagcaagcagaaagagtattacaaagcaattctcacccgtaattatcaaatactaacccgacgtggtggtgcacaggtaaggggtgtctattgctggaacaaagatttttttcttattgcattctgatctaacatatcattgcggttcaactccagatatcattgatcaacgtggttatggaactacgcaagctctgttgtcatccttacatgttagagggagttgagccagatatacaagattcaaatgaatctttcaagtaatttatgagattctttttaagtttgtctgtgataagtaatatatgttatttgaagtgttcttgtattatgaactagagtttttatttttctgttgctgttttgttctctcttacatgggatagacaactagtagagtcttctgggaaattacaattattggacaaaatgatggtgaaacttagagagcaagggcatcgagtacttatatattcgcaatttcagcacatgttggacttgctagaggattactgtacatacaaggtatacaaattattttgttcaaagtttgagaatattgttgaatttactagtgttgatagctgatgtatcttcatgctatggatgtgtgattttattttcagaaatggcagtatgaaaggatagatgggaaggttggtggagctgaaagacaaataagaattgatcggtttaatgccaaaaactcttctagattttgctttttgctttctaccagagctggaggattgggaataaaccttgcaacggctgatacagtcattatatacgataggtgaactgttggccgacaagtatccttttaatttcttgattctgttggtgatcatatttatttgtgttaaggtgttcttacttaatgtgttctggttctttcattattgtagtgactggaaccctcatgcggatctacaagctatggctagagcccacaggcttggacaaacaaataaggttgtcattagttatccaccattctccactccccaacaccaaaaaaaagaaaaaagccactgtaattagtggaggtttctaatggtggactgttgttgttgggatgtaggttatgattttcaggctcataacacgtggatccattgaagaaaggatgatgcaaatgactaagaagaaaatggttttagagcatttagttgttggaaggttgaaggctcaaaatattaaccaggtaaccatttttagccgtggacttctggatatagagtgaatttgaaaatgtttcatatccaattaaattggcatgaaaatgttagaaaacctcttgatatttgatatttaaatcttaaaatgattcctgttaacttatatttgttcatggaattctttgaatcttctacagagtatttattttgttaaatctataaccttcttgctttgcattttgcatgtgatgtgctttgaggcagtatctaattgggtaatttataagaaaactttataaaataaacactaaatcttaatgatttctgttcgttataggaagagttggacgacatcataaggtatggctcaaaggaattatttgcagatgaaaatgatgaagctggaaaatcaagacaaattcattatgatgatgctgcaatagataggtaaatgttatgatacttgagctttatttcactatattgatggcgttcaatataatattgatgacattattgagtgtctgtcttcactagattactagaccgagaacaagctggagatgaagaatcaaccgtggatgacgaagaagaagatggatttctcaaggccttcaaggtttatttcttctcacttgaatattgtcattaagtgaatcacatcacatatgtcatatttttttttttttgaaattttgttacaagagccaagttttaatagtttcccctcctatagattcattgtatagatctgattttttttttcaatggttagattttgaaacatgtcaaagacttttctttttgggtcatatacatttatgattttttttttggttaaatatgtcaagttgtggtgcattcttaaccagactaggaaagatactaaatgagattttttatttttttcttttcatcacttcactgcaaaattgcaccactaattttcttttttatcttttttggtgaatgtcctgcaagccagaggaacaatttttatttaattggaccacacaggcacatagcatattatagcattgtttacatattttttttaagatggtcaccacttagaccttttgatcttgaaaatgtaatgtaattgttttgttttattattttatttttaactgccttgataatttacttcttatggatttccctagtatcccatttacaagaattaacctatcaggtaggaggggaaatcatgggaagtaatttagttctgtagtattagtatacaagtaaagaagaaaatcctgtaattacttttttttttttataaaaacaaatcctgtaattagttacttgccttagatgggaggattttggatatctcagttaataaacctaaaatgtaatatttttgtaagaatttacggtctaaacatatgttggtaaccgaaaagggtatgtattgtcttttccttgtttttgttttcaattatttatatttttctattaggtttttattttaaataataacatcagcgaatcgtattgtaggtagcaaattttgaatatattgaagaaacagaagtggtggaagaggaagcgcaaaagcctgctatggaaaataaatcagcagtcaacagcacagagaggtcgacgttctgggaggagttgctgagagacaaatacgaagttcacaaagttgaagagtttaacgcgttgggcaaaggaaaaagaagccgaaagcaggtgtagctttattatcctttgtgtgtttttcttgaggaatggtctcctgatactaagtatttcttatagacgagttttgggagctctttctccttgtgataattattctatttactccatattaggtttaagtgtatgttgctgaggatccagatcttgcttttaggttccagatcttgttaaactgaagattgatttcatttttttttcttaaatatcaaagaaaattatttcttcataaatgaaaatataattaatctgtgcccttgccccttggaatttgtttagatggtgtcggttgaagaggacgaccttgctggtttggaagatgttagctctgataacgaggatgacaactatgaagcagacatgaccgatggtgaaacagcatcatcaggaaatgcttctctgaagaagactaacagaaagaaagctcgtggtatgttttacttgtcatacaattgcgataataagcttatgattttatcaaagaaaataataagctaatggttgaatgaagcgtaatcaattatgttcacagactcttaacttcaaaataaattcttttgcagtggatagctcagatcccataccattaatggagggtgaaggaagatcattccgagtactgggtttcaatcagaatcaaagggctgcatttgtgcagattttgatgaggtctcctaaacttagattattttattttattttatttttaaattattctgtttctcattggatactcaatgctttgtatttaccactcacttctgtgtgtgtgtgtgtgatcaattaatgagtctatgtttacaattttatgaatatttggttatggatctctctctttctccttcttcttccccttttttgtgggagagttggtgtttgtttgaattcctagacttctgtgtttactggtcttcttaccctggagaacaatgaacattgcaggtttggtgttggggattttgactggaaggatttttcatttcggatgaagcagaagacttatgaggaaataagagagtaagatatttctttcattcgatcctctgtgtgtgtgtgtgtgtatttataggtcctgctgaatcctgtaattaaaatctactactggttattgtgtgtgtttgtattgcaactctttaatgtattttacatcatgttaatctctagatagaataagatggcgtttgtgcactgcagatgttctggtggcatctgactgaaaatataatctcattaatgtctttatttaattagacagtgaattgcaatagtgatattactttgatgtgaatgacacatcaaatactacataaggtgcacaatctattaaccttcgcataaactgcacatggacataaaaatggtgtttttgcaacattgatgaggttcttgaacattttgaatgttccagccaaaatttaaaaggagaaaaaaaaaatatttgtatgacacatgccttttcttgtttactcagttatgggactcttttcttgactcacatcactgaagaaattaccgattcccctacctttgcaggtgaaaatcctcgagtgctgaccttcttactttttcaaaattatttgtaatgcttccctcttccatttgctttagttctaatattctatgctatataatttttgtctgtagatggtgttccaaaagatggactcaggatacaggatgtccttgttaggattgcagttctgatgcttgtaagagaaaaagtaagtgtaatagcaaagcttgatctttgttcttacctgtccttgagatagagacttgggaaacatttgattaacccttagtttaatggggatttctttctttctttcaactgttagtataaatcttatgaagaatatcattttatgatctttattcctcttcggttgaatgttaggtgaagtttgctttagaaaatcctggagttccactttttaccgatgacattcacatgcgctacccaggattgaagggtggaaagttttggaaggaggagcatgattcattattactgcgtgctgttctaaagtatgtatcatcatgagtagcataataatggtgacagtttttttagcctcacaagtgactgcgtttgaaaaaaaaaatcaactcttttattattattgatgaaaaagatacaaatgggatagagtgaaatatactataatatgttgcatcttttgaagtcaattacattcagcttcacacataacatacacaacagggctatttaaagtaggttataaatgattaaacttttcattaatttcctggccaatttttaatgaagttttagttgtactatgcttggtaatttagagtgctaatgttagttgcatgaaacttttgttatacagattagcacaaatttggttgtagttgtaggtggagcagtttttctttttctatgtatggttgctgttagtttatgttgtataacctgtgtacgtgtacagttccagtggtgaagtgtgtaacatagtcagatgtgctctaatatggtttagttgagttttcaggtgataggcttgtgtatgccatcttaattggaatatacttgtagctgtaatttcttttatttgacgatttaaccaattttattttggcactgcggatatatggcactgcggatatatggctgtttcatcatatgcgttgtttgatatatgtgcttgatggggcttcaagggtctcaagggattttactatagtatcagtgtgaatctttttgatgtgtgtgtgagcttgctagcatataatggccatgttaaaaatgacacatgttccttatcatatacctgtttgaatgttcaaggcatggatatggaagatggcaagctattgttgatgacaaggagttgaagatccaagaaattatctgtcaagagttgaatctaccctttatcaatttacctgtcgccaatcaagctggttctcaagcacaaggtgttgctaatgttgctactacagttgcacctgcaaatcctccgaaggaaaatggtggggagactgttgtgacagctgatgttacgaagggaactacagatgctgcaaatcatgcacatttataccaagatggcaccatattgtatcattttagagatatgcagcgaagacaagttgagtttatcaagaaaagggtgcttctcttggaaaaagggctcaatgcggagtaccagaaggaatactttgtaagttgctgctttattttacctgtgaataatattcattaccttgatcacgtatctggcttgtgcagttgtcttctatctaatctctttatatttctatgttctcagggtggtgaaatgaagtcaaatgaggttacaggtgttgagccagataatgaacccaagttcacaaatatcccaaatgtgccaagctctctgtctgttgagattgatgcatccgtgtctgaacagttacctcaaatggaacccattggtaggtctctattgtcgtttttaatgctctgctgttgaagaagcacaggcatggtttcatatgtgttcagctaagccgtttttttttgggaaccatcagattcttcaacattctttttagctctttgttgtcacctttccttgtacattttagggccctagttgtggggaacgtcccagaaaattatttttgatgttctcaaaatggtggactttttcactattattattattattattagtaatctacctaatgaaggctagctatcagggtgcatattctttacaaaatttgtagtgtgtcataaaattgaagttagatgttgaagggccatttgcccatgattttggtttacaatttagacatattacgctaccctggagatctgcttgcctacttattgtgtgctttcgtattacatagtatctcgattggcttgaggtgagtaagattctggttgtctgtgcaggtcctgaagtaacagctgctgctgcttgtgatgataattcagatcgcctgcaactgcctcagctttataacgaggtaacccttgtgattatattatatgcatagattccaaaagaaccctaaaataaatgagaaaaggctttgctgtcttcctgatgtgtatttttgccttgaataatcgaatatcattttaccttcttactggcagatgtgcaaggttgtcgaggaaaccaccaccgaatcagttcagggatctttggccaacaaaccggctagtctgaacttggagaagaaccttgctgcaattgaaaccctttgtaatgatgtaaaccggattctctctactcaacaaaacccagatgcaaaggctgagccaaatgtcgtcaatgcagtgctcgccaaatcatcttctgaagatgacaccaagctggtaaccaaatttgaacctgaagaaggaactatactgatgccatgcggatcactgcttcagaagggacgctcgagctcaccagaaaacactggaaatgatgtggtgaccaaagcagagaagagtgactgagctggttatgaaagcagagaagagtgatggaggtgcttctagtattgaataaatatttaaaagcctaggtagaatatttatgaggctaattttacattggaccttttgtttaaactttttgttaagtcactgaaactgagttcttgttattttaatcttaggatatatgaatttgcttatggaaattgtgctctcatgcatttggggcgaattgatttagaaagacaacaagattatttaaattttattataagtatttaaaaaattattgaacaaataaataaaaagttgaaaaagttttaaatttatataaataactaggcaatctagagtgtataataacaaaaaaaaattatttattactataataaataataacttaaccttataaaataataataataataataatgatttaaataaattattctaatatataataatattgtaattacttatttttgaatatttttttcaaatttttttaaatacgtatataaagatttttttattattaatattttaataatataactataataaatgaagagtttgaatataaatattttttatttaattaattaacatttataagctgaatatttatttatttatttatttttaaataagaaaataaaaaaggtagataaaaatacaatattgacaaaacaaacaacacattcaatattctttttgtatgaaaaattaagtttaaagatcactaaataaatatctctatatcatagagttattacacccaaacttaaaatattacccatccttgagtaataaaagaaagaaagaaaaattaaaatagtgaagataataggctttctattttggagggtttgaatttgtaccctaatgacctaaaaaagaaagtgtactagccacataagaaagggagacattagttgctatcattcttggagagaaaaaataattgcagaagaaaaaagtacagaaggagtagcaaaaagaagaaattcacattaaagaaggcgaaggacaaaataaagggctccattaattttattatcttcttcctctcatttctactctttatctttcaacaacttttataaaaactaaactaatagtcatggatttacacactttattttggatgatggttattaaattaattatgggctaatctttttgtgacttgaatagatattactcctatgtcttgctatgttaattttgaatgcaattgatttgtgaaattgccagcaataaagagggagaaggacaaaagattgattgttattgtttggccagcaataacaatttataaagctagatttagtacttaaggactaaatctagcagttacaagttggatgatgcaatagaataaatatttttaggttattcttagtaagtaaaataagaatatgttactactttgcataactttaagaattgatgcttaaattatgttcttgaatcctattttaatataggaatatattggattagataatagaattatttcataagttttggaaaaatctcatgagcttgtaagaaattttaattaatagcaatctgggcagtttagacaggatgttattccattgatattttttcttgcagttaattttctagtgtttgcaatcgtattttaagcatattttaatttcttccattttaatttagtttcattactcaaccaattaattttttattaaaaatttcaagttgttaaatagttgattttatatcaaatttggtttgcaatcttacttatcattgtattacttgtgtgactgcgtatacttgcgtataataattttcacaacaccgaccagatacgaaagacttacataggccttgcacctcaccctgcaccgagcaacattaacgatttgagataggcgatggtccgaccagaggacctcactaaaggatattttgagatattttccttaactgcttccacaattatagttcaattaaattcttatttctgtgggattgactcgccagattgagaaattcgtgagattttatattagaattcctacgccactttattccctttgatatcgagattcacatttattgttgtcgattatttagcaaacaatttattttattactcatataaatagtgaggccatctcactatgaaagacgccttctttttgcatagtaaagaaatcaattactctacaaaaatatttgtaagcttccaagagctattgagaaactcacagaccttgtgatcttgatagtttttcatagtaatacaactaaaatgagagtagactattaccattataaggggtcgaacttctataaatattgtgtgttgttcattattcttatttcatcattaatttctctacaattactatcgctttgaatgacctattgtcgttggccaaaagtgaggtcaacaatatagatttatcagcttttgactgaattcggatttaaaactttagttccagtaaaattgtggtgtgataatcaagctactcttcatattacctcaaatttagtgttccataggcatcataaacatttatgctcaaactcaagggagtgttttaatatatattattaagttttcaatttctttaaagtttcctatttaatctgcttaatcttgtatataaatactagctattctattgaataatatacaactaattcactattttgtacaaagtacaaacaaaattattaaatcaggtagctgcagactaatgctgataatcccaaacttagagattattattgtaattttttaaaattaagaacttatctacattaaagtaaatttttttgaagaaatgtcacagtttagaattaacatgtggtatttttaagagtaactatcgatcggatctattaaaattaagaccaacttacaaaattctcaaacttaggaactattatcctaattttttaagattaaatacctatatgcatcaaagtgaacttttgagagagttattataattttttcaagcctcataattagatgttggggtggggttggtgcggttggagagtccgtacgtacatatatacatatgtaagtataactatacatatattgtaaagtgtacgagtagtacttttcatgtttgtttatttttgttcgaatatattgtgtgggtccagtagtagttgtagttgatataataattcagaataacgttacatgaggtgtaatttaatactttgttttatattattataatttcatcatatatattagtttaggaattttcttttagtaggagcatgtatcttccaatggactctctcttttattctgcacataataatgttaattataataattagatgcatttggccataattataaaaaaaaattaagaattttgagaagaataatgttgtgttctaacttaaaaatagatatttttttgtaatttatctcattttatctttttcttgatcactgtctcatattatttttttctcgtcactttctctttctttattttctctctcaccactttctatctcatcgctccttgccttccatatcattttttcaggtcaatgtctcaagattgggttaaagtctaggcccttggtttgggttcggattcaagtctggggtcagggatggggtccaagtccagggttgtggctggggttcaggattgggttcgaggtttgcatctgagcccggggccgaggccaaggtaggagacgggtccggagtctgggtccaggtccaagattcgaggttcgagtttgagtccggatggggggtcgaggtttgggtccgagtctgagttcggagtctagggtctgagatcgggtttggagtccgcacttgaggtttgagtcttggtttagggtcggatcagtgtcggggtcgggttgaagttactggttggggtctggtcgagttcgtggggtctcaaagtattgaagtttttcttctttaaaaaaaaaatctaaaactaattttaaaaaatattaactaaacatgttgtgtattttgaaaactttaaaaattgttcttttgttctcttttttgaaaatacaatttttttttttttttaaaaaaaacaatgcaaaataactcatattgttttctattttaattgattttgaaatgaagaagagtgggaacaaattaataatatctaacatgctataaatattcttaatgtaactgaatgcgttggtttgatatattttattttctacaactctagaaaaagaaacaactacattgtcaatcattttaattaaaaaataatagcagtgaccaacattttaatatgtggaaaacatatatattatattattataattaaaaaagaaatcggttataaaaaaaaaagagaaaattagttcctaaaacattgaaacataaattaaaaatagaactagttccacaataaagtgagtaaaaacaaataacatataatacctcataaaccggctataataaaaaaaagtgggaatcaatttaaaaaaaaatggagacataaatctaaacagaactggttccataacaacataagtaaaacaaataacgcatactaactcaaaatataatataaagaaatcgattatatctctcaactaattaataatatgagacaaagaaatttgttgtgtaaagcaactaagataaaaactcatacaaaaatcaattaaataaaataaataaatcaaaaaatcaatttcttaaattaactaaaccaaaaatcagttcccgaaatattaaattaaaaatcagttccttgaattaattaaatcaaaaacctatttctgaaataaataattcaagaaccgttttttaaaatgactaaataaaaaactagctgagacataaattaaaatagaaccggtttcacaacaaaatgactaaaaacaaataagacacgataacttagaaacatattataattaaaaaaataaaaataagagggaatcaatttcaaaaacattgatacataaattaaaacagatagtttcataacaaaatgagtaaaaataaataacacacaaaaattcgaaacctattttaattaaaagaaaaaaaaaagaatcaattccaaaaacactaacacataaggaaattgttttaaaaaacaccaaatataactcaatatggatatttgcaaatatttgtataattttaggggaatttttgcaaccaaaaaagtaaataaataatggacaaaactctataatggtcttatgttagggaaaaattcccatttgttataaattctaataatcataatcattaacccgtaattgagttttgtgttgtgattaattctggttctgagattaaaggaccaaagcaatggagtaaggaagaaagcacaggtgtgcttgcagtttgcatcgctgtgaacactcagaacaaagtgacgccaccactgcgagcggctggcttcagtggcaacgtatacacgcttgcctcggtggcattgtcggcacgagaattggaaatgattagccacaaagccattggtgagaagagaagagaaaacaaagactaagtcaagaatgccatttgacaacatccaattcttccccaccaaataattagcttatatttccctcttctttcctccatttcaagtagaatcccaaagatgatcgcgccattgcctcacctgcccaaaaatctagacgccttcttctcctgcttcctcgcctcaatcgacattgctcggtgaaaatagaagcaaagaccattcaattcaatattgactagtacttaatattaagagaatcaaagagagtgatcattgttgttttactttctaaggttgaaaaagatctaaacttgaataatttagatgatctgctgacaatgatttcttgatcattatgagttgtctttagttataatattattgctagctagctatgatccacatgagttttttatctttggtcaaccagtggcaaaaatttaatgccgttaatgaattagtggaggggtcctacagtgatttcaatctaataataataataataataataataataataatagtacatacattatgataatgatatgaacaaaagaaatgcaaaaacctcagaacatgtgtaattactctcaacaacagatcatttaaccccataatgagttgcggctttgggccccacccaccaactatagacaaccttgtcattcattattattattattatcaattattaaacatatttataatatatatagagaaaagcctttatttaagatattcctcaaaacaaatggtgaagaaaaaactaactagtccttctgctgctctttaacactaaagaaaaaacataattgaaaagctctaaactggttgttctactagtactagttatagtgaaaataaggcaaacagtagagtagtagacatggatgcagtactcaaaatgctgtaaatttacagggaagtaaatcattatattgctaaggagaagaaaaagctccatcttcctcttgctcctcaacaactaactgtatttttatagccttattatattgatgtaccgagggaataagcgtcgaaatctccttcaaccctaccatcttgttcctgcaacaccaaaacaattacattattattaaagctctgatttgaggtacaaacagaacatgtagatcagagatgtgaacaataattgttatgatgagaaattcgagatgtgattctataacactaattagagtagagatgtgaacttgtagatttcaataactgaaggccaaaggtgtaacaattcctagaataccttttcagatgagctcactcaatgaaaagtattataaaaaagtttaaaacagatatcataagagtaatactcttgaccagaaaaaaaaacactcaagtatatgtta

SEQ ID NO: 19224 - DNA, 3399 bp, Cannabis sativa
  modified_base (2719)..(2740): a, c, t, g, unknown or other
tcccaagtggctcattgaagttcctgctattccatagtaaggtggagataaaaggattacaatattttatttttcacttagctgggcaaagaagctaatatggattagggtttattagctgtggagttgacaataggtgaaaaataagtattggacattgtaccaaaactgaaaactttacaactcaataggtgaagcatggtgaatagagataaaccagtgaccatcaatcctctcgaacacgtttgtcacaaactgtcccccccaactgctaccttttgtcttaaccaattccacgcacgtaacataacccatatcacctctaacatgaactttaatatcttttagctcaataaacagaggaaattcatagtttgcccatacatattcccaactggtcattacatcatcataaccagatattcccctaggacctgggtgcacacaacaaacctcatcaccttttgcccaaagggtttgcatcacggcaagatctccgcatctgaatgcatcgtaaaatcgagcatttgcagccagtactgaagttttgctgtcctcttggagaagtttaaggctgtccctaatttttgctgctttggcatagttctcctcagcaatcgcaatactcagatcccgctccaaagtttcgacatcaagtatgaggctctcaccacttgagcttccttctacattctcccctttaacttggcatgatctcaacgaaagacgaagtggtgaattctgaatcaagattgctgcactgaagattacagatttagaagtattcaaaagtgaaatattatcaagacacttgcagggaaataaatgcacaaagaacctgagatagtgattacatatcatagtagcgcaatcaacattacagtaaaacttactaaaaacatagatatcgtacaaatagaatgacaagcaaaaagacttactggaacttccatttctcatattgagatgagaataaccatgacaaagctggaatttatgccttcttccacagtgttcagcagctacataactggattgcttccgaaaagttgaaagacaaactagctttctcaaactcttaatgcctaaacgcggcatagttgtaagttccatggaaaaaacatttccctataaataaaatgtcaaagtgaaaccaaataagcaccaattgacacttgataatgaaaagtgcaaaaaggaccctgttttgttcatgtaatcttgcaaatcaatatgagtttgagaaaaaactgcagcttatcatgtatcctacacgaaaaaaaaattaacccaccttccaaattagcagaataacctatcaatgtcaataccgaatatacacgcatgatcaaatcaagcaagaacatggacgatcctaatttgaacaaatagatgatgctcaacatatgagagtaaaaaacaaaacagaaaaacaacttcagcattgtgataagaattaccaaatttgatacaagtttgagacttcatatacttaaaatcgataattatttgtcaaacaaccaagcaaaagagagaattcatataagacgaaggagattaattttgaaagcataatagtttgaattcaatcacagcgaaaaatgtgcaggaaaagagaactcactttgcaacagaaaatagacccatgaagcgccatgatcaatgtaagcagcccagatttagaggacaaaattagggtttaactttttttggggatttaggactttgcacgatcaaggtctcgtcttgacaggaaagttagtggcttatcttctgtcgggagaaaatgattggtagtttgttgaacctccgattgggctgggcttatttgcatttagtgggccaaactagataagtgggcatgggcttctttacttgagatgaaaacttcaggcatgttttaataaatacgaaaatatgacaaagtttacaaaaatacattttacagttttcttctaatatttttacgaattttaacctttttttttttacaaaaatacagatatttatttttctattgttttcacgttgttgctacataataatagcgttgttttccagaaaagaaaatacaagtagaaaacctgttaaaaaaatataaaatataaaaaaaggttcaatttgaagtacgttatgtaaaaatctcaactacaaaatagtgtgataaatgttcaggtatcacttttttttgggctaattaatataccaattttctctttttttgaaacaaacataccagtcttcactgacgtgatacgcttgaatgcttaaataaatataaaccataccgatattggggtcaaattactcaatatacttaaattatttagttcatctctaatagaatagagcattgttggtgtgcctagcactcttagacgtgttgttttgcgattgattagtgatactccctaaaagttattatattaaactatatgggacccgatacttaattagaccaatagtgatattgacacgtaagagggtgcttggcaccaatagtaccttttagcatttctcaaaatagaataaattgaaataaaaaaaaaaaaagagagaaatataattagatatttaaataaatgataaggatatgaaggagtaagtgtattctcttaatttgtttgtttttttttttttttccttttcaatctcagtataaaatatgaataacattacatactaacattcatgataaatttattattattattattannnnnnnnnnnnnnnnnnnnnntattattattattattaatctttaatgatatgcaaagatattttaaccaaattactcatcatctacgtaaagtaaagtgcaaattttattaatatacggaacgggtgcacatttacacccaaaacttacccggtctaaaacctaaaaaactctaaggaaaaaaaacaaaaaaaacaggtttcaattttagtagaccgagtttgggttacacccggttcatcaccggccgagttcgaattttactaatccaaaacctaaaaaaaaatcgggttacacccgaacccgcccaaaattcaaatatatataatttttttattttttatatttttttacattttctgaaacataaacttaaaaccaaaaaaaaaaaagaaaaaaataattctaaacaatgatatatcattttttttattcttcttttattttattttcttttcatttttttgttttattttcatgagaaagtgtataaaaatgatatttttcaaaaaagaaaagctcaagcccaatctagtcaaaacttatctggactcggttcaacccaaacccgacccacctgcacccatgttgtgaaaattatatacgcaagtatacgcagtcacacaagtaataaagtgataagtaagatcgtctccacagggattgcaaacaaagtttga

SEQ ID NO: 19225 - DNA, 2717 bp, Cannabis sativa
atgacacacgggggtggaatgtgaaccaccagattgagattattccaggtaagcaggagagaaaataataacaataatattaataagtgaggaagatggtgatgtggtctccatctcagattcttaatgccacgtggcaagcacgaagccaataggacatccacactcctatccttgaagataagccatttccaattctattgtcttactcttacattacattacctcataattttacatgtgtttagccatttagactgatcacaccaaaatcagactcttttacacaccaacacaccgtaacttgttctgggcacaactatggcctccgcttgtgcttcttctgccattgctgccgttgccatttcctcccctaggtaattaagtttttattttttatttttaatttaccagttaaaatatatagtttagtttaatgatcagttgattaatctatgcagctcccagaagagtgtgacaagtttgggggtcagcaaaggtagttttcttggaggaaggaaactaagggtgaaaagctttacagccccaaccaggtctaactcatcgtcggctactgtgtgcgccgcagctgaccccgacagacccttgtggttccccggaagcgttccccctccatggctcgatggcaggtatatatatactgtacatatatgcaatatccaatttacatcgtattaattatggttattacttcacttcctcctaattagtttttttttgtgttagatgatattatggtctaatgagcatgttccttccataataataagaagacaaaagcattgctaactgctaagcatatattaattattatattgttataagttagcccaagctaattaattttgagttgtaatctaatatattatagttatataataattaaccttcttttttacagagatatttgttgcacttaattatcaatgtaaaaaaattggtggtttgttacagttaacaacatttactattatctttttttgtcatcaaagtttttataaaaaaataattggttgaaataaataaaactatataagtagttttgtcctcaatttcttttgcataagtaattaactggaacaaataaaactatatagccaggaactgtcccttcgttatatatcaaattgaagtggaaaatataagctagataatacatcatatatgtgtgttgatataagataatatatggtaattattttatggtatcatcatatgagtgttgatataactcttttttatagtaatatgttgttaattattgtgatataatgttgcagccttccaggagactttggatttgaccctcttggtctttgtaagtcataaaccaattaaagactaccttacaatgtttaaactagttaattcatttcattccttaatggttatatgtatataatactttaatatatttttattatttatagcatcggaccctgatagtctaaagtggaaccaacaagcagagctggtacactgccgatgggcaatgttgggagctgctggtattttcattccagaattcttaacaaagattggtattctcaacacaccatcatggtacacagcaggagaacaagagtactttactgacacaactacccttttcattgttgagctcatctttattggttgggccgagggaagacgttgggccgatattctaaagcccggttgtgtcaacactgacccaatcttccctaacaacaaactcactggaaccgatgtgggctaccctggtgggctctggttcgacccacttggatggggaagtggttcccctgaaaaaatcaaggagttgagaactaaggagatcaagaatggaaggttggctatgttggctgttatgggtgcttggttccaacacatctacactggtactggcccaatcgacaacctctttgctcaccttgctgatcctggtcacgccaccgttttcgctgtaagaatatcatgtttttgtaataattctattttaagtggtatttttctaaaatttgttatgacactaacttttgttttttttttttgtaggcttttacacccaagtgaggttgaagcttgggaaggatggtatgctaacaacggtggtatatttggatcaaatgataacgaagagaagaagaaaatggtgttgagatggaagatcatgtcatcatgtgtaatgttgtttcacttgttctaagggaatatttaattggctcgatagaacttgctttttcctccgtacgtacgtatattttgttctatagaattaatgatctggcattgtacaaaatgttcctttgaaactttttgattaagatttcatgaacataaagtcagctagtattgaaattcgtcgactatgatatcgttgatcacacaagaatgttctcaattctcatgaatgaaccctctctaatctttacaataaatcaatgaataatcccaccgtctaacctaaacgcaatataactttaggctataaatagaagtcgataagggttggaaaacttgagaatctttttactatctcatctacagacgacatcgtcaatagaaacaatctacacgagttactcaatttcattagttttgaatttgaatctttgaaatgaatttagagatttataatatatgttatagatcatgtttaataactatgaaacaagagtaatcatacacttgatcttattataattaagtatata

SEQ ID NO: 19226 - DNA, 7212 bp, Cannabis sativa
  modified_base (3552)..(3559): a, c, t, g, unknown or other
  modified_base (3714)..(3715): a, c, t, g, unknown or other
aaaaaatgaaccacaattttatagttttttatggcttttttttttttacctataatgattttcccatattttaaagtattttttgaaaaaatgccatatttattgcaattaagtttgcatgccatacttatcaaaactttaattccttttcccatatttttgtaaatagccctattattaatttgagttgttcatgcaatttgacatactctccaaataatttctttattttggcttattattttttaatggtaatcatatggttctttaaataatatcttttttatatttttgttaaacgatctaagaacaaagtgaccaatttatttggatcgtgctacatatttttatttaagtcgttgatttaagtttgtgagactaattttcatgctattttattagtagatttgtatttttagtaaataatatagcaaactttcaataaaaaattaaatttgtgattggttgaaaatcttaaaataaaaatataagagaatatttaaagaatttttagatttaatattgcagaatacataaaacataaaattattatttttattttttttttttgtataaaactcaaaatcatattcaattttaatttttaaaaacaaacccctaccttttaagttatatatatgtatatatatatattaaatcataggccatttcagagcccgaattattaagattagtggatcaaaataattctatcaaattttatttaattttagtgactaatgtctaatgtgacgaatgtacatatactaaattatatctcttgaactttcatatatactaaagtaaatcgtatcagacatttgataaaattaaataattagacaaaatttcttgagttagcaaacccaataactcaagagaacttttaacggcttataaagttgggatggtatgactgaatagaataaatcttaattaacaattttataataaaaagaaatttttttcgtagagttcgttttcttagaatgagttctaaccatttttgtatgtatcctctctttgtaacattttttcaacaatttgctaatgtaacgtgtattttttggaaatgcaactaagtaatgtaaatgtaaaatataatttattttgtaaaaatatattctaatggtgtgtcaaactacaatgcgaatttgtcacatagcaaaaattaattctaatttagatcacaatataacttgatgcaaaatttacatcataataatattatactttttatatttactattacatcattttgatatttttttagttaaatttaagttaacatgctactttgaataaaataaatgacagaggatgtaagggagaagttgataaatacccactttaaatatatttctttttatctctaaataaaatttattttaaatatatctctttttatgagtattgtatttaaattattctcacacactcacatcactaagttataattttaaaacataataaatttgtgttctttgtagatggatgtatagatttgtgggaaaattggggcaaaattttgattaatatagattttgaaagagagggtaaaaattaaaaatatcaagttaaaagaggtatacagtgtaacttcctcgggatgtaaactttaagtgcattcccttgtgtgcttatgacccgtttagtacagctttcagaaaagctaaagttactttttaaataaattgtgatgaaaaagtatttggcaaacagttaaaaaatatcctatcaaaaaatttaaggagaaggtacaattaaaagttaaagttagtacaaccaacatttttaaaaagttgatttgattaaaagattataataaattattttatactaaaaatatattttaatatttattatatattaaaaaatatttaaaataaataatatttttttataaaaatatttatatttatattattaacaaataatatcaactaattttttttttataaattaattatttttatgaaaacaagtgataaaatataatataaaaatattatatattattcatattactatagaaaaaaataattaaaacaaaaataaaaaagttattcaacataatttttatatatttgtgattataaaaaattagattataataatattaatagaaatttaataactctcgatactttaaaatttataatttactaaacactcactttatcttttttccacaattttgctatatttttttttttacaacatagctacaaatgctaatccaaacactgttaagtgatgccctttatttctttatttttttttgctttgtattttcttatattgctcagattttgctgccagcaatttggaaatcctaatttaattctttttttttttttttcaaataatggttacactgattaatattgagagaatacgaaacacagtgacggagtattgacatccaataatgcccattcaattttgatacgaaagagttgaatgatttcatttcaccacctccttcactatatagatggtacataattatttgagccacgcgttcaaagcttcatctttttcttacaaaataagtgttgaaaaaaagaagatgattaatacagatataggatattaatgaattatcaaaactttttttttttttttctaaaaggtattcgtgatgtgtagtacctccttatgtgtcaatatcgctattggtccaacatataatttaatataatagcttttacagaatattgctagccaatcacaatacaacgtgtcaagaaaatgctagtacctaatagcaatgttcttttcaatattgtaaaatctaccgtgaccactattaattaattaattaagtccatttggttgtctagtggtgggtgacagccaactcaaaacaatatcttcgtgccaagccaaaacccagagtaactgggttcgcttaaacattcaattaacattttttttttctttttaacaagaggttacacctagttagagataataaaataaaaagaaaataatttttatttcgtttttttatttagttatttttgaaaatattatattattattttaatagaatgttgtctctactatttaaataaagtgactattatattttgaaataaaaaaaaaaaaataaactatattaatgtaacataagaaattttttaataatttttatgtgttttaaattttatttaatacttattcgtattatcattctcattactatttttatattttcattcctcataatcaaattaagatataggctatcaaaatttcaaacacaaagaaaaaaaagataaggtatcactgcaaagaaaaaaaaacactccttaaaataaataaatatatagtgacaatcgcatagaatactattatccagacaaaaataaatttaaaaagaaaaaaaatatatctatatatgcaattcattttaatagcatcttttattataaatatatatcataattacttaaaagttaattagtaatttttcccctgaacttttttggccgttaaaaattctccctgaactattgaggtttttaaatttaaggacttttgtcnnnnnnnnttcaattttactgtttcagtaattgtttatgtactaaactatgctccctagactttgatatctaccaaattatgcccctcaaacttagatatgtaataaatcatgtcttttaaattttcatccatattagaaactaaaattagacaaaagtcctnnaatctaacaatctcaatagttaagggagaatttttaacggccaaaaaagttcaggggtatgattttagtatatgtcaaagttcgagaaaaaaaattactaattagccttaattaaaaggaatatatattttttctcaatggttttttcaaaatggccactaccccctcgattctatgtgggtccagctttgatcctacttaatagcaaaaataatcaaactcgatctggttcagtatttatctcaatactaaataaattataagaataaataaataaattcaaaaaaaaaaaaaaaaactcaacatagacacatatagcaagaagttatagtttcattcactaatacttttatttttcaattttttaaatcacaaaaatgcacgtagtttttttattttttgtttttgaaaaataaatttgtgttttgtaactagtatttttttgttttttttttattttaaaaacaaataaaaaatatgtactctctaaatttcattttaatttttttttaaaaaaaaataagtgggttggggtccgaccagggtcgatagcaaaggttaggtctaagttacgggtttagagtatgggcccgagattcgtggttcgagtggtcagagttagagttcggatctaggtcgccctagatttgggtctagggttagagtagtccgggtcgggatccaaatcagggttgggagtagggtccagagtctggggtccaaggtcggggttcgcctaatcctactcttccatttttccaaccaccatagtccgtcacgagatcgcaagaacagaccatcaccgacattaaccaccatagtttgttgcttgaccaactttcctctaacggttactcccacaactaataacattacgtctcttttcatcacagcaagttttcactcatgatctattttgtttatgtatatttctattattgatgaaatgcattaatttttgtgtgtttgttcttttctaaatatttttaaacatagttaaacaaaatcagaggattggattcatgtaagaattagttaactttggattaatgttatttatttattttggcatttgttgaacattggtgctgagataagctattactatgttctagttgaagaattttagattgaattcttaaataaaaataacctagtaatgttaataataccgttttgatctttgctagccagaaattataaaactaattaaaaataaggagcactaaatgattagtattggcatatgaaattttcatttacattaaagtttaaacattttcataatccccactaatgaaagaagtatattcttataaaaattatattttcaattttatggtttaaagagggaaattttacaatccatacttaaaaaaatacctatttattaaaataacactcactaattatactgatcattttatcctaatgatttctactcatatccaaactatccttcccatttaattttttcaaaaatctcaaaaaaattattctctctaattctctcatgcttgatggacccgaccaaccctttgcctccctctctctatttccaacgatcccttccacaccaccgacgacccactccatcattcaaccattctacgacctagagtccccgaccactgccattcctccaccgtcgatccacccctcggcgaaaggttagatttttgttattttttgaaaaaaaaaattgtgagttaagaatttatttggtagatttagtttaatttgatcattgtatgtattgtgatactatattttttggatttctgtaattttttttttttgaatttgtgttgtttgagaccttagatggtcacgagtatggttttttcgtccaaaatgtgattatcaatggattatcgatattttgttgatagtttatcgataatatttgtatatacacttctattttgtgcacaaacaaaaatcatggataagctatcgataacataccgataaatgccaaattgacaaaacacagataaaaattatgaataacctattaataaatatcatcaataacttatcagtaaatgcaatcgataacttatcgataaatgtcaaatcactactacaaattgtacttttgatgctagttttaaactgacacttatacttttaaccgactacctatctcgataaatgtcaattaattgacaaagtagtgttacacatacataaatcatcgataaattattgataacctatcgataagtacgttttggcaaaaaaaaaaataccataaccaccacacatccaaggtctcaaacaaatacaaatttgaaaaaaaaaaaaaaaacacaaagatgaaggcagaatccagtggacttctagtcgggctcggagacaaagtcactatctcagtatggatgatgctcgcagatgaagacggagacgaatatttagggcctcttggttttgtcgacgcttgagtgctatggaggtccgagttttgtgtttttggggcttctggggtttcatcactactgaggttgtagggagtggggctttcggtggtggcgctgagcaaatagagagaaagagagaaaaaaaatggaagaagataaagagtcgtgattttttaattgaaatgggtagaatgggaaagagaaataaaaataggcatatattactatataaatattaggaagctaaattttaatattaagtaaaattttaaacattatttattatttatgaaatttttcttaaataattttaaaacaaatttttaccaaacacactaaattttttaaaatttgtcattcattcttatttgttttggatgcttcctggtttttctttttatgatactaatacttccctccgaaaatatacttgattgatcaagaaaagaaaacatatattattattattttgcaagaaaatatttaagttaaataaagttgcgtttaatgggagataatggaatgaaataaataaatttttatttgagaataagttttctataattgtagtagaacgattatccattttaatatagctgaaaaaatcattccaatacaaataaataatttttttgtttttatctattttccatatgcatagctaattttattttattttacagctattacaagaaagagaaaaaaaaaagttttaatatataacatgcaaataattgttctaaatatgacattttaaaaaaaaattaaaaaaatatgaaataaatcatcatatgaatgaaaaaataccatacaaaaaagctcgtatataaattttacttctatttaaccaaaaccaatttactaatgaaaaactagttttctgatcaattattctagtgttatttttgtgaatatggtaaaaatgtaaacaatagaatctttaaagtttaaatgaaaatgtgtaaattttttgacaaaagtagaaattttatgtaaatttccttttttattagtaggacgaccaaacttctagttggtttctgaatatgggcagattcatgcaaggagaaccaa

SEQ ID NO: 19227 - DNA, 1622 bp, Cannabis sativa
gacgaacaagagaagttgttcattgtcaagctaatcaatccagtctctctccctggccgctttgaggtaattaatatgaaaaatatttgaaaactgtctctctctctctctctctctctttcttaggagtttcgttatagatcataattctatgaactgtattattttgtgctatagccattctatggagctggtggtgaaaacccagaatcgttttacaaagccttcagctgggaggtactcagtgccgctttcaaggttagtaatgtaataaagttatttgattactggtactaagtatgtaagtgtcggtttggtataatattttttttattgagtattttttgttggtggtaaaaaaaaaagagagaaagagatgagttagaaaggctgtttagacaacaaaagcgagggagcatagtgaaggcgtcaaggcaacaagttcaggagctgagtcgtcatgctcaaggtagtggtggcaccatttggccgtttgggccagaaaccagatcttcaggtcctttcaatctattccgagaccatactgctcagtctaaccgctatggccgcctttacgaggctaatcccagtgatcacaagagcctccaagacctcaatcttatgatctcctttgccaacatcaccaaagtacgttacacgtatcaactcatgaacactaaactcttctcatatatgtaccattcaataatgccattaattatatataataacagggagctatgtcggcaccattctacaactcaagggcaacaaagatagcattcgttgtaaaaggcgaagggtccctcgagatggcttgtcctcacattaaatcggaccaaggccgggccggtcagcggcagggagataagcaagatatagagagagtaaccggacagctaagacgtggtgtggtgtttgtggtgccggctgggcatccagtcacaaccattgcctctggaaacagcaaccttcagattgtgtgttttgaagtaaatgcagaaggcaatgttagataccctcttgcaggtatataacatacaattctaattagggatataatttttcggttggtgtcgttcgatgcatgttaatgtcgtttttgattgatgcaggaaaaagaaatattgtgactgaaatggaaaacgtggctaaagagttggcgtttagtgtgccagcaagagaagtggacagagtgtttaagagccaaaatgaggaatactttttcccggggccaaggtcaacacaacaagaggaaggtggggaacgtgcttatgcatgagagatcatatcagagagttagttattgcgtactgcggagagagtatacccagtaatgaagtcatcacttcgatcgttttcagccaagccaacatatactatgtcgactctatatatgtatatgtgtatattatggaactaagaatgtatagccgagctcgaatccagtggatatataaaagttgatgtaatgtcaactccactggatatgtctttaaataagaatatatcaatgtctttaaataagaatatataataagtttttgtcgagataaacataaaagcagacttttttttttagcgtttataaatttacatattataactacccataatttggg

SEQ ID NO: 19228 - DNA, 3442 bp, Cannabis sativa
aggagttattttgggttgtatgtgttgtgtattttgacttgttattgtatatagtccttttgtaaaatttttataacagtgatctccggaataaaattttagtgtcattatgatgtccgttgcgggttttattttagttgagtttttaatattatcataaattttaataatttagttatctattaataaactagtttataaattcacacatatgacgtccctatgttagggcgttacaggaaagctctttggtaggaggcaaacaagaataatgaggatggacgagacctaacttattctgattttcctacaaattggattcggaacttagatgagaaaatatggactaggaggaaaagggggatatcaattggaagaatttacttcgctcatccatcaatcgaagaatgcttctacatcagaatgttcctgaattttgtgaaaggttgcactttctttcaaagtataagaacaataaatggaataacatacccccactttcaaagcttcatgttacactttggaattactatacgatgacaaagagtggatcaactgcttgattaaagccgcataccaggaaactagaaatagattaaggcatctacttgtatcgataatcattcattgctagttttgaatgcatctgaactttgaaaatgtatttattctataatgtttaaagacataaccatgttataaaggaagagattcaaaatgaaggatcttcagctaactaaacaacaagtggaagcatacacattatttgaaatagaaagtatcatgttgaaaatggaaaaaagcttaagagaaatagatggaatgcctttaccaaatgcttctttgataagagattcaaataatagattggtcactaaagagttggattatgatcgagatcaattaaacatgttgtaccaaaaatcttttgtcactctaaatccttgccaaaaagtagcttatgaaagaataatacatttagttgagaatgaccaagaaaatttgtttttcgccaatggtcatggtggtgttgcaaaaatatttttgtggaatgcaataattgcaaagctaagatcacaatcaaaaatagtgttacatgttgcaacttctaacatagcggctttgttattgcccaatggaaggacagctcattcacaatttcatatttcattggatattacagctgagtcaacatgtgacatctgacaaggcaccttattagttgggcttcttctaaaaccttctgtaatcatttgggatgaagtacctataacaaataagttttgttttgaagcattgaatagggtattaagggaaatttcgagaataaggtatgaaaatagctcaaacaaaccttttggaggactaaaaatagtttgtggtggtaattttagacaaatatttccaattgtgccaaagggtacaagagctgacattgttaatgcttctctcaattcatcttacatgtggccatttttcaatatatttgaacttaaccataatatgaggctccataaagaaaatgtgacaggtccagaagcaactacaatagcttctttcgacaaatgattgttacagattgggaatggatcattctataatgacatcaaaaattaaataattaaaattcttgatgatatctacaaaagcccatttgaagatccaatgaaatctattgtcaaagctatctacccaacacttttaaaaatgtacaatgatcttgtatatttaaaagaaagagcaatattaataccaaagaataaaatggttcttgaattaaacgagatgatcatgactatgatacttggtgaaggaagaacttattttagctccgacaacacatgcaaagcaagtgtcaacacaagcgatgaagatcttttgtatccatttgaatttttacacaacttgaaattcaatggaatccctaatcatgacatacgacttaaggaaggtgcactccgcctgtaatgttgctcataaatctaaatcaaatagaaggtcaattgatagtcacacatcttggtaaatagtccattctggggtgatatcatctcaagaataaatattggtcagaatgtcacaatccccaaaataataatgtctcccaatgaattaagatggccattcaagctaacaaacgataacttcctctggcataatgctttacaatgacaatcaataaaagccaagacaatcccttaaacgagtcgacatatatcttcctaaacaagtattcacacatggtcaactataggttgcactctctcaagttctactagagaagaattgactatagtaaatgtcgatgatgatatggaagaccgaacttgcataaaaaatatttgtctacaaagaagtaatccaaaatatttgtgcaagtaacttatttttacattaaatactcaaataaaaagaatactttcaaagataattctatattaatgctttaattgggcattttacttctttaacaaccaaatcattgaagagaacataaaaaccacgtccacgatctatcataattattatcctaatattctttttttttttgaaaataaagcgttcattatattaagagaagaaattggacctcacggtcattacaaaagatagcattcggaatagtagatacctctaccataccattaatgttcttggcaaaagcccaattggccacattatgagccacaaaattatattttctagaaatgaaagaaaaattacaactagtgaaaaaggtaaagagctgcttgcattgacttgtgtagttctcaatcctccaaaaggactcgtcacctttaagattcttgatcacaatcgcagaatcgctctccaccacaacaaaagggtgatgcatcgagatcgtcgtctccaaggccaacaaacaagccgccgcttctcctaaaaaagggtcagagaagtgaattttgttcgttgccacccaaaaaatcgcctcctgatgatcccttgcaatggccactgcacacatggtttcctctccaactctgacatcgcaattgattttgatccaatcctcaggcggcggggaccaaaccagtgtgtcttcaactcggtgagacttgaacaaacaggagccataatctgcgtaacaataatatatagaatcaatataatgtaccaaggtacccaaagagttattatgaaccttgtcattacgagccctccaaatagtgtcaaccacaatggaagcgtacaagaataaaccatcagtatccactcctctggacctaagatcccaaagaaatttaacccaattccacatgcgagcaccaaaatccacaacaggcataatcccccaaggggaggatctccagaggtgagatgccaaatcgcaaaagagaaacaagtgttccatggtttcatctccattcccacaaatggggcaggaggtctcgtcaataaccattctcttagagaggag

SEQ ID NO: 19229 - DNA, 3128 bp, Cannabis sativa
ataataattataataattttttaagaaagaatgctatatatatatcctaaattagttaagttttcatatggtacattgcagaacactagtctcaactgttcaatcttagcgcaccaatcaaagactaaaatttgatagtcatttaatattatgtccaggatttctaggagccagcagaaactggaaaacatatgacatgagtagaaatgctaaaatgttagaccctggtttaataaagtgtggtcgagtgtagcaaaaaaaaagggtatagagttattgttttggggtggttattgagtggggaattggttagcatatataggtgagtaagggagtggttggggtatgaaagaattgagaatgttctctgcatcattggtctgatagggtatggactcattgtattggggtggttactgttgctactgatttcctatcaataatagttcactccttcattttctgcattacttcactaaatctattgtgctggttctggtttgttgttctattggtgtttttctactatttgatcggtttgggtcttatctttaaataaatgtgatgtctacttaatgctatgacaaaaagtatgtttcagaattgtagtagttcctaattaagagacacaacatactatgaatgaaaaacagataagacacacccatgtaaaatgcaatataaagaatctcaccaagacgagacaaaatatatgatggaccaagctcgatcactaccaggggctaagggtctcccaaaacacatgcacttagtcactcccataagcagagattcacttgaaagaagaaacaaaaagcctccaactccataaccagttgcaacatctgagttatacgcacaataggttgaatttgtccgttcgtcattaactatgtgaccctgtcaattgaaaaagggtatggaataagtgaatagagcataataaactagtgctaaataagtaccacatgttaactacactttagattcttcctgaatagtagcaatacaaacattagcatgaaaacaatggtatattctagaccagattcgagattcaataaccaactaagttttgcattttaggaaatggaagacaagttaagttgatgccaaagctaataaaaaaaaagacattgcctttgaagtttatgcttaagtgtaaacttgacacaataacctatcaaattgaggcacagcaaaaccaacaaaactcaatttcaaagatatttcaaatacactatgcttcttttgtcaaaaaaaaaaaaaaatacactatgcttcatatgtaatcaaaaatcaaatatgtgaatctagtacataataaatagaaacacattgcaagaaactggttaggactgaaacctggagcaagaccttccaaaatccaaaaaccacacaaataagtcttgcttaggattcaccttatacagtctgtctcctaagataattatagtaacacaagcttgaaaagcaaaaaagatgtccaatcacaatgggatcttaatgtaaatgtcatcacatggagccaacaaattgcaaattaacaaaaataacaaactgtcgaccgagaattctttcaaaacagatcacagagtaaagcaacacatccgcaacttcacaaggagaagcaaatcaaaatccaatctattccattccattccttacattcaagacatgaatcacaataaattcatgtagtcggatcatgacacaacactatagattctgtttggaagccagacaccaatccacaaaatcatcgtcgatgttaaaaaagactaacaactaaaaaaaaactacccatgcatgacttcatgaaaaaataaccaaatgcatatcctataattaacaattaaaaaaaagtaaccaaaaacatctggttagcctcagtgatggatgtcaggataagaacaataacagacaaaaggtgcaatatcactggtaaattgataatgtacagtataagtactggttaatcatgatttctcaacatctaaatttgggcaaagtagctataaatagcgtagttagatataaataagtataactgtagataaagtaaccttaaagagaaatgttacatatcttagttaaaagaaacagtaacatttaaattactttaatgttcgaacatgtaacacgtcatatgacatttttatcctaatattaatatatttaaaaaataaggtgatgtaacgtttgaatgtacagcataaataaacaagactaataagcagtttaattttaactaatccctcctctaattgttgtcataaatttatataagcaataaattgaatggtttaattacacaatcagtagataataaagcaaaatgagatgaaattgacgaaacaattgtcaattagagtcttcacaaaacgtcaccgacacaacacaaaccaagtgctgtagagatcaatgcctctgtttctcttattcctaataatttgatacataaagattgatggtgttgtatagtccatactccatccataccataaaataatatgataagtttatgatagtaacgtatatactagtacaaaacctctcacatgctacagcatctcttcctgaataaatcaattaaatattacaatccagaaagagaaacacgaatattctctgaatttcaaaatcattacttagtatatttgcaggaattcggttaaattctaatactctatttgaaattaaatatatattatatataagtacactaactttatgcaacttcaagatcagagcttaatcaaacctgataataatctcactactccattaacacaacaagttaaacttcaaaatcattgtttagacagatcaacttcctaatacagagcacataaccaactcaaaatcaagataaaatctcaaaacgaacataaaaacgccaatttccatttctcatcacataaacgaaggaagtagagaaagaatagacttacaacgcttctccgtctctcggcggcaatggcgaaaccaaaagcgaccaagctcagaactacgacaagaagatgaaccagagaagatccccttccttctttcattggttacttcttcttcttcttcgtttttgccctaatgaagctataaaaatgggtaatgagagttcagagaga

SEQ ID NO: 19230 - DNA, 2182 bp, Cannabis sativa
aattgtgaatgagttcacaattactcttacacattcgagtcttagtgaggctgtggatttgcctgataatgcttcaacaatttttcgcaaaaatcttcttggaaaattcaagcctatttttttatacgatggtgagaaacttactgaaatgacgatgagtttgagggagccttctatcagaaaccgatttcttccaccagctttttttttggaagaaaacatggcatccctttgttgaagagcatgatatatatattcaaaatgtttgcgccatcaaattcatccggatggagcagctgcctgcccatctactggggtaagttttttgttttattgttattatttgtatatttttaatacatctttgaattataattagtaattttttgaattcaaaaaccacatgaattgattaacgatgagttcgtatatcgtgtggaggcttatgaccacgattggcaaaaattacccatgtttcagctcataaaaattgagatattgttatattaatatatatcctctgcatactgagtttatactttagagagaatctctgtttgtttttattttttgttttttgttttactaagtttattcacttcacttttacagagtaaggacaagctcgaatctcctacacggagattgtatgtcgaaaatcttccgcaggaggtagaaaatgaaggcgtggagagattgtttagtcagtatagacttcgggtattcatattaaatagtattatgtatttacacttattttgttttgattaaaagaagtatgagcattagtatacacatataagagaatttatatattactcataacccaacaaacataatcattagcaatgtgggagtttagccctcccaaaaggctgcattcaaagggtttgggaataattttcttctttttttatccacattaattgaaaagaattaaattaggtaagaagttcttcttcttctttcttttccttttttttttctattgatttattagaaattagatttaattttaaatctttattccaatcattttaattatatgataagtatcacatatttgttgagttgaacctaattaagggattatagtaggagaatttgagaataatattgaattgatttgagtctgatttatatatattgaattgaattgatttatatatatttttgttgtaattttttcgatacatttaacactttgtagcctagaaaaagaagcaaaagtagcccactaagaaaaaaaataattgatttacaaaaaatatagagcttaatacatttacttaatttatcaaatttttttagatgtatatatttttattataattttctttgatacatcaaacaccttatgatttttgttttgaattgatttgagtctaatcaatatattgaattgatcattaacaacatcaatacattcaggtgagcaaaagactttgttagcccatacgaagtttggaaactcgagagtcaccatcaagtccaagtacctactaaagatctgaatctttaggattagtccatatggacttaaaatcgacttcacaccatctaacttctatttctttggaaaagttatcaatataggtagtattcggtaaccattaaaaaatcagttttctgtttaattaatcagaaactaagaacaaattataaaattttgttaaggtgaataaagaaaaacaaaaaacaaaatagttaccgaacaagcctatagttttttcgcgtaaaagaatcgagatcttcatgactataaaacagatggatgataatgaccttacttgttatctacgacaacaaaaccttttagtcgtcaagggtgtcggtgcgaacagggttaggggaaggggatgggcaaaagggatgtatcattttgctagaatgttttattctgtttgaaatttttgacatatgttataatttattttgataattttcaaatagtaaattaataatattaatttttcagctcactaacaacattgatacatttatttaatttatgtaattttttaattgtatatatttttattataattttcttcaatagatagaacaacttattctttcgattttaaattgatttgagtccaattaatctattgaaatgattacaaacaactaggggtgttcaataaaatttacaaaccgcccaacccgaataaaccgccca

SEQ ID NO: 19231 - DNA, 5115 bp, Cannabis sativa
ttcccagatttcaagagcttcttcttctccggcaacggcagagaggcaaaaaaagggtctacagtttcgggatgggaatgaacagtccagagttggtgggggcacgtcgctcgagattgaatgccgccctagggataaagttatggtgacgatagagaatccctataagaagcttcgtaattataggggttcggttccaattcagaaagtctttcaaagactatggagttacctgaacgagccacgtgtaggggatttctcagggccagctggctatttaaatttaaatttcttatggcagtcggttgagaaggggttgacatttaaattgggccaagaagttatgggccgacaagtaattaatggagtgggccagacaaatgagggacattcatttgttaataaattggaattggtttttatggactctatgaccagaagcttgggcctgcacgcatatacccatgaagggccctacacgttaagattggctaaatttgaacaggagagaagcaggccgctttgtttagccaacatgaagccgttatctattgttagcaagaagaacccgacccagataatctctgaattttttgatggcatcctcaactctgtcaggccaaaaaaacgacaagattttagaagggcaattattaaattctgggaagaattcgccccaagaagaagaaattgttcaaaggcagtgttaaaagaatcggaaccaatcccagtggaggatgaaccagtcagtgatcgcaaaatggcagtgtatatcagaaaaagaaagtcaatatctagcagcagtggagaagaaatagtgacctcagttcgagaagacagtcttgaagaagtggcacagggcgacgacgatcccttgacgaacgacattcttgaattttcctcagaaagtgacaattcagaagaagaagatgacctaggagtagaagaagaggaagaagatcaagaggaaattttaaaggatatcaagggtctttggcatcacagtgatatgcctaggacgcgttcagtgaattctaaactgtgcaaggaagctggtgtggtgttagaagaagctacagtagaagtcgaaacagaggctgctcaagaaaataatcttgtgaaggccatggaagaactgggattgaatctgataatgaatgagagtgaagtaaaacaaataacgcaacaatcaaaggttgagaggaaacttaatagagagctcaaaattctggcctttaacattgactatgagaaaggccagaaaaaagagggagcccaaaaaagatcatcatgagaatcctaacatggaacgtaagaggaagtggagacaagtcgaaaagaaaagcaattaaggcatctattagcaaagtcaatccggatttggtaatatgacaagaagtgaagaaagcatctgtagacaggaattttattggtagcatttggcgttcccgctttaaagcctggatcttgattccagctaatgggagttcgggaggcacgttgctagtatgggacactagaagcgtcaaggtgttggattctttggttggtgacttctccatttcagtactaatagaagcagaaggtagaaccccgtggtggttttctggggtatatggaccgtgttcgtacaaatcaagacatgatttctgggatgagttggctggtcttagcgcaatatgcggagaattctggtgtttgggaggagatttcaatgtagttagaagggttcaagaaaaattgaatagtaattctcggactaagagtatgaagatgtttgatcagatagtgcgggaactgaagcttattgatcctaaattgaacaatggatgcttcacttggtcaaattttcgagaaaaacctatttgttgtaggctggatcgatttttattcaccactaattggtgcaacgtgttcccttacgtgagacaggaaatgctggttaggatcgtctcggaccacagtcctgttatcctggattctaaccctcctaaatggggtcctagccctttccgatttgataatcaatggttggaacacaaattgttttccaataacttccggaattggtggaaaaaaggaactgtctctgggtgggcaggtactaaattcatgagtaaattaaaagcagtaagaggaaacattcaggagtggagcaaaggaatttatggcaacaaacaagaggtaaaggttgccatggaaagaagactgttggtcctggaccgtctggaagcctctaatgtgtggaatcagtctttaatggaggaaagaaaggccataaaaaaaggatggcagcaactaacttttgaagaggaaagaagtgtgtggttgaaatcaaagtgcaaatgggctaaagagggtgatgcaaattcaaggctctttcacagtcttctgaatgcaagaaaagccaagaacacaatatcaagactcgaaagggaagatggttcaatcattgatagagaagaagaaatagtcacagagataacttcgttctattcaaacctgtataaagttgaaaatagacagggcataagtgtagaaggtattgaatggcaaaagattcctacgatctctgccactgatctggagaggccttttgaggaagaggaagtcaaggaagctgtctttagctgcgaagggagtaaggcccctgggccagatgggttcagtatggctgtttttcaaactcaatgggaggtaattaaggaagaccttatggaagttgttaagtcattcgaaagagaaggagttatccaaggtagcatcaacgagaccttcatatgtctaatcccaaaaaaactcaacagttgtaggataaaagattatagaccaatcagccttataacaagtgtctataagataattgcaaagatgctctctatgagacttagaggggtgctggagaaaaccatccttgaaactcaatctgcctttgttgaaggcagacaaattttggattcggttcttgtggctaatgagacagtagaggactatagatgcagaggcaaaagtggattggttctaaagattgattttgaaaaagcttacgatcgagtggattggaccttcctggatttggtattgtgcaaaaagggttttggagccatttggagaaaatggatcaaaggatgtttgtcttctacttcattctcggtattcattaatggtagaccgagaggaaagtttactggctctcggggcctcagacaaggtgatccactatcaccctttttgtttactctggtcgcggatgttcttgggaggatggtgatgaaggcagtaagttcaggcaatttctccggattcaaggtaggaaaaaagaagattcatatcagccatcttcaatttgcggatgacactttattctttgtcaaagatgatgactcgttgcagaagttggtacgaatagtggaagccttttgtgctatctccgggcttaaagttaatatgagcaaaagtcagttattgggaatttgcttggaggaggaaaaggtatcaaggctcgcgtctcagatagggtgtgaagttggcagctggcctttgttgtacttaggtatgcctttggggggatcgcctagaaaatgggacttctgggagcctatactgaacaagtgtgctaaaagactagatggatggaaatgctcatttttatcccgcgggggtaggttgactcttattcagtcagttctatcctccctccccatctattttctctctctttttaaagcaccaaaatctgtaaccaaagccttggagaagatgatgagggacttcttttgggaaggcagtgaatcgtcgggaggggatcatttagtggcttggaccgaggtctgcaggcctcgtgaagagggtgggttgggaattgggaacttggatttgaggaataagggactgcttatgaaatggttgtggagattccccctagaaccaaactctttgtggcacaaggtggtgttgagtcggtatggtaaggcagacaacttctgggacacaagaaaaggaagtcgtctctctcctaaaggcccttggagggatatctcagatttatacgacgaataccttggattagtacaattcaaagttggcaatggaggaagcatccgattttgggaagacatttggcttggtgactcctccctatcaagctcctttcctgacctagcagtgatttccaaggcaagaaatgtgtcgatcaaagacctgattgtcgatgaaggcctgcccggggggcgggtagaaagttgggatttcaaatttaggaggaatttattggagcgggaaattccaagactcactttgctactgcaaaaggtggaacatgttagagtgctgaatatttcgaacgatagccgcctatggaaaccagatccgtctgggattttttcttgtaaatcagccctatcttggtttacatctaacccgaacggtagtggagtttactggacaaagcctctatggaaaagttgcgttccttcaaaagtcaaagtttttggttggctcgtatctttagataaagtgaacgttcacgataagatgcaaaagaggatgccttacctatccatctcccctggatggtgtgtttgttgcaaagctagcggggaagacgttgggcatttgttcttaggatgcagtttcacccggcaattatgggccagattgataaaggaatttaagatgtcgtgggttctgccaaggttggtatcacaactgatagttagcaaattaaatggcagcagcaagcgtaaaacaaagatttggagaacatccatactagcaacaatttgggctgtgtggttggaaaggaatgctcaaatttttgaaggggttgggaattcaaaagaggacgtgtgggagaaagttaaattctggacagctacttggctttttaaaaccaagttttttgaggacttgtctttcttagatttatgtagagattggaattcattgtcgtaggggagtcattcaagatctctactgtttttcagcacctttggtgtgctaattttcctatttatttctttgtaatatggttttcctccgccataagcgaggcttcttaatataattttggaagggtcctgtagacttatggatcctttctcttttcaaaaaaaa

SEQ ID NO: 19232 - DNA, 5082 bp, Cannabis sativa
  modified_base (31)..(39): a, c, t, g, unknown or other
  modified_base (2086)..(2106): a, c, t, g, unknown or other
tttcataattaaacataaacaactgctaatnnnnnnnnnaactaagcgggctttacattaaccttgttaggtttaccagaatgcttaaaagactgttctagattcctaacaattgatccagatctgagaatatgaggtatcgaggacttaccctgagtcaagttactgttacattgatcgttcacttgtgtaaactgcagaaagtccatttttccatcttcagctcttttaatctcattcaaggaagcagtaggagaaagaggagcttggaacatgtcctggagctcagttgtacctctcttcccttcctgagatgcatcaggctcatcatcctattctgataactcaagcggagctatgccaattacagcatccatagttttcgtacgaattacatctgatacagagttagggcccttcttcttcggtttcttaacagagatcttcaattttccttgctgtttcgatctagttttggccatggcgccagcttcaacttctcccaagttaatacaatacaatgggactaggctattaccatactcatggggctgaatctctttaaaatctggtgttcattttactttactgtttttgctttcttttaatcacattacttaatcgctttattatttgactcactgtcattggctagaagcgaggtcaacacatttttttcaaattactccaaaaaaaaaagtactagaagaaataagaaaataaaattttataacttttatctttcacatgggatgaaaaatataagaaagactttgacaaaattatttgtgtaatggcttatattttgattaatgctgttttaattaacattctagaaattgaaataaattatgaactttgtttttttcttttttcattctagcataccacattaatgatcagtcggccacaacaatacacattacactgatttaaaaatatatattaattatattaccttatattataccaaatgatgaagctagctgattaaaaaggagtccaaaataggaggcagaattggtttcttcaataataatacatgtgtgaaaggaatagtgtcgtcaatccgtacaagtttccctcatcttcctatctctttccttcctttcacacaatctgggcacaaaattaaataatctaatcatcttttattatttttggtatttcaatttacaaggcatcttctccttaaaccaagtaagaagaaaacttatgtttatttatttaaataaaaaatatttacataaaaaaatagcctctttttgattaattttatcaggtggctgacaggtcgactgattaataataataataattttatttgtgagtactagctagctcacatgttgaaacccgccttagcctcattcatttctggattacaatgttgtcagatattcttgaaataaaaatggggattttggttgaaataggaaatttcatggactggtagatgggtttgatatgcccactaaggctgaatttgcttgaccttattccctttcggaacagaaagacgttttgttaatatgtgatatatacatacatatctttataattaccacacacacctttttgtatattaatcaatgtcaaaggtagattttgtttgactctttggattactgcttttgagaagtatttaacttgtttttattaccaaatagttttgactgtgtgaaaactataaacaggaatattttcatcggatatttaattaattttaatagagaaccgtaacttttaagtcagcctttatagtaacccgaagaggaaggctaattacaacctagctcctattattataaaaaataactaattttagttacaacttttaagtggcaatataaatttttttgtggttaaatgtaatttttggtcacaacaaaaaattacttgtcactaaaatatagtatttagacacaagttgtcactaatttacttttagtcacaacaagtattgtgactaaaaccacatttattcacaacaaattgtaatttttgtgactaatgcttttagctacggactttttaatcgcaatataggaatgataattgataattagtcataacttttttactnnnnnnnnnnnnnnnnnnnnngactaaaaataagattttttttaagtgtacattacaatctcttagtcaacctccacgttcgaaatcacatgccgaaatattttttttcaaaatttttttaatagcggtattcgttatagttacagtatgatccctataaatttttgaaaaattccgaataggttacagtaccgaaacagagttcttgacattccaatttaccatgcgcgttcaaaaaacttcaaacgtattttcctattcgagatttttcaaaaatttacagggataatgtggtaagcataacgaatacccccgtgaaaaaaatttggaaaaaaaatattccgacacgtgttttcgggcgtagaaagtgactaagagattattataataggaaattaacggtagcacacctcaaacataaattattgtaaaacaatatatatatatatatatatatatatatataaccttgattttttcaactgtcttgaaaatttagttcagtttttttaaaaaaataatattgtattaaatcaagtggatatgccaattcccattggaagggattataatatgtgtgcatgtgtgtgtataataagactccctctttctgtgtgtgtgtttgtggctctctttctacgaaggcgcattctaattgtaattcaacaaaggaccagaccccacaattacccaaatagggtaatttgaccacttatgtgctgcatctgaggctatgagttgtaatccttaaaaactgacatgactaatttgaagtgagtacttgaaagttctttttcaaagataagaaatagtcatgtacatactttcatttccatataacataaattagttgttgtttgttgagaaggacgacattattaatactatttttcatttcttgttaattaaatggatgtcatcattattaattggtaaatatatatacttgattctttgagataggaaacacaagagttatatagagaaaattttctttttttcttttaattattatagtagcttactacaaagatattgtaattttttttataaatattttaattattataaacaaatttgtgactaaaacaaaatatatatacaattaaactatttgtaactgaaaaaaaaaaaaacagatggcttttagatatattgttccagttgtttgtaatagatcagattatcttaatatgcagaaatttcgtaggaaagataaagaataggtgaaagctttacaaagctttgtaagtaacatataatcctttgtatagtttctaatagtttgagcatccatatatatattatcatttactaacaaaaacaaaataaaatacagatcagtctaaaattaataaaataagaatttggtgcataaaaaatctatatccatagtacatatattgtaacatagatgataaataatttatttttatttagtcacaataaattttatcattatatattaagttgtaataaaaaatacattagtggtaattaatttgtgtatgtattattttttagttaaaatttttgttgcagtggacttataacaaaataattaaaatttattatcacggtactcttcttgtagtgtttttaaccttaatttctgtcatggcttgctacattttattagtaagttttctcatcgttgtaatttactcgatgtactagctacttgctattgcttttgggagtaaaacatcctttttctagatatgaaatttactaacacatagaaatatagagtttatatcgagtaattttttcaccatacaataatagttgcacatgtcaataatgtaacccaaagttttgtttgtaaaatcataaagtgacgactttaagcacaaaagtgatatgttatgacttatgatcctacaaatatgctacatgattttcaaacaaaataaaatgttgtgatggtgaaaagtaattcaaatgcctaatttatgttgaaatttttatgtttttttgtttaagtacattttacaaaaaaacaataaacatatatatttatatggaggaggatttaatggttatattaaatatttaacgatgatggttacatttatttttagtcattagattactatttaatagttatgatatactttgaaatttaataaaaataaataataaataacttgtaacctaataataagttgatactttatttccttattaaattttaattaaaatagctatattttaaaattaaattaattatgattattaattatttttttttatagtttttactaaataattatcatttagcaattaattttgtttgcgcttaaattgttaaaatatctatagcaaaacatcttataattttaaattataacacatatgacctcatgatttaaaattttattacacatataacgttaattgtaaattattacacttatttatttattttatttaaaaaattaaaaaaaaattcattaggaattatatgatgaaatgtgaaatgggttgaatgtgtattttcaaaaaaaaaaaatgtgttgaataagaaatgagtttctcagagtcctcctgcctccacccctctcgattaagatatgtgtagattttgtttagaagtaaactattctctattattcatcttcaccagtgctttagaattaagatatatgtggaagtctaatttttgtacaaaaaaaattattgtaaatattataattaaatgaatttctcctaaaaagaaattatcatagggatttgtaaataaaaataaaattatttataaatattaattaataaaataggatttgttaaatattcaaattaaaaattacatattttaagaaaataattaattataatgttaattctacctataaataagtaacttgctattacaagaaaaaaaaaatataactacgaaatagtcacctatgtttatatatagggtaaataccattttggaccctctgttttgcaaaagttaccaattggaccctgtgttttgttaaatgacaa

SEQ ID NO: 19233 - DNA, 4795 bp, Cannabis sativa
atacataatatatcattattattaaaacaacaaatattttcaaacggcaaaacaatttttccttctattttctttttttcccagtaaaaaagtaggggtaatcagatattacaataataaagaaataaataaatttaacacaaatatatgtttttttttcttttcctctctctgattctcgctctatcacaacaaaattcagcgactaagataggagatcccttctctttctttctatctttttcaaaggttgaaatatccccagaacaagaattaaaacaacttctttaatcaaacaaacctattttatcattatccgaaatcttttactttgtctatgtacacataaaaaacccactcctttcgaaagcaaaacgtccaacgttacatccatggtcctaattggggctcatgaagccgccgaggactggtggtgagtatatgtttgggcttgggactgggcctgagcttgggtctgaggaaatgggtagaacttgggcctgttgattggaaaaccagctgcttttgacgatggtgattcactgttgttgttgttgttactggtaggattggtgttggggttagtaactgtgttggtagtggtggtcgtggtggccactcgctcacaagaggggcacatggtgagtgtagtggctgggagttgcatgtagaaagggtttgaagtcttcaaagctctgagctcttgaagctctttgtgaagccttctgttctcttcggtcaaagtctcacaacacctctttaagtactcgcaatcaacctctgtttgcttcaacttcgtcctataattattccaaataagaaaaaaatggcatctttttaaaaataagtcttataattacataagaagagacatatatacctcgctctacgattctgaaaccaaacttcgacttggcgaggtcgaaggttgagttgcttagcaagtgcttgtttttgcttctgaaataaaataataaaaaaaaaaaatcagtaaaatgatttgaccaaagggtatttgggtcttttgacttggaacttactgggttgagggtattgtgttctttgaaactttcttcaagaaaagcagactggtctttggagagcctgagtttcttcctgttgttaccgttgacgtcatcatcgtcactggctctaggggaagatctctctgcttcaccctccgagtactggtccctcttattattacctccactacccctgtagttgtacaaccctatatccatgtgaaacgacgacgttccaccactgtttgagttcggtgacgacgaaagcactgtcgtttcgtccgcttcctccgctgcagaggtgcggaccactactttcgaaaccctattcagttccaatattccacaaccagaactaccgccctcttgaaaaatgaacagataaaacgttaatattaaaaaaaaaaataatagtaataacaataagaataagggttttcatattcttaccctgattttcaatggaagcggaccaagggaagccgctaccgccatgggtgcgaggaaccggagtgtggggcagaaggtcgagctgaaccggcggttctgatgatgacacggtaccagtaccagtaccctcaatatgtgaaacatcgtctcttcttctctcctgttctttgttatttagttcttgttctcttccatttcgatcttcagctctagagcgtagtgggccgattgataagtccatgcaaaagggagaagcgttgtcgttatttgagtggtctcgttctcggtcacggtcacggccacggtcacggtggtgcttttctatgaacccaaagggtttgggagggtctcctaaactcaaaccccagctccatactgggaaagaaagcaaaaggaacgaaagagagagaaaaaggaaaaggagcaaaagaagacgagtacaataatcacaaatgggtttgaactgaaggaagcagaaagagtctttatagagataataaattcgatctgtcaaacattacgaacgcagacccaacagtgccattccttttcatgacttttttttttcatatatgtaaaatataagtaaataatttattttgatttttttgtaattattattattattattattattattattattactccattccatccatcctataataattttgccttgtgggaaaccagtttgaccgacaaccatctcttaggttgacaaacacacgtgaaaggctatttttattagagagagaagaaaaagtgaaagaaaaataaaaaatgataatttttataaacaaaaaaatgaataaaaaagtggtcccacattctcatcacacttatccatagcgcgtgattatcagatcaatcagaaaggggaccgcaaggtaggggctgattttaagtgccaattattgggtttttctttcttggctgcccagttgagccacttttaagcattgcgctttttcttttttctttttctgttttcaaatgtcgagtgtgttgtcgttccttttctaggttaaataaataaaagggagtttacattttacgaatccaaaacagaaaatatttctgtttctattctattattaaattttggattagctctttctattctttatttattggattttttttttacaaataaatcagtttggagtttttatgtttgatcaataaataataataataatatttctcaaaaaacaaatatatatatatatatattgatacattttagaaagatagttaaaattgttgggatcagtttatatgtccgatcaataatcaatcatggctttccctttcaacgcatctagggacgcgtcagagccaattagccaaattatatttttcactttaacttcatcgaacagacattatttttagaagttgaaataaataaaacggaagcactcaaaaaaaaaaagtttttaaaatagctcatcaagtaggcgagtttgatatgatagattaatgttctctagatttagttaatttttcagtagtcaattctaatcaaagtgtttagaacatgattatgctgttattttattaatagtatttttttcttgttacaatataacaaagtaggaatattatcattccatatcgattccttatcacgccctaaaatagtgcacatcaacttctaatgctatcaattacatcagatagtgcacatgaatctaaaaatagtaaatttacttttcttgctaccacctgggaatcgatttccaccaacataattgggagcttggcagcttggcatcatggtaaggtttgcttcaatgttatagcttcagccaagatcgaatttaagctccaaagaacttagctagcatatcctccagtatcatctaaaactgtgtgtataataagttgtatgaaattctatctcaaaatcaatagcaatgtgaggaatagttcatatatcttatataaaaaatgtgagattcactaacatcttcctcaagatgcaagttattttttgctcaccaatcttgtacagttcgatcacaagtggatcttttgactcacatcagctctttttagctcactatctctaaatcaaaatttgttcttttggctcgtcttttttggatcgatttttaaattttgatcaaatatttgttagagtttaggttggctctgataccatattagactttgtacaatgtatagatttatatctcaaaattcaactggtaatgaaaggagtagtccgtggatcttatatattttattatctttcaacatgttagcaatgtgagactctttaacatccctcctcaagaaggtagatgttttttgctcaccaatcttgaacagctcaatcacaaatgactctttttggcttactatctccaaatcacaagtgactctttttttagctctacttttttggaccggtttctttggattttttgcggctgtttttcttggctacactttttttttctcgatctgctttttgtttttggatcgaatattcgttaaaagttttttgtttttgctctgatatgatgttagaattgtaagatgcatgaggttctatctcaaaatcaattgacaatgagaggagtagctcatgcatcttatgtacgatatttagtttccattcattatcaatgtgagactctaacaataaccactattccaaaactaactttgtcgctttcaatatccatagctacaccaacatttaaattcatctttcctcgtagggatggcttccattattcctcaacagctgagtaatgtgcctctgtattaggaactattttttaattgagcctccctatactcattgatgtaatcaacaacccactaaaatacctctttcgcttgaaagtactttgatccaaaaagcttcgaatttatgtcattcttagtcattaaaattacacctaaatagttttcacaatcagatttatttatagtttttaaaacatttaacatgtaatctttaatatcaagatgtttgttttcatcataaaagctcttaaatggtgatatgttttttttttcatatttctctagctctaaaatgggtcattatttttgaccaattggtacaactagattagatggtcttaaaataacttttttatactataaatttagatctgtaggtaagagatgtttgtaagtcctccatatcaaatgttttattttggagttatccttgtatgcataacaaaaccatctcctaattatgttaagagatgaggttggtggtacagaaattgtatttttaattgataggctaatttaatagtggagttaccagatagatcatatccccaaat

SEQ ID NO: 19234 - DNA, 4554 bp, Cannabis sativa
aaaataatttccaacaaatagaacacctcagagcctgcgagctcgtgtgtttggaaaatagaaagtcaagctagaacttgacaggtcgcacacgtttaggcaatcaatcaagaatagtcaaaattggttttatatttattctttaaacatttgtattaattaaattatgtaattattgtaacaaatggtcatgtctgaccagttatgtaagatcaaatgacacttgctttctatttaaagtggtgattcaaatcaaataaacgaatttgaaactatttgcaaaagtagacgaagcaaaccgagctctgattgaaccattatacatctttgtcttatttactgtttactgtctttgtttgtctatttcatagtcaattctttaagtattcgccattctaggtgaatactcgtgtatctgctagtgtgtgttcttactctgctggaatactcgctatttttagtgttgtctaattttctctgacaacatttggcattgtttgtgggaaacactttctgatatacctgagattttggaggagaatcgcaatgactacaaaccatatgaacacaaatgagaacaatgggaccaacagtggaggcacgtctggtactctgatcgtcaacagtagaactgcccctgctaaggtcacatttagaggagtggggcataccactacgactcccttgaatcttttctcgcaatttttaggcctggctggagaagctcgacgccagtagtaattgtttgcaactttcaccaataaggcctatcccagtatgcaacgatgtaggaacacatgcaatgctaaaattgcaggaaggaatcgaaaccaagttggtcgtccaccgcgagttcctcctagccaatgacgcacggataaccaggtaaataacactactagatgtcatagtaaccatacccatgtttttttatggtctcatgtataacgaaagggagcgatccgatgagaacaatccaaacaagcctgatttgaactagcctccccgcgaccctacacgaggaaaaggacccactattccaaactcgagccagcaacgtagtcgtaaagaagaaagatcgcgccaatcgatgccatcctcacagtcgtgcacaacaataagatgaggtaaatccccctgatactttttccacttcctacaggtttaacaacctttctctcgatttctataccaggccaggttcagtctgaactagagtaatatgagactgtctgaacgaggcatttcttgctcgatccctaactccaagagatcgtagaattgaggaggaacccattgatgctcatgtggctgatcaaggtatccctcttgctgaacaaccctctgcatttttcaataatgcagttatgtagccaacccaacatcgacaatagcccgactcacagccacagacaatttggtcatacctacaaacataacagtcgtagctgccacacctagcaatcagatcgcacatgttaacaattctaacatcgtagagggaggaattgatcaggagaatcttttgcaagctctttgcatgatcgagcaacataggaagccaatttataagttgcatgggacgtcatctttcacagaagaaatgcgacaagcccaactctcaaaagtcttccgactctctgagtccctgaaagacaaaggttcgactaaccccatagattacttagataagtttaatactatcatcgaagttgactaggtactacaactgacaaagtgttgtattctcgctgcaactttggaagatgatgcacacgattggttcagccaattgccagaggcatcgatcctgatgtgggagacatttgtagacctgtttctaacacacttttaggcaacaatggcatataaactgtctcatgtaaggcagactatccaacatcaaacaagagtaaggtaagactttcagtcgtgaatattggaggttataatgtccattgtgttttagttgataatggtagcactgtaaatgtactaaacttccaggcatttaagcaaatgggattgcacaagaaagatctcaaacctgtaaccccgagcatctatggattcactggagataccatacaactaaaaggcatggtaaagttacccatcaccttgggaacaacaccgatagtggcaaagtctatggtagactttgtagtgattgaccaatattccacttacaacgcgattataggaagatcaattctgaaagaaggagatgaagatggtaacatcgatccatcatcttaccatgaactttcacacatccgtaggtgtaggttcggtccgagggatccggttcgactcacatgaatgttataacactgcagtcaaaattacagagaaaaagaagtcttgtaatatgatttatatgctcgaggctcccccgcctcgacatgaatcattctggaatgaagaagttccccatgtggaaaaacccaatcttgatcccaggatcctcgactacataaacacggcatagggacctaaagaaaccattgaggtactattgatccccttgatatttctaaaatttaaaaagttggttctaaactaattgtacaacaacgagaaaggctactcaccttcctcaaacaaaacctagatgttttgcgtggaaacattcagacatgatcagaattccacccaagatcatgtatcaccaactaaacattaatcctgacgtgtaaggagtacgataaaagcaccgtaaaaattgaccatgtgaggtaccaagcgctaaaagaataagtcgactacctactcttatgtggcttcataaggagtcattttacccaaactggttagccaatcccatcttagttccaaaacctaatggtttatggtgcacatgggttgattatatggatttaaataaagattgtccaaaagatagttttccattaccgaatattggccaacttgtcgatgcaaccgcaggtcatgaacttctcaacttcatggatgcgtactcggggtacaaccagatcctaatgtatgagcccaatcagtaacatacctccttcatcatagacagaggtttgtactattacaaagtaatgccttttggcttgataaacgcatgtgccacatatcaactacttattagcatgatgtccgtagatctattaggaaaaacaatagaggttgttgatctcagatttggccaaccgacaacatagtcatatttattactaatgcttaccacatgtacacaatgagaataggaaagtaaaaaggcacaatatatttatagaggtttgatccccttaattagcgagtaatgacctactccccttttggttgtattaataccagagataataccactctgaccacaagggttgtggattctgaagtggctctcttaggattataatatgagaatcaagttgggaaatctcatgtgagatagaaaccttgggtgtgtaagagatagagaggtagagctagagtttcaggcatagagcttcagagctttagggagcttaagacttagaagaattagggttaggttaatgctcttggaatgctttcttacactcccctgtccactcaaattttttgtttcctctgagaatattggagaagggtatgcacttgtccgtggatttggacacaaatctacttagtacagcaatacatttcatcaagatttgtacttctttgactgctgtgggggacttcatgtccaaaagggcttggatcttttctgggtttgcttatatcccttgcattgaatatgaaccaaggaatttgcctaagcttactaataaagaacatttgagggggttgagcttcatgttatacttttggaggatttggaagcattcaactagatcctctacatgcccccagcctttttggacttgaacagaatgttgaccacatacacctctatattgcagccaatgggatctttaaaaattttgttcacaagcctctaataggtggcccttacatttttcagcccaaagggcatgactttgtagcagtataggcttaggtgtgtcatgaagcttatgtgctcttgatttggtgggtgcattttgatttggttgtaacccaagtaagcatccatgaagcttaagatctcatgcttagttgtagcgtctaccagttggtcgatccttggaagcaaaaagtagtcctttggacatgctttattccggttggtgaaatctatgcacaccctccacttgttgtttggttttggcaccaacacggggttggatacccaaagtggatggaatgcttcggtgatatagtcatgagcactcaacctttcaacttcatctctaagagcttgggtgcgctctttgtctaaaaacatctttttctattgcacaggttagaagtttggatcaatgttgagggcatgggtcatcacagaggggtctattctgaccatgtctccatgtgaccatgcgaagagttccaggtttacctttagaaattttgtaacgccctaacaattaggcatgctacactaatcgattaagaaacactaatcccccaatccaggattactagaaggataagcgc

SEQ ID NO: 19235 - DNA, 4240 bp, Cannabis sativa
attcatcttcaattcgttaagaaagaacactgaacctccactgacttatcgtcagtcatctgaaatttgaggtagcaactgacaacgtacttcttagttccagcctcctcaatgtcatatttttttttgaagtgcaagcgtctcagatttccttagcagttttggcagaattatattagtcatacaaattatcagataaaccgatgagaataaaatttttgcacaaaaattcattctcgacctagcttgctaaatcaacagtttgcttatgcttttcatcatccttagcagtatcacaaacaacaggtttatcattcgtcaaaacaaaaacaatcttttttcgtagtgaggtaaaaagacattttctgtctccatctttcaaaatgatttttctcaaaacaaaaaaaaattcatttatgtcaacaacactaaaatttttatcggtagtcatggaagaaatacaacgtcttaaaattgttgtaaatagttgctgtaaaaaaaaaaaaagaaacgagtttaccgaattaaagtttgggttgagtcgagaattgtgttgctctctttaagacattcacgacattgttcaaaagtgtacaagcagattattaccctagagaatcgtcgaaataccagacccaataatcatattactgctatgaatacatttgtaaacacacccgcccccagttcggcacagtcggacgaacagcggcgagcgtgcttgtggtgatccggtatgtgagtcctcacccatgcacacaaaactaagtacctcttgggccctattcatattctaaatttacacattatatacacttctatttataaagtgttcttatatttcacttctcatatatttatttttttttataaaatttcattaaagttttaagttccaacagaatattgatattatttggaatctttgataagagctattaatagttattattgcaagttcaaatggtgtagtagttaatcccacaaaattgattatattgaagagatttacaaaaattagtttcgtaaattatattgttcgtctagctaggctaggtataagtctgtttaattccttgagactatataattgaatattttatttcttatatgggactctaattattattacaatattttccaaaaatttaaaccaaaatgcttaaaaaaacaatagcccccacataactgtataataataataataataaccttaaaaaaaaagtacatgcaagatacaactacaatggaaaataattaatgtgcatggttaaattaattagttaattacgtttattgtacggtataataaataatattctaacgtagacaacaaataaatcaaactataaatacacatatacgccatatcttctttactacttaatgtataattaaagtaatattaatttatagcaaagtaattaatttagtaaggaaataatactatttacatatatagcacgtagctagtttagttaatttatttaaatataattaattagagagtttttggcgtctataaaccctttcaattatcgctttatttgaacttaatactatcaaagttcaaatttatttagcactatttatgtgtgaactttttgcacgtttatatgagcacatttaatattttcatttaaaaaatttattctaaattaaagaaattgttagatttaataatttttgtctaatttcatttaattttattatttcagtgattgttaatgtgttaaattatactttctaaacttttatatctaccaaattatgtctttctaattttaataggtactaaatcatactcaccgttaaactttcattattaaaattggagaaaaaaatttaaatttaacaatctcagtaattcataaataatttttaataattaaaaattttaaaaatataatttaatacgtattaaaattacataagaattggagtcattcacttgagcttattgcattaatataatcactcaaaacctaccaatcgacaatattatatatgtgaacacatatttaaaaataaataaaattttaataagtagatttaaaagatggaccgaccacacaaataaagaattatagtacaaatttaataatcctaacccggtttattcttgcactcattcccaaacaccccacatataaaaaaaggcaaaaggaaacctccaccactgttcagtgtcacgtgaccctaagattttattcaccaaccgtaccacgtctacagatttccttgcccttcaaattaccataatacccttacttaatatgccccatgtgcccatttttcaggggtatattcgttaattcgctagaccccatggttggtccctgctactccgggggttgcaacccgcacgtgtgtcggctaggccactggccaaagcacgtgactaaagtggggtttgcacatgatatgatatcgttgaaattttgaaggatggaaaatttaatttagtttactatttttatttattttatgtgtttacaattttatctttaaatggataagaatgagtttgaaacgtaattgggttggttggattgatgattttatgtgtcaaactataatgatatgtaagaataaatgaataataatatattaattagattagtatatatgtaaaacaacataatataatatttttcatgtgtaaaaatccaataatgattgctatcacataacacttcactactttagtttacaaaagaaaaattaaaaaaatcattagtttgaatcttcttgaataataataaaatcacttatcatgtttcttttgtttgtttgtgtttaataaaaatgttatgagatcgaatttagttttatatttaaaatattgagtttttttagtaattctatcaatttgattatagtttttgtggaacggttttttaattagttgaatctattttttaactagacaatataaattttttggtggtttaatagggttcattaaaaaaaataggtatactgatttatctttttatatttttaatatataaataattatggtacaattttctaacattatttaacatcaactaaaataaaaaaaaaaaaattagagtttttttgttcttaaatttataaatatagatattatcttttttttttattacgagatttttgttattacgattagtcttgtctcagtgtaattttaagtattttagtcttatatgtgtgacattttttatattttattgttaggtgttctttgttcttcgataacttatcatcaaatcgcagtttgtagttaggaataaaaagttttttgcgattgaataagttgttagtagtgcagtcagtgacgaatctagaaatttggctgagtgagggcttgaataaatattaagtcaaaactaataaaaataactgataaatgtatcatttcaaatttgcatcttcaacaaaataaaataaaatattgtcaatagtgttattttattttttaataaagtgttatttttttattatttgtattggactacttttaaaatgggcttgattataatgagggtgggctcttgaatcatgattaagatattgagtgatggctttgtgaattggactttaataaattgagtgaaatgaattaatatatgtatatatctacatgtaaaaagtttgatgtatatatttgagtgagggcttaagccaacatatgggctaaagtccctccgtccctgagtgcgcagttacgtactttgcctaataattgagtattcaagttacgaggttgaatgaactgcaacagtttctactcttgtatattttgagccgtagatgaaacttaaaatctaagtgttcttaaagttaactttgatgttgtaatattttttatctaatttttagtttatttaatttgagaattaattgactaattatttaactcatttttgtaattttaatttctcaaacgggcgattttttcattaaattacacactattattttaactgattgctattaataaaattagatgatttatataaaaatatttaaaaaattattaatataaatttttttaatatgatagtatctattgtaattctctctaatccatgtactattttattttttgttttcatttttttcattctttttgataattaactttaaatgaaaattattagctccacttaaatattaataacaacctactgaaaatacttaaaacaaaagctattaatttttctctataaaaaaaatagcaataaaataaatt

SEQ ID NO: 19236 - DNA, 2276 bp, Cannabis sativa
agtatgaaacttataaaaaaatagggttaaaaagtaaaaaataccgcctgacagtatttttgtaaaaaatggcaaaagttagtataccatataaattttctaaaatataatactcccaagcccaagcccaagcccgagcccaagcccaagtccagcataacccaagcccaagcccaagcccagattagtttgtggataaaggcacaaacctataactcgtcgaaactctttatttctggttatactctgttttttcctttctcatttctgaaaccaaaaaactcagccatgggaggggcagccaagactcttctcaccatctctctatcctcaaatctttcatctttctctcgcgtctctgcactcagacgcttctctctcttcagactcacaagtcccaccagggtttttgtagggtttaggcctatatgcacagccacagtgagcgaaaccgataccattgatcccgaccaagccattcaaccccttaagcactcaatacttctcgagaggcttagattaagacacctgaaagaatctgtgaaacccccagaagggaagaaagggtcaccacaatcaggtggtagtgagagggagagtggagatgggtcacagaagaagaagaagaaagttgttgagagttttgaagaattgggtttgactgaggaggtaatgagagctgtgagagagttgggaattgaaattcctactgagattcagagtattgggattcctgctgtgttggaagggaggagtgttgtgttgggttctcatactgggtctggaaagactctggcttatatgttgcctcttgttcaggtaccttcttttcattactattctatgcaattctgtggtttattactactttttatgtttgtcaatggaattgtggagttgggtgtcatttaacatccgggttttatttgtgttgagtttagagtatgaatgtatgatgtgactttctttgggttttggtaagctcttgatatgtgcaacttccttttttggttgaatttgtgtttgttacttatgataaaaagagaataaattaaattgatactagaaataatttgttgtatgactaatccatggctaatcgagagttagcgtttgagtgtgggaggtcattatacttagttcgagctagcttaagttagttcaatagttcatcatactataattatatatgtgcttgttgtgaccacatcaataaataatctcagaaaatgaacaaaatgcaaccgaaggtgcaaatttataattgttttcatagttagagggtattaaaaaatactatttttttcatagaaatatctttaattcctgtaatctatacagtttatctaatgggttctgaaaatgagctgaacttgtagtgtttttagttctttaaatatgaacagtttatctaccttggcatattaacgaattttcaggagttttacatatggtaactgttgaaatatgttgagttttcgtaagttgcgtgtatatattattagtctgaggactgtggttaatattttgatgcttcagttgctgagacgggatgaggaactatctggtatgcaaatgaggccaaggcgtccccgcgctgttgtgttatgtcccacaagagagttgtctgagcaggtgctttgtgtatagctttgtagtttggggtgacattatatactttgtggattgctctgcctttttcagctaactaatttgggcattgcaggtgttccgtgtagctaagtcaattagccatcatgctcggttcaggtctactatggtaagtggtggcggccgatcaagaccacaagaggattcgctgaataatgcaactgatatggttgttgggaccccaggcagggttcttcaacatattgaggaagggaatcttgtttatggtgacatcaaatacgtggtaagggttttttttttctttctttcacaatgattactctatttgcgtttgattaaatagctgtatcgtgcatatcaaccttgcactctattaagccactggtttggtgcaataacgtaggcggtcttaatttatttcatttaatgtactggtaggtgttggatgaagcagataccatgtttgatcatggtttcggacctgacattcgcaagttcctcgcccctttaaaacatcgctcaactaaacccgacggtcaaggattccaaactgttttggtcactgcaacaatgacaaaggtaacatttatggtcatattaaaagattttgggatctttgtgttctgcagatttagatatatata

SEQ ID NO: 19237 - DNA, 4607 bp, Cannabis sativa
  modified_base (27)..(39): a, c, t, g, unknown or other
  modified_base (1312)..(1318): a, c, t, g, unknown or other
  modified_base (1990)..(1992): a, c, t, g, unknown or other
  modified_base (2747)..(2754): a, c, t, g, unknown or other
ataataatttataattagtcataactnnnnnnnnnnnnntcacaagttttgttgtgactaaatgtaagattttttctagtgattttaataatattctattcatattttattattgtgtatttatatgtattaaaaaaaataatattttaataaatttaagaaaaaaaaaataaagaaaattgatatataatcttatgtaaaaattgacttcatttgtttacatttaatgagacaacaaatctgattagttcagatgtagacccattaagattgtttgttttttacttaattttaacatcttatttttacttaatccatcaaaccacctacatgtggaattgtctcttaaaatagtttttttttttgttaagatataatattttttagcctttgcattattcattttatgttccaatgctttataatgtttttattttatatataatattgtatatatttacatagataagataatattaatacattataaataaatcttgccagaaaaaaaaaaagatttgatgattaatatgacgtggtagaccaccaataaaaatattatattatgtcatttaaacataagaacaaaaagattaaaaagatatcattttatacattgataatttaattatttctttttaataaatttcttttaaaatttgatacttgaaatattttaaaattaatcatgctttgtatttagatatttttttaaaataaatttaattttataatttgttaatatgataaaattaaaaatactaaataaaacacattcatgtgagaaaaataaatagtctaaatattttaatatttatattcacagatgatattttattattctaatgcattaagattcaaattcaaatgtctaaatcttttaaaaaataaatacactctaaagaataaggtagaaaaattgatatgattgcttgtaattaggactgaacatactgatcgagtttgacccggatctggccaacccgacctggtcaactcgtaaaatttaaaaaaactcgttctgttcgagtgggtcgggtccaacccgatacactttcgaacgagttcatgagttagttttttatggtcatcgggtttcgggttgaaccagaattcgcccgccaacccagttattttttattatttttatttttattacatacataatatattaaaaataataatatataatatattatataaagtttgaaacttaacttttgtcttttagatttgaaattaatgtctttttttttttttttttattctaatctaacgaatatagattatggtattataagtttataacttnnnnnnntaatttaatatatagaaaaaatcacataaaatttgatttttttttaaaaaaaaattaacgagttgatcgggtcaccccgttgacccacccaacccggtcaacccaaacccccatacccgcaaacctgaaacctgcaaactcgaatcatttcatgggtcgggtccagcgtccaagtacaatttttttaactcaaaatctacaaacccaaaactcgatcaactcgcccgatgttcatccctactcgtaataattgataatagggcttcatctttattttgaggcagctgaagcagttgcctaagacccctcagttcaacaggcctctcattcttctctttttcttttaagaatctttttcaacatcaatccatttagaccttaattttttttactagaaaaaatgtttaaaaatttacttgaattttattttatttttcaaattaagggctgattttttataatttaccccaagtttcataaaaacaaaagctatcgaatgtatagtttttgcatgttgtccactagttagaaagagctaagtgagtgtggggtaatatatcgacatttttttgtactttaatatttaatgtgcaataatatatttaaatttaaattttacttctttttttcttttatcctttttaacagatttttttttttatttaagcgttnnnatattacacaatgtataacttgagattcgaactcaggacctccacaacacatgcactctcctatagcctactagcctcaagtggttctttttcaacagttcacatatttgtgacaagaaaattaaatgagaaacttattttatgggtcacaattatggccacacaaattggaggccaagaaaccaagactttttacttattttggaccatcttatactccaattcctcacataagtgttatactaattaaactatgtgtttgaaagtaagagtataatttaaggttgtacttaaatttttgtaaaccccgcctaactcgaacaacatgtttaaattaaatcgagataatttgacgaaaaaatgcaaactgaaaaatccaacaaaaatataatctgtctaatttttatattgggcgagttaaaaataatatcaacccgcctaatcaaccaaaactaactcgacaatgagtttttttttatatatataatctatatattatataatttatatatatattttaaaaaaataaaaaaaaataaactattatatttcttttatagcagatgatttgaactttgaattcaatttatatatttgtctcattatcacaattaactaaaatataacaattaaatgtgaaaaaaaataaacattagtgctcagtttggacgggttaacccgaccactacaagaaatgttacttttaccagcacagttcactactatgctcgtaaaagtaacttttaccagcgcannnnnnnnactgcgctggcaaagaggtcaaaattttaccagagtacatttgtatggctaaaatttaacttttagaaaagtcatttttgccagcgctttttattttatgctgacaaaaattctaataccaacattgatttgtcaattcccttttgccaacacatcacaagtaaattctattttaccaacgtaataccaacttttgccagcacaaaaatatgttggcaaaaatgacatttcttgtagtggaccaaaccgaccaatttattgagcgggttaaatttttttttaattgggcaaattgtatttaaatttttgtaatccaatccttaaattggactgaataaaatgtagcgtaagctgaacaaatcaattaacgcacacccctaatgtaattattaaataatataagacttatttgtaccgcaggttcctaaactatacatgttttggcaagttggtcaaattttattttttgacaaattagtctccaaactatataagttttagcaagttggtccccaaatactttatattttggtatattgatcccccaaacttttatttctttagcaacattccattattagatattgacatttttattatttattttacttacttatttatatttttatgttaaattcaaataattttacttttttaattttaatattttgagaaaaataattatattaatattttaatactttaatttattatattcatatacattaataataataagaaaagaaaaaataaatactagcggatacatatactagctagagagaattttagctcctcattttttttttatatattttagcatttatagtacattttattgttgatttatgaatgtgtggtattataattttaataattttttaattatataaatatatattgattatttaaattttgcatcaacgatggtaaattttcataggttcgccgcgaagcataagttcaggtaccctctatttgtaaaattagtaaaaagaaaaagtaccttacacacgattttggtcaataatattttcatatggccaaatttactctctattttcaattagttaaactatgttgtttgtttaccatattttgaaaaagaattaatattatttaaagtaaaaaaaaaaaaaaaaaccgcattaaaatagatgtaaaatagtaaaagaaaaatatgtgtgtcttttcgtctctcacaaggtatagacccaaggggagtgagtgcttctaacagagaggacaaaaacaattagaaaaagccatctgagttcgtggaggacatcatcggacactacacccacacctcattgtattgtagcattagtcatcttctatggtgtgttttttttttctttcattctttgtatcatactatttttttttatgttttcttatcagttacattatgatggggcaaaagaaaatgtattattttcttacaataagtaactacctgtatatcatattaaaattactggaatatatataattgaatatccaaatcattatatataatatatttatgtgtgtgcatatttgtatttaaagtctgtatagcttaagttgtcatgtctcttaaaaagatgcctttaataattcatagagagaaaaaaaatattatatttgatcaattttttaatcatatacatatataaaatatatgatatctacttactagctatgattaacattatgattaaaataatgaatcaaaatactatatgtgtttttgagtattaatacttttttatttgacatatatatgtattagtaaatgttaaaaaattaaattttcattttagatagaatgtatatcataaactcatattaattatctctctttgttc

SEQ ID NO: 19238 - DNA, 3351 bp, Cannabis sativa
acctcaatttgatcatgctccaccgtatgaaatatattgtgtgccacgctccttattttgagcattcttatttggcacgaagtaatatttatcaataattttttataataatatagtgttcactgttcactacaccaaaaataattataataataatattaataattttttataataattatacttaattaaaacaataataatatagtgttcagtacaccaaaaattagaattagtaacaggtatccattaatatttctctttaaatatattaagtcatacattgtgggacaaaaaagaaagaaaaaaaaaactttgttttcactattttagagaatcatttagcgaaaagaattactaagaaaaagccatcaactaggcaagttgaagatccattcaaaggtggtgctcccaattaaaggacacgggggaccaagtcttttattttgacagcaagattagataattaacatcgatggtttttaagacaaattttactatacaacaccgattaactgacaatcatcactaaactttagctactccaaaggaaaacatgttccttttaagtaagtctatcaatagagatgtagcaagctatgtggagtcgggtaatagtacaattctaatgcattggattctcgaggctaatgatcttaattatatacaaaactataattaaattaaaaacctactttattttcggatacccttgttattaaaatccactagcaaccctgccaattcattggctagtcctcataatgctaggacactaatcggattccacgtgtcattccacgtatgtcttattgcacaaaatccttatagcaagtggacaagtatctatttttcttctatcccataggaatgaaagttttgggaatctggggctgcattaggacaaaactttagtccgaaatgatttattaaaccttcataacccaaacaaataatgaattgataaaataatgagggtaatttttgtgagaaaatgaaagcaaagggtagttttgttagaaaaaaatacaaccagcggaaacgacacgttacggagctatggagcccactatataaaaattccaaatggtaaattcaacgtcactaaccattaaactaaacatttcccgccggattttaaaattctcatccaacgtctcaaatccgttaatcatttacatgctgacaaatttggaccgccttattgtttgtcctcttctccatgcacatttctgttaggtgatcaagccctttctttctatggctcaggctcagcttaattttcttttaggaagagctccaatcttcaaggaagctgctaagtttcaagctccacgttggcgtagtaagtaaatcatttagtgccaaaaaagattaaaccaacctaactaaatctactaaaataagctatatagtatatggagcttttagcattcaaatatacataagagcgatttgtactttttttactaatcaataattaagttaatacggagcttttaatgtgtcttatgtatataaataatattattatatgcaaagctgagttcaagttgatcatgattcatgaggcaggcaacttgaaagtacatatatcacaatacgtacaaagtattgaaaatttaaaaagaaaagtgttaatatataagaaaacaacaaacaataataatatagagatggatcgatgggtatataccgatgctactcatcacttcttggaaagcaacctctttccttacatataccaccaaaacaacagcttattacgtcatttaataatgtctatatatatatatgatcagtaatactatacatctaaaaccaaataaaaataaataaaacctaattgcacattataatagtaatggctggaagtgaagcaaccaaaactagtactagtgctacaactaccactgccaccacaaatttggctcaacctcgccgaccagccgtccggagattcgtcggtgtccgccagagaccatcggggcgatgggtggccgaaatcaaggactcctcgcaacgagtcaggctatggcttgggacttacgacacacccaaagaagccgccagagcctacgacgaagctgccagagccctccgaggcgataatgctcgcaccaacttcgcaccatcgccacctgccgacgccaacagctcagtagtaccttgtccaatagtcccctctccttctggtgctggatcagcgagcggtggcccggaagggcggcaggggctgagcttctcttctattaaggccaaattgagcaagaatctccagagcatcatggcgagaaatagcgagaataataacaacaagtcgaaaagtagggttagcgaccactttacctttgctagtatattccatttcaggaacaagtactatccagatcatcaatatcaaaactccacgatgatgatgacgagaaacatgaatatagatcagacagtggtgcaaccgagtattgtggttccttcttatcatcatgaccaaacgacgtcgtgttcatcgtcgactgcgtcttgggagacttcgagcgtttcggattgcagtcctgatgaatgggtagggtttcggcaagcgggtggcgggttcgattcggacgggtcggaaatcggagaagggtttctggatcatcaaattataatgaatggtaataataataacaataatttggggttctggatggatagcccggatgtgatgagtagtagtggaagtaataatagtagtaaaaggttcaaggtttcttcgtctgtagtggtgcctccaacgttcaatactactactacagctaatacgtcgccgtttttatatgacggtcatccagagattatgaactgagattatggggattaattagtgcttcaactccagttaattagtaatattaatttcttttgttgcgtgtatgatcaaaagtttcttatatatatgtatttggctgagaagtcagcctttgctgatatatggatctgatcaaattaaagatgtagtcatcgaacgttatatattcagatcgaattatagaacacaagttaaaacattccaagatatatatatatatatatgtacatagaaaaattcagattttgaatatatataaattaaggagaggttgacacatatatgaaatttggttggtatatgtatacaaagacgaagagtttattattattaaaggattattaacagaaaaagttaataatatatgcacgcttgcgcctttgggatggatgtttgacgtgatctaatattactacagacagtggcggagtaggggtgaatattagtggtgggaagaatttttttttttactaaaatatagctaataataataataattatta

SEQ ID NO: 19239 - DNA, 2259 bp, Cannabis sativa
gatattgatgataagatgtctgtttcattggagttgttaattaaaaagtatagtggtcctaaagttgaggattggatagaaaaattggatggacttggatgggaggagcctttgtatagtgcaactattggtatactttgtgaaggcgatagctatagaaaagcatggatgaacatgaaagacgtcaacataatatagaattgagttaaggccacagggaaaaattaggatattttttatttagttaattaagatataattatgcttagataacttttatttgttacatcatgtcatgaacatattttttcttttgtgtatcgaactttattgatttattatagttatctatgaatgtttcattttcaatcctagtattgtctttttaaagtggctataatttttttaacagatttaatatggaatttgaggatcaacttttactcttaatgattttctattggtatgtatgtcgtaaatgcaactatttaatataattatagttatatttatatattatataatttatataaaattaaaaaaaaaaagtaaaaatcgggttaaatcgggttaaatcgggttgggcggtttaattgggcggtttgggtcaatttttaacccgcccaattaactgattgggcggtttagaattttttcgagttatgtcggtttgtattttttatcggttttgttggtttggtttgggcgggttattcgggttgcacagtttacgaaaatttttgtacatacctagggacaaggggtctccttgtctaattcccctaggaaaggagaatttttttgagatattaccatttattgaaatacgatagctcacagaggaaatgcatctcagcactaaggaaacaaatgtaggaggaaaaccaacatgttgaagaatggtcttgagaaagctccactccaacctatcaaaagctttttccatatcaagcttaagggcaacccaacccatttttcctttcttctagtgtgaatggcattaataagctcattggcaattagggtgttgtcgaagattaaccgacccaattattaagcactctgattgcaagatatgatagtgtggagaacagttttaatcctattagccagaacttttgaaatgactttatgcaaggtagagcaaaggcttataggacgaaagtcacgaaaggtggaagccttcttcttcttaggaattaagtccaggacagtttcgttgacaagagatatatcagagtttttattaagaacatccaggatggcactatagaagtcttcaccaatactctaccaattcttttggtagaaaaatgcattaagaccatcagtgtcaggggctttatcacctgataggttaaacaaaagcttgcttaacttcatccgtggtaaaaggggcatccaagaacgaagtttggaattgagagagatggctggagatcccctgaaggatgttagaaatatcattcttgtcgtcttcttgagtacagaaaaactcaaagtagaagtgaacaaaatgggggatgtcttcagcttacttttttgaaataaatacaactctaattaaatttaattttttcttatatttccgaaaagacatatcctcttaatcactgtttccttaatttctttcatcaagaaaccaagtcaaattatataatgaccaacaactttaagagcttgtacaagacgagggacacaaggaccttccccataactaattttaatatgtgcatttcatttgcttcactaaaggaaaaagagcttttacgaatgatatatgccattcctaaagtccccagtttcgttcctatagggttttgagaatgatatattgtgtctaaagaatcattcctattgttcgtgcttaaaaatattattaggcacgactttcaccataagaaataacttttaataaatatatggcgtgcttaatatatttacattttaaggttttaacggacaattaagcacgatgtatgttttctaagaacgacatatattgagtatttatttttaataattaaatattaaatattttatattaaataatttaaggtgtgtttttttgagtgtatcattttaagagtttaatagcttaaagttttgagttcgaacccatgacttcttcctttttccaatccttccctcactactaagctagccataatttaaggtgtatttggtagtactttttttaatcaattttttatttttaaaactagaaaagtaaaaatattttttaaaatcatgttctat

SEQ ID NO: 19240 - DNA, 4238 bp, Cannabis sativa
atttttgtaaatagcccttaattgtaattatatgtctacaatatccagcctatattgttttccttgcggaaattttcagaaaaatagcctaagttcggaacctcttaaaagaaatctcaattttgtaaattttgttcagtaaaatgaccaatgttggataaaattgtcaaattgtcaaatgaccaatcttttcttgacatcatcttgcctccacatatagcttttcaataataataatagggaaatttacaaaattattagaatttaggttaatttttacaaaaatactatcacacaaaaaagttttcaaaaatactgtatttttataaaacaccaataaaataccaaacacaacaactcaaaacaactaaaaaacaccggtagaacactagtgaaaatttaacacagtatactgcagtatgaaatttataaaaaaatacagtaaaaaagtaataaaaaataccgtcagacagtatttttataaaaaaataacaaaaattagtgtaccatgtaaatttcttcgggcatgtttagaattgagaagttcagctatgattataaaatgtgctgggcctagcctataatagccctttgataagttagccactgaaacctcaatacttcgacgaagaccacggtgagtttgcttttttgctcttttcaaccatcattttatttcccaattagtttggaactcctatttttgctggttatttgaggaatatgaatttgatgtacaaattttatgagtatctccaatactattgagtattgctattaagcattactaaattgtacaatacgattaagagatagccctctcggaagtgattttttataataatgataagattgaaataagtaaaataggatattaaactgtaccaataaatacttatcaaaaaaaaaaactgtaccattaaatctaccacctcatatagtaatgttcaacacaaataatattttataataattcttttaagaatgacgtatgtttttggactgtatggaaaatttaccactcaatacattagtttgattttgtataatgaatttaataagttatgtgcatgtgtagaaggtggagttttttactaacatgtctcaataataaaggtcgatgtgaccctataaaagatttaaaactaggccaatcatttttagacacaaacgctagtagtatattatatttggtgtgaggaataaaagtaagtagttatcagagttacaaatactcatttaattcactgctgcctaaattgtataactcaaattcatgatttgtaagagttggtcgaggtttggaaggtatgccaagttgggagacggagacactttcatttcaatcttcgctataattattataacataaaaatcaaatcactcattcttttcaatttattttgattttttaaccataatataggtggtatgccaatttttaatttgaccattgcttcaatctttagattattctaatgtttttttgataagctacatagcaactattgtttagtttttaaaggtaaataataaatatatagcttcacgatttattaaccaaaaaattaggtgtggtatatgatcatgctttaccttatgttattattatttctcgtcgtaaacatgttattaaaactaagcaacagagatgagataataatgatgggattatgagtacctagtcaaaatagcaatagcctttcattctttttttttttttttttttctttttccttttttattcattaaatattttatatatatttatatatatatatcttcaaccactgcaggttgagggtttcttcacccaccaacatcatctttgctttcaacttcttgcttaaatttctttctgcagtacttaagttatttaactaaaaattcaagattttgatctttatatatgtatgtgtgtaatcaatataatcaaaaagttcctcaatttcattcttgaaaaaagaagaagaattcttcaaattatttgttatagaagatgcaaactttaaagccaaatttcaaactacatttaagaaaaacgataactgattactttgaccacagataaacaaaattagatgcggtcagataacgttagtactttaggatgataatatttttttttgggtttattatggaaagtttatttacaacaaatataaacacatcttattttaatatattaaatagatttaaattaatatcaacataaaaatttaaaaatatatatataaatgaaaaaaaatatctataaatataagttattagtaaattattataaataaaatttaacaaaacagctagttttacttttaaaactagaaatgttagcacgtgttaatgaaatttaatattaagtcttatatataaaatgttaaaaaatactattagtgtttaacactactttgagggttagatgttaagtattagactctatacaatttaatttaaatttattctagaataatactaactatttataatagtaatctcaaggtggtatagcaaatgaaatttgttaaactaatgaaataataaaatttataaaataattttacttaattaactctagacataaatttatggctggttatgagtatgtaattcatagtcgtttcagcgactatataaagttattttactaattaaattttttataaaattattttactattaataatttttataaagtctagctcaagtgattatagaaagatgcacttatattagagatcttgtgttcgagtctcaaatacgctataatataaataccataggacacttctcaagaaaaaggaaaaaaatacagcagataaagattagttaacagtgtggtgctattattattgtctactcctattggaaccaaattcagtaggcacacacaaatttatttatttatagcagccaaaaaataacagaatttatttacaacaaccccaatatctgaccagaaaattaaaagagcctccctaggataaatccatttaaaacaattttattttcttagcattgtagacacttcttatgtctagtaacaaagtcaattcaataataggtatcgaaatttcctggtctagcacatgcatgtttttttgtatagttttcgtatgacgactttaattgcttccattttaaaacttttttttcaaaagaaggatattgagggtgaaattatttaattatactatttgtgatatttaattttataaaattgattttttcatggtaaaatttttcgaattttatttctgttttggtatttatactttcgttaaaatattacggttaaaattgcttcaatagttcgaggggaatttttaatggccaaaaacgttcagggagcacgatttagtacatgtcaaaattcgggggggaaaattactaattagcctaaaaattaggattacaaagaacaaatgaaaaagaaagagaagaaaagaaaaaagaaaaaagaaaaaaaaaatatttttaattagttttcctattttaaatttatttatttaatattgtaataattaaaattataagaacaaggcatgtgtacatgatagctattctacttggcatttaacaacactattttaaccaaagtgtaaatatcaaaatagaagtgaggttcagaggattttattatcaaaaaattaatttgtagaatcaagtgtcacaaatcgtataatttagatagttttactgtcaatataaaggacaaccttgtttctttccaatagataaattaatcaaattttagcacccatttgttggtaatcttttattttttttacaaaaaaagtaattaaactttattaattaaccttcaaattttgcttccaaacaagaaagtaatttagatggaacgttcccacactaaatgtaccattagatagaaactagaaactcttgtaaataaatgagcaactaaatttagtcaacgtttaaacatttgttggtaattttatatatatagggacacgattttcttttgctattgtactttcacggattgtaatctgtgatgtacggcaaccgttggatcgggtagttaatttgatctaatgggtggggttgatctaggggtatttagggttaaaaaaatggcaaccggttaaatttttgaattttaaatttattaaatttaaaaaagttaaaactgacatccatcaatcacatcaaccgtcgtcctccactcttccatttcattcttcactttctttttgtttttcatttttcatttt

SEQ ID NO: 19241 - DNA, 3023 bp, Cannabis sativa
tctaagtgtccatatgagagaggaaatgacttttaggacaaaggtccttgagccttggtcaagctttgtgtgtgttattcttcttcttcttcttttttaactttcttgtaatcttgataaaatacttctatttttattttgaatattttgattgtaattctatattctctcttgtaatgagaacttttccatcactatgacaatatattttctttttatttgaaatttggtttgattttgtgatcgtagatgaaaagccaaaataatgtgaaaataatttatataactttttcttttttggtatgtatgtaaaagctacattagattggagttggacttggacatagaagtttgaaaccaaacagttaaacagttaaattatgacatagtttaacagagatgaatatctttttgcagtaatgactaaatggtgatgattagatgtagaaaggaaaggtaaaaaaaaggtaattaaaaagattgagagaacaaaataggtcccataaataaaggagtgatgatttcaatatttgtccgccgtccaaacaaaaaattagtaaataaataattaaaaacaagtaattaattaattaatattcgagtcatgttagttcagatgaaatgattacccactcatatggtggtgctggtggctgttatgacttcggaaatcttaactaactaattgtaaaaagaagagaataggaagcctataattttaattttcaaaaaaaaaagaaaaagaaagactttattaattttttagtcggaaaaggaaaaggttattgttattcaatgagtagtgtatgatatggtatctagtaatctactatctaccaatgtcattgtttataattttctttttttacaaaaattggaaaagtttgtatatgccatatctacaagacagcttctagtatatctagaaaacagttttgaggagaattatacataaaattattgtcgtgtatgctacattataatttgaatatgatgtgagtttttttttaaaaaaaatattatacataatcaacatattgtgtaaatcttctaaagacaatgtactatgtaaatataaaataaaaactaccattttattatgggattatttcagaaatacaaaaatatgattgtactgaattttaaatagagaaattatagtaaatgacttcaaattataggaatatgttagtaaatattcctgttgaccaagattttcagcaagcgattaaacgagataatgatgagagctttgagataattaatgcaggtgatttttacgtggttcgggaattaatgagccatagtccacgagtctttgttattaatgagaattcttatacagagaatattcttggtgagtttttctctctctgtctctctctctccttttttttcgatctcccttcccattttgttcaagggtatttatagagatttacaaggatggttcaaaaggggtcacttgtcttttactgccagtaatgtatgagcacaagttcccaagagatacaaaatagggcatgcatcctatgccgtaggtatcgtagggattatgtgagattaatctttatccttccttgattgatgtaatttttcataatggagttgtcactagcccctttgattatcgtgtaatcgccgtaaacgaggcttatgttgtctaacacgtcctcttataggcgttcgtagatgcttttcccatgctgcattaactgtgaggtgattgttcgaatatgttttccttctcctgaagatgctttattatatttctagctcccggagaggaagaacatgctttatgtacttctccgggggctcactgcccgaactacacttgtccatatgtatacgactcagctaattcttgggtgaggtgtctttttggtccacgtgttatacgcagtcgcggccacgtattttgggaaaaatctgagacaacatctaccccccaaatcttattttgtaacaggtaaatgagacttgtatgcggcctatggtccttaataaatatagtggcacatgcccctagcgcgtgggtcacatttatgattgtcaccattgatttttatttccttttgcaggcaatgattcgcttcccgtctattgatagacctttgcattaatgccggtgtcagagaggtactcaaacgtttcaaccatcctttctcctccttacacctgttcacccaatccgttggatcacagaattagaatcgctacaaattctcaccgtgcgatggtgtttgatcacagctgccttgcacccattttggcctataaaagccaacacctttcctttgctgggttacttttaccactttgcgattttcaacccaaccaatatattcaaaaaatttctgaaatctctgacttcctactgttgttcctccatcgttgccagaccaaactttatcaccagacgccatcaacttctcgcttatcacctttgtgtacacattttctctactgtttctgtacgtctgggcaaaataagaatggtgacattctcatttagtcgcgcttgatttttgtgatacggtggttatggcggaggccatggtggtgcctccccaaaaagagggcgtcagatgaccaccttcgtatgctgttttatttgcatgcttactgtcatttttctttggggctagaaaatgattttcttatttctttgccatcgattgtttgaagcgacttccacactcctattcttctttttttcccttttatttttgttttttggatgtttgcactagatgtttgcctaggagaatctttggattccctatttttgacaagcatccggaggggggctctttccagcggttaggggacccccattccccttttctatcatagggtttggtttgggggctaattgctggatttcctttttcaaatgagtgaggttctccacgacctgcacggccacggttttttcagctttgaccaagaaatcttagaacttcaccgagtccctcccatgtctgtccccactacagtgttggattttatgccctaaa

SEQ ID NO: 19242 - DNA, 4715 bp, Cannabis sativa
gatgtttgaagttataaatgatctctttcttataaaatgcaaaagatgttgaaactaaggtcaatacatgatgatgtttgaagttataaatgatcttttaatttttcttataaactgcaaaagatgatattaatatataacttctatctatacagaccgccaaagcatttcttaaatagaattaagaaaaaatatattcatagggtatgtagctaggtagctgtacatcaatactacacctttaactaatcttttttggacttttggtctcttcaggttccacattctgcacctctcacaaactggagatgccgctccagctttagcttcgggctctgatttctcagctgctgctatcattgtcgcccaatggtgattgtcgaagctgatcaatgttttcacattctggcactgtgtcacaaactggagaatcagttttatctttaacatcagaatcatagttctcaggtgctacaatactgtcattattcgcttcgggttctgaggactgttgaggttgatgatctatattttcagaaacagtatctgataccaccccgcaactctgagactcctcctttcctgcaaccttcttgtcctccatgtctatggaagacacaggaaggtcaatactagtctggttatcattttcctgtaacataacggtagcctgtttcagtggaacacttaagacatggtgccacaaaattaatgaaaaataaaaagcttcctcaaggcatatagttctgtatgcagcatgcattttaagaatggttagtgaagaggaacctttatcttgtgatatattatctttactagtattactgttattattattgttatcataattattatttgtttaccgtctaagaaaaagcagataaatattactaggatttccaactttttaaattttttgaatatatttacttcagtagaatgaaagccttaaagaacttagaaaacatttgattttatatctggcataatcccaccaaccttggatgaattaacttggtcattgataccagcatcagaaccctccaattcagccactgctccactgctgcttgctagattcttctcggatgagcgctcaatctcttttgacaaagatccaccaagctcaggcttatcatcacccgtttcagcatcattaccatttaatttatcctctggtactgggctgctgtctggaccccattctgatgagtctttaacatctgcttcaacttcatgcgaggtagatgtagataccacagattctgacattgtttctgtttctaaactagctgcagtagcatccatttgatccatagtttccaaggaagatccagatctatttataattccaccagtgaggggtgcatccacatcatcaacattgtcaacttcaccatcttttgacttgtttagcgttcctgaattgttagctagacatttaacattggaaccgttaatttgttcttcctctgacaccaaagacggtgaaggtagattcagagtatctgaacccatattgtccgatacgtccccgaccacctgacatgcttcagctgcgctttccatattagactcaagatctttagacccctcaagttgtacagagaggcttgctggacccatctcagaagagtcatcaattgtttctgggctcctagcagatgaggcctcaatcttttcttcctcaggcactgaagaagactgtggtgcatttgtgttgtctacaacattttctaccagtatcatgctaacatgggatggatcagtttgaacattactttcatcagcatctttcagaggttgaacatcctttccagcatttaagtcttctgtttcttctacagatgaatcctcgatctttccttcattgattactacgcaagacaaaggacttgaaccgatcttttcaggcaaacacccaacacccttgcatgaatctaactgatcaaccatttcaacctctgagtcttttggttcgtttaaaggaactgagctgcgagccatagatagggagccaattttctctgttgtctctgaagaagatgaaggctctggaatattatccaacaaatccccagtagtgttatttgagttcaattggacagctatttcagcccctgaatcttttggttcttctggaacaggtgtgctgctaactatagccttcacagatgaacattcattttcttcgattcctgactccaaagtggacaggtgctccacaaatttttctggcgaattctctccagctgtggacggcccagacttaatatccatctcagcttgagaatcttttagttcctctgcaggctccaaaccatcagccttttgttccccatctcttgaggttgcaggaaacacttctgatgtactagctgatacaaaatcaccaccagtagaaacgcccaattgttcactcgattcaagttcaacatgatatttttttgcttcctcatgttctacagggctgctaactggacttttatcagagcgatcatcaaccttttcttcagtaatcaatgaaggcgaaggcaaagttatcttcccagatacttctccagaacctgtatcacaaacatcagaaacatcttctgcaattttttcagatactgtagggcaaatattttattctaaataaattaaatttattattttatttaaccaatatttgttaaaaataggaatgcaacatatcgacacccaaaattgaaatcatttatgaaagaggttgatatttgatgtattcaattcaattgaagaacaaaagtaagaaaaaaaatctggaactgccatgagccgtgatgagtgtgaaaaagggatgaagataatgattcaaagacaacaagggtatttgttggtattttcataaatatataaggttacatttgacatataaattattcattaaaccaaggaacttaatcccgcatagccaaaaactaaaatctggtatttcctagcttctgcttttggctgcagttgtctcacaaaagattaaaaaagctgctttttctttttaccaaaaacataattatcttcaaattattgaataagctattttagctatccaagaaactgtcccaaatggggctaaagcagaattgtaaagtcaccctccctccccagacttaccagaactagaatgatcaggtgcaatgatacttgtggagttctcgagctttttattgtcagtacaagcttcaggagattcttctgatgcaggctttactgtagagtgaatatcagtaggacaatgaggctttatcacactagattcatctggacctcgagaaatagaagcagtgacaatagtataatcaccagcattttcaggcttttctagaattggcggacttccatggctgctcaaatcatgccgggaaactacttgaagctcattatcagaaggcttctttgtgtcccctaagccatcatcagtcatagaagatgggacaggagcacccgatagttcagtgctcatggatatagaagttgtttcagaattatcaccaatcttgacatttttctttaaacagggtccagtggcatcactgcaagaagcttctggggacttctttgataaagattcagttttgtctccaggtccatctggaactaccacatgctcctcagcagtcacagatcccaaagatgaatttaaatcgctgccagttgtggccaatagatcagaagcaggaggttgcatctgacaactgttttcgtcagcaccaataggagaaatgacttccttactatcagccataatagcatcttcttgggaatgttgacctggatctgttgttttctcaaaatgacctgcagcagtcttgacttgcgatttttccacaacagttgtgcaatcagcagtctcatttgggccagaagccttttccccctctacttttgtatcatctgcagtcccagtttgtttatcagacttcactggaaggtcagacaatgcagctgctctttctgatattgtcgcactaaactgcactttatccaccaaagtttgagttttgctcacttcagaaacagtcttacctgttaatggtacattaggagcagccttgccctctttcccatgagactccgaagctttagtttttaacaggcaagttccagaaaatacttccttcatcacacgagcaacatcatttacatctgcagtttgaatccgccccaaaacttttttatcattaaatccagcagcagtgtcaattgctgcttgagggtttgttggctgtttcacttgtggggtatagtttgattgatcttttctttttggatcatgaccaggtacaccagcagtcatatgaacttcacctgtttgagactgagaaacttcctgtgtatcacttccttgcttacctctcaaggcagcagatttattgcccattgtatcagcagatttattctgcaactgagagcttaattttggatcctgaccagccagagcatcaggtggaggaggtactattgcagcttgtttccttcctctgcgacgtggtgcttcagttcggtttggagtttttcgacctgacctttttgctggcatgtgttcaacaggacaaggaggtgcagattgaatgcctgtagaaacagaaaggtgagggaacatagagtaagaactgacagaaacaatagcagaaaaatggtgcttagtgataccttctgtggcagtagagccagagaaagaagcagatgaagga

SEQ ID NO: 19243 - DNA, 3571 bp, Cannabis sativa
gcatctggtgtggcaagacaagcttgcatctcagcaagattggctatggcaggaaactgattaaaacattcatgtcctttgaaggttttatcgaacctgtagaagtattgcatgacagtatgacccaatttatggcagagttaacactgaggcttttgattccaagattgtttctgtccacgtcgagagtaattgggattgcctcatcatccattgacattattgttgccacgccctgagttaaaatttccttgaccgccattgtgtttattggattatcatatgtacgatattgagggtctcgattgggcctataaggcatttgaaacccaaagtgctgagattgagagggaaaattggactgagatggtttgttggaagcaagattaacctcactcttgctgatatccaatgctttagcattcttgtcaatacgaactgactgagccacgatcagagctttaaccttagctacagtataggcatcatttctagttgtaacaaaagtcacaaacacatcatatatgcaagcaatccattaaagattgcttctatatatgatcttgatgcgactgcttgtgaccaattgtggcaagaagatcgacaatatcttttatcttcaataagtaatcattcaatgaacctgttattttagtgtttctgagctaagtcttgtacattccaatgttggctgcattaagcgctatgtattattcattcagagttgtccagatttgagatgtggtatcacatcctatcatgcaattagttattgtcctgttgtttctaatcttctaactctagattgaatgtgttatgttcttcatctgcagtaatgaggaagcgcgtgagagtttgagttggatctagaaatttttgaagtcgacttcccttgatcgaagcaagaacttggtgtttcgatggtagacagttatgtttatctagtttgatcgataaagaatgtgtaaacgacacatgatacgattttgggagaagagtttgtccttgagcctagttcaatcttgaggctccaccattgaaggtcgattggtgttccataactgtgaacggttataactctaataccatattaaatttttgagagagagtgaaaaagaaagagaatgcatttatgttattgaatgaatgagttgttacacaactttatataaagtaataatagaaaaccaactgaaaacaattagttacaagtttaacaatttctaactgttaattcctaaccttctgagctgtctactctcttgatactgtttataaacaggtttacgtgattcgatcttgtaatcatttatataatattgtttaaatacattaatttaaaaatctattttagacgatatatttaatatatttatgaatttttaaaattttaaatagattattaaaggggtagttgtgtgaacctaattattaattaagttagacggattaatcttaaaaaatgatccaaaaatcatttaagccaaatctaaattagtgtgtgaccatttttccgtcctcacgctgatttatgagtttgaaatagtagtagtagactagtactaggggtggttggtgacttcataatatacacaagtctctcatttttaaaaatgaataaataattaaaaccagcacggccaagtataacaaattacataataaaattattcaaaactgaatcaaaataaattaatctttgtcctttagtatacaatcaaattactttcatctctaataaaagaaaaagaaaaaactctattataacacattcattaaaaaaagaatttgaaagtaaaaaaaaaaatggactattttcaccaccatggtttccaactgtaatcacagtccttagaaacaatctttgccttcgtcgttaacttatccaccgttacaacgcaccggactttaacggaaagtgtccaagtcttaacggagcccaactttagcttaacgggaacttccaccgtcaatttcaacggtactttccctttcttctctccgtttcttaacgccttcagaacggaactcgtcaaatcaatcgctggcccctttaacgctgcctttaacaccgttacgttgttcgacggctgataaaacgctgggatagctccgttaccgagcaggatatcggagtagtacacagaggcagagctatctttcccgtagtatattccaaccttatcgttagggttttcagctctaacggaaacatcgatgactggagaaatcgtaggagtcggagacgagacattgattcctttaatggcgaagcttgtgacgttgtatttaggcgattcaggtttgaaaacaaggtagagtacggcacctgtaatgccgataagaacgacgaaaacagcgaggagtaggagaaaccagcagaagcagcttcggcaccagcctcggccagcttttcggcgagcgtattgctgaaatcggcgggagttttctggaggaggaacgcggtagacttgatctttcggaatctgaatgacgtaagttccaggcggtggtactggcttttcgggagaaaaaggaggaagtggtttcagaggcatttccgatgagtcgtttggagacatcgtaagaggcgagtcacgaggatggattcgatcggccattgattcttcttctctgctgaattgaatcgaaactcagtgaattgaagctttttctttggtttttctctctacaagaaaaatgagcgagtgttaatggaagagaggaaaagagtgaagacttttttcttgttaagaacagagacagaccgcgtaagtaagataaaggaagaccgcgtaatggaaaaagttgagaacgtgaaagtactaaaatacccttcttatcacttaagtctttgcttctaagactagggttatgagtgtcaattggctgttgttacgcgaaatgttcaaaggatagtcactgacagctaagagaaagtagctcttttatgaatttactaatataccccttatacgtttattgttgttgaggtaaacatgtaaaatgaggccatatatgtaatcaaacaacaacaacaatttttctttttaatacttttataatttatcttaacaaatttttattttaggtttatttgttttgaatttttaacaaatatagaataaagttgtaattaaataaacaatttagtggaacgcacgtcaaactaatctgctgctaatagcatgcacatcttatatatattttttaaatagtaaaataaatattttatcaaataataaatgcataataattgatagaagatttttttttttttggagtaaaaagtgccagttttgacacacaaaaaataatatctaattaatacaatatcttatttaaacttttcattaatgatgactggcgtgtacatatttaaaacagcataaatcacaaactattgatgagttttaggtattaattaagaaaaaaaaatgaaatttattgtgtatatgttgtaataaaataaaaacacaataagaaaaagtttttaacagcttataatatgtattttaatttctgctgtcatttgataaaaatttaatttttttttatgaaaaaatttaat

SEQ ID NO: 19244 - DNA, 5145 bp, Cannabis sativa
  modified_base (51)..(63): a, c, t, g, unknown or other
cacaacaagtattgtgactaagaacacatttagtcacaacaaattgtgatnnnnnnnnnnnnnacttttagccacggactttttagtcacaacgttgcaatgataatttatggttagtcacaactttttcacttttagtcacaaattttactgtaactaaaagtaagattttttgtagtgacttataaattatataaattcatgtacaaccagtaatttattaatcaaactctaaaattactccaaatgtcccattcaatctattctctttttaaatctcacatttttttttaaaaaaaaaaaaagaaaattattgagttttttattattgatttgataaattaattaagaaaaatattcacatataattctaaccattattaaatatcaaacacctattgtaaaactatatcaaattttaaattttgatatttttttaatgtaatttttcatttcataataggagtaagtattacactaaattgtttgtttttttaactcaaaaaaataaatgaatattttagaaaaaaattcactatacacaattttttttatcaaaaataaataaataaataaagagatatcttcaaagttcaaacgctatagaaaattaaaaaagataattatagaatcctcacacaagagatctaaaaagaccattgataaattttacagaatactcatcatataaaaattattatcatcacagtatctcatatctcatttgtagtagtagctactatatttaaagtagatgttatcattggatcttacttttcagtatattcaaagtcgatattatcaccgtatctcatttatagttatcactattcttcctattagatttacatataaaataaatcaaattaacaatgagttagttactcacattttatgtgaatcattattttataaattcattaattacttacgtatttttaaatattttaacatatgtgaattattttgttataaaattattactttttatggagaatgctcatatttacattgcgactctacatattttcttgttgttattgaactttgtgtctaatgcattccataattcatctatttctcaacacaaattttgtgctgtaaaatgtccaaaacatgtcccctattgcaagggggccacatatattcacacaatgtaagcatcctaattaatcctaagtttggttttccatataaatcttcattatttgatcctgcaatggctagttgctcacttatttatttcttctcaatttcttttggaaaattaaacaagcctctttcattaatgatttcattacatatcaagaagtgataacaacacaacatgaatagtaagagctcccattagatgatcaaatccaaattcctcttcagcttgattcagcaacttttagaatgatggctagttcaaatatgataaaagggatcataaatctctttatttccaaacatcttttgagcttgaaaatcatgtctttgggttagcttcttagcatgagttgaaaacccattcttgtgattatcttcaaaggaagaaagaaaagagagatctagctcaaaggatttccaaaagaaagttgaatacttgagaatgtgaaatttttttgtgcttgtgactaaatggggtcaagtgaaaaggaatagtccttaaaaaatcacatgctatatggtcatatcatgtggtagtccttctcatcaataagtattgtgtactcaacattgtgtggttaaaaacctctatgttgaccacacaatttagttttaagaaataaatcaaaataaaaaaaaaaatagtacaaattgttacttgcaggatgtactagcttagcttcaatagaatcacagaacatgctaatgaggtaccttttttgttgttatgattgaactctctatctaatgcattacacatttcatttatttataaacacaaaatttgtgctataaaatgtccaagacatgtcccctttgcaagggaccacataaatcttcataatatgatttcttttaacaagtctctttcataattaatattttgattattcaagtctatatatgatttttctttgatactttttcaattagtgcctaaaagttacaattctttttctaatatatcaagtagtgataacaacacaacatgaatgaaacaagtggagtcccatcatgtttttatcaaacaaatgatagccatataaatctcaattgaatgtatattcatgagacaatttcatatgcttttgtctttaaaaaaaccccacataacaagttactactcataacaagagaagaaatttcattcatctataaatagagtacaaaaaccacacagctaaatcatcaagtactcctcattttcacaacaagaaaatattttttgtgtactcaatacttactctctcaagaaaatacatatcatcatggcatttggattgcctagttttgttaagggcaagaaggctctccaaagatcgctttcgggaattaaagaagctgctttgaagtccaaaactattccaaaaggctactttgcagtctacgttggagaggagcaaaagaagcgttatgtagtacctctttcgtacctaaacgagcctgcatttcaagaattgttaaacatggctgaagaagagttcggatatgatcatccaatgggaggactcacaattccatgcagagaagacatcttcattgaactcacttctcagttgaattgattgtaaatcatagaaaatataacataatttagcataaacaattttgtagatcatatactcctattgtttgactacttgtgaaagctgtacatataagaattgctcatttggatctatttgtatctttggaagatttatgttttcatctcttacttgattctgttttgtttactgccattttctatcactagcagaatcttataaaacaaatgcaagtaactatatattgagatacttgttttgtatttagtataggcacattaaaataattaaaataaaataataggacttgagatacactcaagtgtttagcaatttcttttttcttttgctggaacagttgtttaggttagcatttgaaatttacttttgtatgtatatagttgtttatctatattctatgccaagattttttactttgaactttttttgattttaacaaatttataccaagaatatggacaaggaattccaatcgcatcattcttggggacagcgtttatttgataacctcccaaggaaaaataatatttacaaggtaaaattataacatttagattttgttatttgttatcatctattggtgtaagagcttaagcaagatataagatcgatcaaaacatcttctgtacatagaattgaaagagctctcattggatgatcaaatttgaatttttcttcagcttgacttaaaaagtcttggaatgaagattggttcaagtattctacaagggacccaaaaaaaaaatgtcttgcgactatccgacctaaaaaaaacctgatcaagtagagctaaaaaaaaagccaccaaaaatccaaaaaaactgattcaagagccaaaaatccaaaaataccgattcaaaaagtagagcaaaagagtcacttgtgatcagagatagtgaaccaaaaaagagtcgcttatgatcgagttgtccaagatggtgagcatataaaatagccaccatcttaagggaagatgttagagagtctcacattgctaatgtgtggcaagataatagaatatataagaggaatgagctactcttcctataaccaattggttttgagatggaaccacattcaccttatcccaagttcttacaggattataaatctctttatcctctctcattaccaataataagtgccacaaaacctttaggaatgtatttcgtgcttgagaaaggccaatgagttgcttggcatgaactaagttagcaaagctagaacccatattgtaataataagtatgtctaaaggaagaagaaagaagcaaaagtgagtagaatattttagagaactttcaaggagggcttgattgttgggatggtagtgatctcattcatatatgtaactagtctccattaacaaatgctctatagaatgtgtagaatatatacatatattgacattgaaatgaatggttcaagattgaaagaaaattagctcaaacttcaaaggggtcaagtgaggcattgtcctttgtggaattacatggttttgtccatgaaaggtttattttatccatttgctacttttgattcttagattaatatcttaagtattaaaacagaaaggaaatcaaagaacactaaatttataagctttgtctgtcctaaaacacattctaggtgactagtacttgagtttctttgaactagagtaagataactttcactatgaaatccaacgatgtaatatccagtattgatttacaacacattagaagtaagcaaaaatgaacgcacacaaaaattaccctaacacttcattccaaatcaagtttcaagatctaagtcccttaagatttttgaagtcaagatccctttacttcttcttagctgaaatcccttcaactatcccttcagataatgcagttcaccatcccttcttcagctcctaaagatccaatgatcaagcaccaacaacacaaacaagaacaagaaaaaagttttccctagtagagcaagaatcacaagaagattctatcacagatgaagagagttaattagaatatgttagaaacaagattatatatgtacaactcttttaaaccgaccttgacagctcatcagccagctaatgatagctctcccatatctttttctaaataatgctgacatgtcaagaattaaaataaaaactcagaaaaaataaacccagatgaatctaccaattggtcagatgattcacccacataatttgtcacactgaaaaaatatgacacttacaattaggggtgttcatcaaaccgctcaaaccgcccgcatcgcaaaaaaaaatgcaatttgaaattctttacggtgcagtcgcggtttgaatattttctaaactgcgcggtcagtgcggtttgcggttttgaattgttaatatgcggttcaaattgcaccgcatattatattacaaaaataccaatttttatatttat

SEQ ID NO: 19245 - DNA, 6478 bp, Cannabis sativa
ttaaatagattatttttcattctatatatgatcccactagtattgctatttttaccaataataaaaaaattaatttacagtataaatatttaagtttaatttcttgttgaaaataaatacctaacgaaaataaattatatcaaaatatatttagaccaaatcgagattagcagagtattttaaataagagaaatttgcgataaaaatacataagtttaattctcagttgtaaataaatacttaactttaattttttgcgataataatacataagttatatttctgaaacttatttaagtatttgcatgttaagtgttaagtaaatataacttaactaaacttacgtattattaccgcaaaaatataacttagttattattaacgcaaaaaattaagcttaagtatttatttacaactgataattaaacttaattatttatgatataaattagtcttttaaataattattcctaaattaaacccctacaaaaaataacattaattacaatttttttagtggaaaactataaatttattgtaataataagaagtgtaataaaaaaaaaataataagaataaataagaatttcttcaaaaagaaaatgatcgataaaataaattagggtttggatttaaagctttcacctttttcatttctttacccacagaaaaacctttcactctcagattttgaaaaaaccagaaaaactagccgttggatcttcccttctcagcaatgtcgaacgttgagaaagagacagacgagaagaaagggggaggagagattttgttctgcggcggaacgtcatgggaaacgatcggtcggaaaaagggacccgtcgaaggcaatttggtttccccaactcgactcagatctcttctcaatgtcgacattcgtttcgttgcgtctggttgtgcttcgtgtcattgtgtggcgttggatgttgaaggacgttgctttacttggggacgtaatgagaaggggcaattgggtgttggtgataagattcaacgtgatagacccactcttgtgtctcaactatcaaagtgagtattatctatctacatttggaaccctaacataacattctctggtctatcaaagatgtttaatttttgagtattgatttttgaacaactattgggttaacagttttttatattatttattaaataaaaatttaaaatttataggatttgatattgacattggattgtggttcggtttggcttagtttctataagagcatctctaatagagtgttaagttgtactaaatttgacccaagataaatgtctcagtgagtatatttgaacaacacttgataattgattagtggttttttgtattatatattaaataaaaatttaaaatttataggatctgatattgacattggactgttagtgttaatggtatgttacctcttattatggttcggtttggattagtttttataaggtggtgtttggttggaggtgttgctatttgaacaccaaccaataattgattagcggttttttttattatgtattaaataaaaatttaaaatttgtaggattcgatattgacattgccctgttaatggtatgtcacctcttatggttcggtttggcttagttttataaggtggcgtttggttggaggtattgctatatgaactccaaccgataattgattagcggttttttttactatatattaaataaaaatttaaaatttgtaggatttgatattgaacattgcactgttaacgatatgtcccctcttatgatttggtttggcttagtttttataaagtggcgtttggttggaggtattgttatttgaacaccaactgatagtttctcatattatatattaaattaaaatttaaaatttataagatcggatattgatattgcattgttaacggtatgtcacctcttatagtttgttttggcttagttttttataaggtggcgtttggttggaggtattgctatttgaacaccaaccgataattgattagcggttttttgtatttattaaataaaaatttaaaatttagactgttagctgtatgtcacctcctatagttcaagcttaccttaatgagacttttgtattattggctttttgtgtttgatgctttataggtacaaaatcgttcaagcttcagctgggaggaatcacacagttgtagttgcggaaaatggagagtccctagcctttggttggaacaaacatggacaattgggaacaggctcaacaaaaaatgaatttgaaccatctccagttagttgtcttgtgtctgatgtgaaaactactgcatctggggctgatttcactgtttggttatcttcggttgaaggagcttctatactgaccgcgggtctcccacaatatgggcaacttgggcacgggactgacaacgagtacaatactaaagatggctcggtgaagcttgcttatgaagctcaacctcgccccaaaccaatagcttccctttcgggggaaacaattgttaaagttgcgtgtggaacaaaccatacaattgctgtggatgcaaatggtcatgtttactcatggggatttggtggttatggaagacttggacatagggagcagaaggatgagtgggaacctcgccgtgttgatgttttccagaggcaaaatgttttacctcccgacgctgttatatctgctggctctgttaattctgcgtgtactgctgctggaggccagttatacatgtgggggaaattaaagaatacaggcgacgattggatgtatcctaaaccggtcttggatctaagcggttggaatttacgttgtatggattcaggtaacatgcaccattttgttggagctgatcagtcatgcataagttggggtcaggctcagaatggtgagctgggatatggtccaatgggtcagaaatcttctgctatcccgaaaaaagtggatattcttgagggtatgtatgttatcagtgttgcatgtggtttgagccactcaatggttgtagttgatagaacaaatgtcgccgaccaactttctcagctcgatatttatgatggcaaggctttcgaagaagggactgaagaagagcctgcgaaccaaactcagccagctacgaaaaagaagaggaagaatgcaaaagacgaggaagacaacgacgacgatgatttggccgaaaatgggcataaaggaaaacggggtgggaagggttcagcaaacaaaagtgcgaaagcacctgcagctcgggggaaaactggaaaaggcaaaagcggaaggtcgcgaaagtcataattagtttataagttttctaacatgccatttctaaaattttggactctcagtgtagagattgttacattgatcaactgcttttgtgtattagaacttcttttaccttaagttaaattgttaactcatggtacaaattagaagcattttaaaacttgtgactttaatatattatctctgacccttttcagttatttgcatttgtaaagaatataccagaaattatgttacattattctagtcatcttttttttttgttcagtcagtactctatacagtggtactaaagcttcaaagaccgataatggtctcgatgtgttgtataaaaatgattagagaaatttaactttgttcaccgctagctagacgtttctcttcctcaacttgttcgagcaatgcctcgagttctgcttcagtcagaccctgtaatcgcttctgcaaattcgaaagtaagactcatttagttgtaatcgatttcatacaaggagaaacaatttttgaaaattatgtcatggaaataagactgtgattagctcttagactatgttttatgtgttttcttttaatacttgtttttcgaaactaggctccccagtccctacccgaacctataatatttgaggacgaaaggactcgaattttagatcttgtttgggcaaactacacgcctgaccatttgagctaccccgcgagtcaatacatttcatcttctatattttcttgttatgaagtgaaaaagatcgaaataacatatcataaccaactgacaaaactacttgttaaaaataacatcttgttattgcatcaaaacatataaatattgactaatctgactaagagaaatttctcaaccgaaaaacttcaacagatttacagtttgtcgctattgaagaaagtttctttaatctaatcatgaaaaatgttttgaaaagggacagcattgtttaatcaagaaaattatactgatttttaagaagaatacctccatgactttactttcgtaatcgcgtaattgttgagcataagtcatttccttattcgaaactcgaaaaatatacgtcgaaatccatccaatagttagtcctaaaaccagaaccaactgaactacatttcctgcctgtaaaggatcaactccaacaaactgcacaaagacataaaacacacataaaagttggtatgaaagtatgcatttcaattagactcatacatctagaaaagtttgtttctaactacatatttggttatagattgtataagcaaagctgaaaaggaatgaaaatgagaagtaaacataggattataatggtaaaattctcatggtaattagctaatgttttggcaaaactatccaatgttcctaaaagcgtaatttcgtcccaacagattttgtttgtgagtttgttttcttacacaagatcataattggacgaaattaactttaaggaacattgggtaattcccgctgattacaaactcgaaatattaggtagttatgctgcaaatatcccttaaaataataacatacctctaaaccgcttttcaagccaatgccaagagcagttactccaaccccaatcaatagaacatcttttctagagtatccgaaaggtgtctgttatgaaagcaagagaatgtgatacaataagaacacatatttatatgtccttccttacaacaccctagttcaactgtaaatgaatttagcaactcatatttttatctggggttcggttaaaaccttccctttagttttacagatcgagtgcatttctatcgaactgcaattgaactaaaactaaagggaataagggaaggttttaaccgagcaaagtctttagttcgataggaatgcactagagtgacttttacagatcaagtgcatttctatcgaactaaaacacttattttatggactccatttaagtgtatttatgacaagaaaaagcttggaaaagttgaagtagatacaataaggtcatatcatatctgttcctgatgtatattataaacttgagataatgctatagcacaaaatatcaacatagaaggaaacatcttatattggctctatcatactagagaaaaagcttcttggtaccactttcattagtgatattgaaagaaaaatagtttataggaaaaattataagcaatgtgatgcagaaatgagaaagtatgtaattaaagttgaagagttacaagtttgtctcatacatgcctttgccttattagaggagtcattttgattgttgttggagtttgaagaacatttgggaatggtaaacactgctcttttcgatatgcttttgtaccctcttccctggaaagatgattctttgtttctatacaagctctgtgttattagttttcctgaaaatagatcaaaggcaaccaatatcagtttattcatatgatcttgcataccgaaaaagtctgcaaactcgggcgaaagttaagaaaaatatttaaaaggcggaaatgtaaaatattatatttctatctccactccacactgatatgatattgtctactttgagtctaaacctgatagttacttttcagagaacatttggttgggttctgaggccttgaatcattttccgatctaattcaatatcatccattctaaatatgaaccaagacaagagaatctattccttactcgtacttattgaatttgaagtattgattcaattttttaaaaattatgtttcgtaatttcacaatctaattttttaatttataattaactcttggatacaaattacaagaatgtatatttttttcaaatttttcattaagacaaaacgggttaaattttttttacgacatagagtttttgattagaatagaatattaatcaaaccgaaagagcccttaactatataaggggttaatagaacgaatcacagtttaattcttggatacaaattacgagaatcgtatattttttctcgaatttttattgagaggaaaaaggttaaatcctttttacaagataaagtttttgatcggaataaaatattcatcaaatcgagaaaccccttaactatataaggggttaatagaacgaatctcaccttaactcttggatataaataacgagaatgtatattttttttctcgaattttttattgagagaaaaaagaataaatcctttctacgagataaagtttttaatcgga

SEQ ID NO: 19246 - DNA, 4429 bp, Cannabis sativa
cttgctactgtctttggttaaatagaacaaatattttttttagggatattctaaaatagctgctaacattgttaaagaaataaaaaatatagtaaattcaaagtgtatagaaagatgaatagaatagagacaaattatttggcaagatttaattgtaattagagggctattttttctggtttttctgctttggagttgaatggcttgatcttgtaatcttgtgtattctcgtttgttgattaatgaattgttcttccttcttgataaaaaaaaatacataatctactcttctcattgttaattttgaaatgaaatatactcaattcatttgcttccatattctgagaagactttaattattactcaaagtcatttttacttttttttttctggatggaacaaaataatttttacttgtttcattgtataactagtatttaaatattttattttagacatttctatttcaatactttcttgtgatagggcaggtcattagatgattttttatttatttatttttaattcaggatgcattacactatgattactttcaataaaattctcattgttactgaataataagagtttttgtaagatcatattacaatacctctagctccactttttttgaaaataaacaatgactgaaaataccagatcttagtaagattctctctcacattatgcaaccaaaaaaaaaaaggaagaagaaaatttactataataccaaaatatatatatatatatgtacaatctaatcactccatctaattatcttctctggtaatttaattttccaatacaataagtaaagagagatgcgtaaacaaggggaaaggcaatgagaacaactgccacaagaggcaattggtcatggtgaaatccaaagtaatcttttatgaaggcagacactgtcttcacttcaccatagatttcaatttccttttctatgtctccatattgtgaagttagcataccatttagtgaccaagatgttggaattagatagtataaccaaatccaccattttggaatatgctgcatatatacacacacacacataaacaatacaaaatagtattagtttctacacacaccgaaactagttctaagatttctcaactttgaatttgtagtatatgtatatgtacctttttaggaataagaaatcctgcaaatagattgaacaacatgtagaaaactgaagctaaaatggcagcaatgttgaagttgggtgttaaagaaacgagcatcattccgaggtagttgaagtacatcaatgaacagaaaattccatagaagtaccagaaaatcttatatgctgtcacatagtacccaatcattggatatgttattatcagaaaaatcactgcctctgtgaaaagatatgggatttcaacaaccacctacaaaatgaagttggagaaaggttatgtaatagttcaagaataagaggcttgatcataagcaggagactcgagcaacttctaaggaaaatgtacctgagcaagagaataagcccatgatgagtacattcctgcgaattgttcgcgatacataacggttctctctgttgctacatgttgtaagacagttgtgcagttattaattcccaagaagatcacagaagtgtacattgaaccaaatacattgaataagctctgctggtttgttctgaaaagatggggaagagataaaaatgaataaagaaaaattagagcttcggaaacactttaatttgatcgaatgaataggaaagaagaagagatttttacatttcctttccttggtcccaaaacagtgcaccaaagaaaacagctgatataaaggtatgcatgagacgcatcaagttgtagtcaggactcctccaataagacaagtttagtttccatagacaaaatttgaattgtccccatgcattttgtgaaaagcgagtggggaagtgaagatcacttgaaccagtttgtggtgtactcaattgctttacaagatttttgttgctcctacattacataaaatttagcctctttaataccaatgaaactgtaagatactgatattattatccttgatagtactcactcgtatatagaagattctctgtatatttgagcaaagtctacaccaagttcagcttctgcagatgtagaggtgacttctaacatccatgttgctggattatagttattcttaatatttgcaactttgggaataccctgtcaaaaacaaaaggattaagttaaaaaaaatattcatgttctcatgtttgtggttggaccatactagaattcctaaataaaatccaaaactaaaactgacctcaaaatattctataactctttctgagtgcttcccaactggtccgcagtatattacacgtccaccagttttcagaaggattagctgcattgagatggcagagccaaaagggaagataactcttataatttgtatcatcttacaaagatctttgtcttttaaaactgaaattcaacgacatgttacctcatcaaaagattcgaatatgtcaatactaggttggtgaatggtgcagacaattgttctcccagtatctgcaacattcttcactgctcgcatgactattgcagctgatcttgcatctaaaccagttgtaggttcatccataaagattacagatgggttcgaaacaagttccacagctattgtaagccgcttacgctgctcatttgaaagaccactaataccaggtattcctactaaggcatcctttattccatcaagttcaattgtctcaagaacttcattcacaaagtcctgttacaacatgtcatacatatattatatcaaagcttctcaacaattttagatacaagtggggagcaaaaaaacttgataactacaaataaaaaacttacagctttagtttttgcatcaatcttagaatctagacgcagccaagctgaaaaaatgacagattcttctacagtgatttgcggtgaatgtatgtcggtctgctcacagtatcctgaaatcctggcaaatgtctcttgaactttaggatacccaccaattcgaacatctccttcgatgtaaccagtggtttttcttccagctagaacatcaagcaaggtagtttttcctgccccactgactcccatcaatgcagtgagaactcctggcctaaatgaacctgtaatatcggctagaagttggagttttttctcagtaaatccatgttccctcatttcctgaacacgaaaatagaagcaaggaaattagtttaggtaatgtgaatagctccttaactgaattaactagacccttaaagcatcatatgattaccagtggggtgtcaacataatattgcacatcctgaaacgctactgtcaatggagtaaatggtaagaccatcctacctataaccattaaaggggaaaaaacacatacacaacttagagctgaagagatttcacaatagtagaaagacttgactttcaaaacaagctgggaagctcaaatggaaattatttgaataacttctaaaggtgtaagaaagttgttctaacatttatcagtgtgaatgttggttttaggtgtctgaactttagaatctcttttctcatgtgttccattgttggagcttttgcttctttgaagttgggaaagcttttcttgtgaaatgattgcaccagatgacgagccaggagctgtacatttatcaaattaacatgtgtaatgtcatttggtattgtaagttgaaatattatgaaaaaggaatgaaacttacacttcaagaaactcaatgacaaaatgaatccaacgttgaaaagtataaagaatccaactaaggcaccaagtgatatccaataaagatatccatcaaagttcagtccacgacttttaagtgcttcttctcccaatgtagtatttgtagataaatacatctaagtgaaagccaaaggcaaacacaaaagttagatcatttatttaaaggaaatcaatcctgaagaaaatattaaaggaaaagataaagattaccttttgccaccgtggtgaaagaaattcatttacagataggcctatttctccatatgtcaagggtgaaacccagaaaccccacttcaaccaacccggcattgcagctgtaaacaacacattcaagtttatttttttggttggttatacttcaattacttaacactaataaagatggagactattcttacgttgtgtgataacaaatcccgcaaagagtaacacaaacaatattgtgaaactaccagccgtcattgtagcaaccatagtctgaaagaatgatgccaagaaacgaaacatggacaatgatgccaagtgaacagcaaacagcatcaaaagttgtttgaagaacctgttgagaaaggcattttccaagaaacaacatttagtactcataatacaacatact

SEQ ID NO: 19247 - DNA, 2074 bp, Cannabis sativa
atatatgtaggtgggaaggtggagacatttaaggaaaaagtggatgtggatgatgaaaacaaggctgtaatttttactgctgtgggaggacatgttttagaccacttcaagagctataaaggtactttcaaggtgaccccaaaagctgatagtaatcaaggtggtttagtgaagcttactctggattatgagaaaagagatgtgaatgaccatgatcctattgacaactacatggactttttggtcaaacttgttgaagatattgatacacagctaccagcaaagcttgatcttatcatctgaaaaatgaaatattataaagtttcatgaaggcccctttatatatatatatataatatatgctttgtgtgaattaaacaaaatctactctaagactattttatatatgctttgtgtgctgcaagcttcatctttgtattttcaataaatattccctttgtattttctcatgatcgcgcggcaagctacataatttgctggtaatttaagggatcaagaaacttgttcatcagtactacttgtagtgtattatgtacatttaatcttcatgtgtggtaaaagtgttataaaatattatgtttgtaatatattatataaccggttggaagctatagaacttattttcttacagatcacgtagatggtaccattcttgcattagataaatattattttaggctatttgttttgtaaaagttaccgattagattttctgttttattaaattacaaaatgaactctatattttctaaaatagtaaaaataggactcttagctcaattttaaacaattttatttatttatatatttttttatcaaaacaattttattttttaatataaccaactttaagactatttctaatacgaatagatacagaaaatataaccagttttgtctagattagattattattaagttttattttgacaaaaaaaaataatatttaccctatttatacgaaaatataatattattattagattagattattattaagttcaagatcctatttatacgattttaaaaaatataaatagagagtttaattagtaacttttgtaaaacagataagataatatttaccctttaataatctatgttcaaagtttgattaataaatgctattttttatgttttattttcttatctatcaattagaataaatagccaataatttctcctacactttgaccaatgtagatttttgccctagctaaacctttttttttttttaaagaattcacttctgtgggcatgagcaagttacatgtttacttgtagtacaacagtctatataacaacattacatctattttatattaaatgtggttatgtaataaaattttttcttattaacattaaatgaatatacgaatactattaactaattttatattattatatatatctaaaaaattaatataaatatttttatataagtaaatttaaatatataaaatgtagtacctatttttaacaatttaactaaattatcaagactagacacgctatactttagtgaaaaaaaattgaaaaatttaaattttaaactaccttttctatcattatacaaagctttacattacacataatattcattcctctctcttagttttccattattatataattcataaactataaactttgcattaatattatattcattcttaatcctacatataaatatatttatttatttatgtattactaaaagtgatagttcttgatttaagtttagtttttcatattcatttaacttaattgaatataagtgttcattttttttttgtttaattaacattattttttttccaattctatgcatatatattttttgttatatttttattttgatcacaacttttttttttgattatttaattttatttttgggaaaaatcttatctcattatcatcacaatatttttgttgccttattgtacaatcccatcatgaattctatcatgaaaattaatgtatcattattattaatattcaaaacatcattattattctttttaatatatatatatatatcactataaaa

SEQ ID NO: 19248 - DNA, 2861 bp, Cannabis sativa
ggttattcttatttataactggcccaaattaggacttattttttttataacaaattagaagttatttttgaatagagtattcttaaataaaagttttactgtactttgaaatatatattactttaaaattagtagattaggaattgactattatcattctttgaatttagattcataacattgcttgcctagatatatataaaaaagaaaaaagagaaagaaagaagcagtattagttcagtctactcaactatattaattaataattattattattaaaggtaaaatacaacaattataaaagttaactagtgtatgtaaaatttggtggcaaggcaatgaatacatttagacccagccagtgccagtggtagtgtgtaccacctcgccactacttgatctttcgaaatgaatatcttcgaagctaataaacaatattcaaataaccaaattttattacaacaacaaaggatattatgttttacaaccaaattaatgacaaaaaataatcctactattttgagtttctcatcctaatccctttcatgttcacaagctgtgaagtattcagaaaccgcttatagatacatatacacaagcctttcaaagtgcctgagcaacacatttaaactctgtcaagcaagagagcagaattttctgacgtttttcaagagactgcttctcattttgcaaaacgtcaatggctcccggagcaacaaacatgtccatgaatttctcatcatttacagcaaacaaatccaactccactgcctgaacaagcccatcccggctgcaaaagtaaaggacaaacagatatataatgttaaatttgatgcgtcccattgtcattttgccaagaaatatgatatgaaaatccacttctacatatgtgtgtgtgtccgtaggagttctgaggacttgaacaagaaaagatgcaaaaagggaaaaagtagaagattctcctgaactcctatccctaatctgtagtttgtacagtactgctccctactatcgaaataattcactccatgagtgaacttacaagttgtatggcaagaatgtggaatattccattacaagaatggacaaagcaatggagactaaaatacagcacaatatgaaccaacaacttttgaggcttagaggaaaagatgcaaattaaaataattgaataaagcttaccaaggagttaagaatcccgaattcagagctgaagccacatttctctccacaagaacttcacgtatctgtgagaagtgatgagctgctgataaacaaatatctgcataagccgagcctggtcttaccccaccatctcgatttccaaataaaagaccaccaccattctgaaatctcatgtgatcagtatttctgctgttgccagtcatccttgagcatcgttttctcgccccgatatcagcaccatttccgagctccttggccccgccgtatgttggatcacatggctgatcaggtgatggggtctcaggcactgtcaattggcattctctaagagcatctctgggttctgtacctttacctggtgtggtctgcagagcactcttctctggaggcctgttctcctgatctttagctgattcttcgtgccctgatgccccaccatcagacaattcaagtgaaagccaaccaactgaacattggttggacttgtaaacagaggctgcagtagatccaaaaccaacttgaaagtcattctcattacacaccaatgagtatgggcttgttactgaatcgaggtggtgccgaactagttgcttgcattgttttgagatatccttgataaattgaatgtaagcacgccttaaagctgcatgaaaaccaacataaccatccatgtttcctgatttgtttccatctgcacaatgaatgaataatagcatgtctgatcagaaaaatggaaatctaatctgaaaataagcagaggaaaggaaaaggatgatcaattattttaattaaagaagaatttctaatatcagttccctccccttaaaggaaactttttctctttcttgcatggtagaggaagttgatatgaaaatggcttaaaatctgaaaattatatcataagagaaaaaaagttttccactactaactaactggctgcgataaatagtaggtacacttaacatataaattagcggtcatttacagattagataaaagcattggtaaaagtttcttacattctgagtcatgattgcgatttcgctctaaagcaagatcaaagagattccctaacacaaaagcaaggcgatcacaagcagtatctagaagaggggcaagccatgatcttgcagcagctcgtgcaatttctgctgctgcctgagttgctcctgcacctccacctcggctagcgtgggcaagtaatatatttgcaacctattacaatgaatttagcaacttaatagtcatcacattataaaaagcagtgccaccccatgttgcttgaacaaaatagaatataccttctccctggataccgggggacattctatcgaatatgcagcacatcgaaattcatgcattactcgttcaaaagcagctcctccatagagccggagagtagcattaggaggctttatttctgcaatgacacctggccaacccccaatactactttcatactgctcctccactgttgttttaccccactgctctggagcaggatctgctgctccatcaatcagtcctctctttaaaaacgagcaagagttaaaaaaaaaagcataaatcagcttgtgaaataaaattctggaactacttgtttgtggattcgcaatttaattggtacatggaaaaatatattgctccaatgacaccactatagatagtttgtaaat

SEQ ID NO: 19249 - DNA, 6556 bp, Cannabis sativa
tctgtaagtccattcgtcgggatcttcgcctgaatcaggcaattctatcttccttgcccgaaactccaaacgccttcctccgtttccatctctcccattcgacccaaccactgccggcgatggaggtctttcgtttacagatcgccgaccggagctctgcgtcggcgcttggctctctcggagtgcacaaaactcatcggccatcctcgcctggccattcaagcacattcagatttgttcagcaagtcccgtaacagttcgttcttgggattccttgaattctccgagaatcaacttgatgttatgaatatcctgcttcacgctatccaacccgacttcaatcccttcaacttttttctccatcctcgtcgacgacattcaccagattcggccggctatgataccaaatgatgagaacctgcaactcaatagacaacaaccagcaacaaagcaacacaccagcaataataatactcaaataaccagaacaccagcaacaagaatacttaaataaccagaacacagtagaaatgattcaaatggtgagctattattgaattgaaacacaatgagatgctcttctacactcgacagagagctaaggtagctctctactgatgcagtagagaattctctattacaaaatgcatactgaaaattaacatccctttcccatacaaaaggtagctcactactaagtacaattaccaaaataccccttcctagatcacacatcattagttttaccttgcttaccccttctagcataagtaaatttaattggaggcctcacattcgtatcagatatattaggtggtttttacataaatactttttatgttacttttacatttttattgtccttattattattattattattatttatgtatatttttacacaattaaattttcaaaaatactgtttaaaatttaaaagattattttaaaaaaaaaaaaaacaactaaaaaataacaaaacaacaactacaaaatatcagataattgcaatatgcaaatcaatatcaattgtttttatactactaagttttttttactaagttctgacaacttgaatatcattttgtactattacgttatttttttcttaaagttatttgttacagcttcatacttctttactcttttttattcttctttttgggttagtgatagctgaaatgacttattttttacaaataaaattaatgattacattaataatagtgttgacgctgaataatgatcaattccatataagcagtagcagctaacgaatgtatgaatagaaaataaaaagagaacaccccaattatagtagttaactccccttatcgtgaaggtgtgtctacttagagtttttatttttacaaaaatctaattgccttacaagagaattcaagaaaaaatgactaagtctggcttcacttcacaatttctagagagagaaagtccgaagagagataacctctcaccttgtagaagaaatgtaaagtgtgaataatgagctagaaaaactctccttatatagtgaaggaggtccaatcaaattataataaaataatagaaaattcgcacaaaattcgttgagaaatcctgtggtatctcgcgagtcaattttgatgtccaaaactttggaattacaacgaagatgtgagacacacttagatctgtcttgaaaatatatttaatttccagttgaatcacgtcatttggatgaaaattgagagatttatggcctttttacttagtagtgtgcactgttgaaaaatgattacaagatcaggctgagttttaggtgcccaggttgacaactggtttattcaaatttaggcatatttggagatgcttgaatgatatgatagctatccttttttttttttgaccttagggaagttctcttggagattttacttgatatgcacgagtgatgcccggtgaatcactagtaacaactaggtgacacccgggtgatcactagttcacataggtatcggtagacttgcgcgtgacacatggacacgaaatattgactcgcagaagcatccaaatcttatttaggggtaaaataagattgatgcccagagctgaactgttgtttgaaggacaaaacaatgagctccaggataatgtcagcctcgacagcaagtgtgcttgcacactggcgcccggtgatgccttagggctaagtcactactagaactgcaagtatgtttgatttttgtatggttgaaataaaacatgggactaattcggtacaagacctagtatggaaaattatataagggaaatagtatgaccttatgtgactctaaagtccattattttagatagaaaactgaagttcacctctatgttttaataaagtctacaaagggccatgagtacgaagctaaagtttagtaaaactttttacctttagatggctagtccataaggatgaatcacatactgaaagatatgttgcaagcttacgtgatggattttaagaattcatggaacaagtgtctgcctttgataaagttttcgcacaataaataattatcaaagtacgatagggatggttccctataagatgctgaatagtatgaagtatcatttaaaaaaaaactagaacagaaaatacttagatccaaagtcagttcaacggaccagtaaggctttagagaagattatggccaaagtacttgcttctcaaaatagatagtaaaaaaatatgtagatttgaagcggggacgttacaaatgaagctcagaaatacagaaatcccaagtaggagaaatcatgtctttctatgaatattatcagtgaaaataataaaatactttggggacaagggcaagatatgccctaaatttttagggtttttctagaaaattagattggtggcttattatctagtcttgcctcaacattattagtagaatacaatgtcttctatgtttcaatgttaatgaaatatgtttcagacctaacttatattctgagttacgaagctctaaaacttcaatcagactatttgatgaggaacaatctgggcagatttcaataattaggacaaagtccttcggaacgaagttattatattagttaaggtactctagagaaacagtaaggtggaggaagtcacctgagaattaaattctgccttgagggctcaatgtccagaggttttcagagtagatttctaggaaaaaatccttttaatgagaggataattataatgaccgcatagttatatcatgagaattagcaaataattaaggatttaattattaatttttgattattttcttcttagtagaaactaaggctatttgtcagaaattggccatatgaaaataatttctcaactatggagatatatttgaattttaggtgtaatatatatgttatatatgaaattttataattttcatattttacgctcggtaacagtggaacgcggtgattcggcaaatagagtcacttagatgcagttaagtatcttaaaattaccgggacaagaatgatagaaatttagaatgtcgagattatttggggttataattttaaaaaaattaggttatttcttagtgaagtaaatggcaaaatggtcttttgctctcatatgttttatttttaaaattaataggatttctagtaaatccttcaacattaagtggataggtattagctgaattaaataagttttgtttaataaactagggaaagtcaaaaccaatacctcttcactttctctctcttctagtttggcgaaaccaaaaacaaggagaaaaactagaccttcttccatcataatctaatcacaatcaagggatttcaacaagatttcaagtaattagagttagattcagctcaaggtaagctccttctctcttctctttgatttttgagtaaaaagttaagttttaacatgtaattttgaattttggctactgtttggtttaggtagtgttaaaactgagtttttaaacttgaattaggtttgtttgagctatttgatagttgtttggtgggttgtagcaagtttgaactagtttgagcttttaaagctcaaacttagctctttaatggtgaatttaaattttgagcttggttgatgcttttaattgttgaaatatgattattagacctaaattaggtgttctagaaagtttgggaatgtttggattcgatttgtggtagttttgaggtttgggaaaaatttactgtgaaaacggcatgtcgtttctgggaaaacagtctacctttttctaggcagaaaacccataaaaacggcctgccattttcttagggaatttttctcaaaatctcattttcgatgttttcttgttatttaggattttgccatgttgtttatcgataggaaaacttttagttttgagtttaagtccccaaaaatgaattagcgaatcacttactagttttaacataaattgtgacttaaggtcttaaatcgttgagcagcatttttcactcagagttatcgatatacttgcattcagaatcaaggtaaaattagtataataattgtatatgtgctcacatgtttagcgtacatgtttatgaatacttattagataatatatcagtaatagcagtattagtgtacatagagttgcactgaatactgacggatatatatttcgcatagtacagattgacgctatcacatcgctgtgactagagtaccgagtattcgctaatattatggtcagtaatactgtcgtacgaacgttccagacttagatgtggggtacgcgataggattcttattgaatgtattggcacctagttataatcatgtatatgtttatgattatgattatgcttttcttactgagtctatcgattcacggttattatgtttatgtgcaagtaagagctagaaccgaacatggatgagtctcgagctggatagagattgtacatatcaagacaattagacctggagtgttcagggtcttcgggatagtttaggcttacttttgatagttgttagacgattgattttatagtacaagtattatgcaaacttatgtaacttttaaaacatgatcccagattatgtaaattattatatatatttaagattaaaatttaactatgcgaattttaattattcatgttttttaataaatcttttgatcagtaagagagtgcacaatacttagaaaatacgataatgtgcctaatctagtagggcgttacaaaaatattttaataattaattgtgacagatactttaatggaatgtctcacctacataaatataagttactggttctcaagctcactattcttacactttctatcaaatcactgtcaaaagagctagagagagctcggaagaaccatataccccactaatttttttttctctcttatttttgcaaatacgaagatctgattaatatattgttgagatctatatttatcaataaatgtggaggtacacatttgatccttttttacatatatgttcaatctatattccggatttataggattgtccatacatgctttagtttcatattaatctaacataatgtagtgggagaagctcgttcatattagaaatcttggagtactgaaattctagatctaatggatagctgtccgagttgtaacttgtaagtttataatttatagagaaatactaaaggataccagtggtgtctaatactttcctatgtgttactatctctattggtctaactaagtattgggttccatataatttaatataataacttttagggagtatctctaacaaatcgcaacgtcgcatgtcgaaaaagtcctaggcaccactaacatctaatagcaatactctcatttatattatagattatttgaacaatgttgttttctaactgaaataatggaaaggagggaccactgttcctctagtgcccatcaatttctttaatcataaactaatgattcttaaaagactaagcatggaaaacgttgattattttttttttttaatttattaaagtgatgtttggttgaaaaaaaaataaaaatataaaaatagaaatataaataagaatgaaattgaatcaaatttaaatatataaaaaattagtaaatattatgaaatattatttatgaatgttcaaatcactatattaattatcaccattaatgcttgattgtatttactttattacatattaatttagttttccattcttttagtcaatgcttttttaatagggttcaccccactgaaataaataactgagaaattctcattcagtttctctttctctcttcatcttcttcttttcttcatatctattttatattattctatgttattttataatacgttatcagcatgagtgtctgcccaagcttcaagcacaagtctctgcccgagccccaatataagtattttgttaaagttcttgaattgtttcaaggttacgatacactaagtattttctttatatctatatattatatatgtatgtatgggtgcatttttaatggatattacctatgaatgggtaatattagaaaattttgagtttttataatt

SEQ ID NO: 19250 - DNA, 3542 bp, Cannabis sativa
  modified_base (46)..(51): a, c, t, g, unknown or other
  modified_base (105)..(122): a, c, t, g, unknown or other
tgaaaactattgaatgacataaaaatgcatttctgaattccataannnnnngtataataaattatttaaatggctataactaatttcataattaatcataattannnnnnnnnnnnnnnnnnaaactaagcgggctttacaatgaccattgagaatgggcaacgtctgatggtagttcttgcagtggccttgtatgcccatgatatgcgtggtagctctttagaacaatttttttttgtaggcctgaagttttttcttaagggtgactgttaatatcttgttaacggctttctcctgtccatttgcatgtggccgcgccacagcggaaaaacttttgatgacgtcgtgtttgttgcagaaatctatgaactcatcacaatcgaatttcttaccattgcccgagactattttatgaggcaacccatatcgatacataatttttttgacgacgaagtccaaagctttcttagctgacactccctctatcttcctccttcctcctcactcgttaacaaaccccactactacaattatgggatttagaggctgttttttctacccattttataaaaagaaaagctaaagggtatgatcatacccgcctagttaaaaattgacatttagaggcagatttttgatgaaaattataggtatatatattgttaataccccttagaggcatttttagaatcaagtatttggggtgtaagtcgagccatctatggcgtcagttagccatatcagcgcatgacacgtgactgttttagcatatgtcatccgttatttatatctaactatataaaagctccaactagtaaaactataatagtaaatttttctttacatttgaaaaaaggtacatttgacataatctaaataatgttggaaaagaatcacgtttcgcctcattttgttttgaaaagatgtattctatctccacatgaattacaaatttaaaggaataagatttcaaattataaatgccaaaccaaacaaatgaattcattcactttaagaaaagtcattctattcccagatccattctaatcaactaaatactaccctagttagttaattacaacttatacaacttaataacatgaaactaaactaaaataagaattatagtaatttataaattaatatgaataaattgtgagaaacctagttaattacattatgtaagtagtaactagatataatagttactaaataccgaaaagaaattgttaggatttttgttatggataaatcatgaatgcgtgaggagagagatacattacgatttcaagtaggatttgatgcatttacatagtttggcctaaagaattctagaaattatgaacatattcattgttcatttgtagattgttgtaatagatccaaaggaaatattataatgattaaggatcatgtatatttattaggtttcaataaaagttatagtacttggtattggcgtggcgaacattagatgcttgtttcactttgtccaaaatggaaaaataaatagtttgcgaatcatttgaaagtacttgatgaatactcgtctaacatcaaaaactcagtaaataaaaatgaattgaaactaatgggtatgaaatcacatgattgtcatgcgttaatgcaacatctgcttccaatcaccattagatcagtcttgccgaaaaatgttcaagagtgttcgacacatgtttgcattttctttaataagttatgcaggaaggagttagaaatggataaattagatgcattacatgaacatgtagtcaaaacattgtgcaatcttgaaaagtttttttttgccatcttttttcgacattatgatacatttaatggttcatctagttatacaagtgaggttgtgagggccagtatgggcgagatggatgtatccatttgaaagaaatctgaaggtacttaaaagttatgtgcataaccactatcggccagaagcatctatggttgagtgctacatatctgaagaggttgagaattttattcagagtacatggccggagttgaggcaattggaattagcaaactaagaactgacccagatgaggttgctagaggattaagggggaaaggaacaatggtgaccatgtccaagtttgaactagattaagctcaaatagtcgtgatgaacaataatgcagaagtttagctatatataacgtaagttataagtagctttatctttgattaacctttaattagtcacgatgaacaataactttattaacattacatgttttgcagtgaccatatggagatattacaatcaatggctctaagaaatcataaaaataaaaaagaatgggttgtagacgagcacgtcaaactttcattgggtggttaaggaataccattctagcaaagttgaacgaaccgaatcatggagtatctgatcagttgagtcgtacttcccttagaccaaaatttacgataacaaagcatgaagcatacattgtgaagggtaaattttttcatacaaagttaagagatgatgctcgagaggttcaaaatagtaccatacttatcgttgcagaaaccatgtattttgcaagtacaaaagataaaaaccatgtcttaggtaccatggcgtattatggggttattgaagaaatatgggagctcaattattttgcattccgaattccactttttaaatgttcttggcttgacaacaatgttggagaaaaaactgacgatcttggttttactttggttgatttgagtaagagaggaagtaagaaagatccattcatcatggctagccaagtagtacaagttttttacatttctgatccggctaatgataaatggtctattattttatcgacactagaaaggagattcttagagaatgaagaggataaagagaatgttgatttatgttatgatgacttaattgttggacaacaaattcatgaataaattctggaaattaattgtaaccttgaagaatacgatgttgaatacattagaaatgatatcaatgtgagaatatgggtcaattgtgattcaagcaaagataaaaaaaaatgtgtctaattggtaacttacttatgatgatgtttgtttatgtagttaatatttgttatagcttacttgtgatactttttttatgtagttactcttctatagctaactttatattttgtttgttaattgtagatatggcaaactcaagttcaggctcagattcaaacccagtagaagagtatcttagggcgatacctaaacaaggtagaactaagatgaatgaagtgtccaagctgatggaccaaggaaaaagacttcctctcctagttaattataaaggagagtattatggcagaaaatatgccaagctagtattgactttaagagttagatgtcgtatgacgatggggttgtcctatgaaaattagaagtaggtcaaccctgaacttaaaaattaaaatttggaaagatatataggtaagcggttatttgtgagcattttcatttgtgtttgattatttcagatgttaactctaatcatgtttgttttcctt

SEQ ID NO: 19251 - DNA, 2619 bp, Cannabis sativa
  modified_base (32)..(33): a, c, t, g, unknown or other
  modified_base (99)..(101): a, c, t, g, unknown or other
gtgtaagtaaactttatcgctgactatcacannagtgtaaatccagtacactgatgaatcatgggacataaacttttcaagcatataatcacaattacnnnccactgtgttgacatcactataatatgaaattacaatatgttctgaatttaatagaatttgtatatcaaaccataatcataaaaaatacatgtaaacataaataacttctaatcttttattgataaaaagtaatattatattgaaataggttttatttagggcaaaaaatctcaacaatgagtattactgatatcataatttggaaatgtactgatgattccaagagaaatttttaaatgaatacttagctgtgggtagctcaagaaggtgaggaaaaaaaagagcccatattgacagagtttgtgtagaaggacataatatcattttcaaagaagatttaaaacgcgtagacatgttttcctatgaatagtgcaagctctagagcatcattcatagtatttatagataagatttgatgaaatcggtagaaaatggctttcaccactatagaagtgtaccaccgctatgcgaatgttagcatacagtgcactagccgattacgttgatgagtgtgtttgaattggtgaaaccactactatcaaatgtttagtcaattttgttcatggagtgaatgagattttagggcagaatatctgagacgatccaatgtcgatgacatttgccgcttggcagaaaggtgtggttttcgaagcatgttgagaagcattgattgtacccactgggaatgaaaaaattgctcagttacatggaaaggccaattcacacgaggtgatcacagtgcaccgacaatcatgcttgaagtagttgcgtcataagatctttggattttacatgcattttttagatgttctgtgatcaaataatgatctcaatattttaaatcaatcaccattattcaatgacatcttatagaggcaagctctaagagttgagtttatgataaatgacacaatacaacaagtggtattatctagcagatggtatctactcaaaatggggtacatttgttaaaactatcctattgcctcaaagagagaagagaaaagtattcgcccaatgtcaagaagttgtacacaaagatgttgagcacgggcatttagagtacttcaatcttgttataccattatacgaggcccgactcgattctgacaaagagattctcttaaagatattatgtacgcatgtatcatattgcacaacatgactgttgaggatgaaagagagacatatgagttatttgatttaattacgatgaaggctccatcaatacttcaacggttgaagtatgccatggatctatttatgacttcctgactatgcttcaaagaaatattaaaattcatgacagaattattcaccgtaatcttcaggcagatttagtggaacatatatgatctatatttgaaaataattttaattagtattttttttttaaattatgttgaattggttaattagtattatgttattttgtgagctaattttgaatttggtgtaatttaaattttatgtaatatttatttttactaatatatgaattttaatatattattgtgatagtttttattattaaaatgaatgatatattaaattatagtgtgtgagattattatagtaatttttagtatcctttgaaaaaaaaagtattttttagtagtaagtaaccaaaaatgatatggatgagagaaaaaataaaatatcatattttagaatgatatagaattttgtggtaatttttagagttactttgcttgtattggagatgctctaaaaatgatcaaaactatgttggagacaatattttttttttactaaaagggacttttattgtaaaaaagaagaatttcaaacaaagtacaagctagtgtcaaacataagtagagagactaggccaccacactttaccactccttagaaatagagctaaggccatttccaactagtctctaaatatagtgtgatttcacactataaatattttaatgggacactataattaaagctataaatggatttgtctacagtgtcccactaaatttagtggacactgtaaaccacactatttttttttttaatttttaataattaaataatactttagcaaaaaactaaataatgatatatattaattaaaacttttaaatatgtatttgtttgtatttttatatttttaagtgtgctaaaaatacatatagttaaaaaattatttgtaatggaatattaatgaagtaatattaatatttttactaataaaaataattggttataataaattattattatacaataaatgatttattaattaattgaatttcgaaatgcactaattgaagacttcaaagataaaatttaattaatatttttaaggtgttttaatttttagagtaaattaaatactattttttaagagtaaaaaaagtaatgtaatatttattgcaaattaaaaaatttaatatttaataatataatttagggggttttttatttttacattttaaagcagttttttttatttacatttttacaaaattctatatagaaactcctattgcaact

SEQ ID NO: 19252 - DNA, 6643 bp, Cannabis sativa
tttttttttttttttgctgggatgctttgtgtttttcttagtcttgttttgtggaggttaaatgtttgaagaaagttctataagagagtccgtaaagaagcttttggttgttaaacattgtgtttgtctaatgactaattgtattcctttctatttacctgtgttttgcttaatctttctttgtgcacaccaaatgtttgagaatttgtttctgagagagcccgtaaagaaatctttggtttttaaacattccttcaaacttctgtgtgttgttctaagtgttctactaatttctgatgggtctccgaggacctcaataagctgacaacactatttctttttcttattttcttaggaatttaaaacgctgcagggaacatgcaattgactctggaattcgggtaactaactttgttttatatgctttgtaacttagcagtatcatcaacttttgtagttgatttaaaactgtatatgtttgaataatcaagacacggcatgtatgaataaattattatacgtatcaagaattttgagtgtataatctaagaacattataaatattttttggaaaattgatttttggtgataccaagttgaattttatgcaaaagggtggcacagtaagagaaacgaaattcagaattatttctgcctttgttttgtttgaggagtgaaatctttgattgaacctcttgaattgtacctaataatttgtgcataaatagttttgataaattgtcattgatgatttggttctctacacacaaaaattataatgaaacggctttttatgtgcgacctatacttttaattggcttgtaccgttggccattggtggtaggtgatctatttttctgtaatgttacgttccatgggttttatgtgtatatgtaaatcatgtgtgatctggcgtatttgacattggcatctttttctctattttaatcttgtttcgtcggaacctcattacagtttactttgttgaatgcagtgggggattagaactcctttgtgaatctaaaaagattcataaagttgatgttgaaactcaaaatggagtagagaaggtaaagtacaatttaacttctgttgatagactgaaatggctattaagtttattttttaggttgagtattgtggttagttgtatgataaaatcgtatttcacttctcagttgactatgaaagatttgcttgcttgggtgcgtatcaatttgatcaaggaaagacctgagatgtttatgaaaggagacacagtgtaagttgttctcggcttaatttggagtagtgtgtttaaactataaattgaattttatggctggccatgaaagttggaaatgaaaatgctctgaggattagagacccttgtttaaatctggagggctacttgagtttgaggtccatccatgtgtttaatttcacttagtcttgaggttcaagtctcagagttggcaaagagctggctaaatgagcgttgaagttcataggatatcaacaaaatagatactatatctcttaaattactaggaattatgtgtacctgatgagagcctccctgggattccaatataacaaagcaaaccaaaataactaataaaaccaaccacagagttaatgagagtagtgaaaatagtagaagaagggaactgaattggtgagctatagttgataaaagatgcaaaaggagactttagtctcacagagattgagagccattgctctccatgagatgctaagaattaccaacttgttgcataaatcacacactgccagtggttagacacgctctaaatgagcaactcaccttacacaatggaattacaaaaacacccttctactcactcaaacagccagctcaccaaaactacaaaacttactcctctgtatgaattttatttccactcctagtaatagtataagagaaacgaaccatggggcctaacacttgagaacatttgatgtgtttgtaagaacaacttatttttaccatttgacattctgttgttaacaccatcacgagcagtgtaaggtattagtttctttagtagattactcagattttcatatgtttttttggcaggagaccaggtgttctagtccttgtgaatgactgtgactgggagttgagtggccaactcaacaccacactggaagagaaggatgttgttgtctttatttcaaccctacacggggggtagtatcttaagttattgccacatctttggaataaagataatactatgctttttgttcagaaaaaagaagagataatactatgttttataggagtacgcctattcttttaagagtgattttgcctaatgacatcttgattggttggttggttttggggcatgttttgtacccttaatgatattatattgtatgaataatcagccaagttccatgttctttagctaggattgtctaaacatttgctatagaaggctaactgattttatgtgatatcctattggctaaactcatttaataatgcctttacacttttttcttctttaaatgaattacataatattaaattgattgcaagaaatgattacaggtttcccctttgaaatgatttaaaattgtctacagtattaatagaaaacaatttactattcctatgaaaatattacaccatatgaaacaactcatttataccaatagtaattagcactttctatatgtgatatggtaccagtaataatatgataccgagaaaagagctaagtaccaaaattgtcttttagcaattctctattttaagggtgatcataaataacttttcttcccctctcttgtagaagcatcaatatgctttttgacccatagtttagctaaattaaagtcttgttttaattgctcttcgctgggtttttgtctcatattgtctcatattcaaaaaaaaattgaattatacttgtaacaacacatttatcagcaaggagtgaatccttcacaatttaattattcgacttataattattaagtacaataagaaagaaaaagaatagaatatagtgagagaaccaaatcaaactacctagacaacaataaaggcagtgacagatggtgtgagttattaaggagctagctcatcaatgtggaatggcatactcagactcaggccttttgctttccttttcttagtctttcaagctctgtttcagcaccttctaactgttgtctaagtgtggacacttttcgctctaaatcttccactgtggtgtgactgatgcaaggttgatacggtgtcaaaaatttctgcgaaaatgatttcagtgcctctactccagtaacctacaaaaatccataataaccagctagtcaaaaaattgaaatatacccatttgtaaagattattgataaagacaactgtttagttatcccgcaaaacagttatgccagttttcaattattgttagttctcaaaaaccactacattgcatcctgtaggtgagcttatagaagatataaattaaggcagtgtagtttacctcttgtggcagtaatggcaacttggtaatgtgaaaatcatcatacaacatgtagaactggtcaagatacttctgctgcatccgcattcttgctttgagcaatttagactcaacatctataacaacagaaggatttatgtattagcttagcttcggtcaaagcaattcgaaaaagagaactaaatgggcaaaatgaagtgaagttgcaccttcttcatcgtaaagtacttggttaataataatgttgtgtgtatctatttcaaatttcgtaagttcctgcaccagtctctcagtttcatagagtgagagaaactctggaatgcaaacacagacaaaggttgtcatgtcctgcaaacagtgaaatatgaattaattcccctatatgaaggttcaacattgaactgcatctgcatgaaattcaacatagcactaatgaagcttattgttattattatcttattttttgagaagataaatttgttaagcggtcaccaacaaatatgaaataaccataagtaggtacagagaaataaaatgatagactatgtaaaagtgtggatggatagaacattgagacgaaatgtagtagaccaaagagcaaatggaagagataaacataaaggaaaaatgaaaccagagagcaaataactaacactaggtgcttcaatcaagttctttcatataaagtatataatgttttaaactaacaagttcacaaaaacgaattcagatcacttcatgtagccagtcttaccgggtctttaaattgtctgtttacttgttcaatcacatctttcatgccttcgagctttcccaaaatagcatcttctccaaattcatcatcaacaccaaatagtcgagtcatctaacataaaacattttacaagacacttgaatgttaatattactagaagtaaaaccaagcaacagttattaaataattaaaagatcatcagatcgagctctttttttaacagtggcatgcaagaaaaaaaatgccgaggtttcaatttttatttaaaaaaaaaatcaaagaatggaaatatatgaggaatagccatagcctatggttacagttgcacagatgatgtaagatcccctcaaaaaagaaaaaagagtagaatctgcaatcaccaactgataagaaaaaaagtgctccataaacaaggataaatgacgagcacaagaagccaaaaaatcaaggtctctaggaaactataatttgataggttgaacgaaatatagcttgaaagctccaattgtgggaccatattgtaaaagaatcaacaattaaaatgcttctatactggttgtcaaaacaaataaaacaatgcaaagtaaagtaaaggtgacatcatttagggagacaaaacaatcatgaggaagcatatcagacaattattaaacccaatatacatcattactatagaaaatatattgcatcatgtaaattacttcacaccagacagtcataaatttttagatactgaaaaacattaaagcaatccaatgtgatcttagattttgctagaagaaaaacaatttattagtagcaaccaaatataagaattatggattatacaattttgttaaagtcagaacatacctggtttatcataccaccaaatttacttttcaaagacataacttttgcaagacccttctccaaggtagatggaaattgcaataaccgaagtgtgtgaccagttggagcagtgtcaaatactatgaccgagtaatccattgtttgcaccaatcttcagaacataatttataagaatgtatcagttaatttaacaatatatagtttctgtgccagagaagcacacatgtcaatatttgctaagtaacgagaatgttgtccccagataattgcatgggttttcatcataatctaacttatagttaacaatcaaatgaaacctcaaacaccttgaagttgaagttagtcaagcatattttctcattatcacaataattaagcgtaaggacagccattacttatttggatccaaaaacgatttctgtagttgttggagaaaacaaaaagaaaaagaaaagaggaattgtgctcatttcttacttcagcatctctgcaaaactcatggcctcatcaatgccaggaattgcgtttgctagctctgaaaatagactatccattccttccgcaccaaccacatcttcatgctcaacggttggatccacttcctgtagataccaaaatcagaaacgactacataaaaacctcaggacgaaaaaaaaaaaggtttggtaaaagcataaatagctattagctatacagccatgaagacactaaacaaaatccatcacaaaactgtttttaaaatctcaaatgatcacacagtacctattgttctctgcaaagcagagagtttcaagaattgggtgttccgaatttccataactacactagattcaagcaaaacaagaacaaaatctaccacaaatgaagctggagaaaatcagtatctgtaattctaatctacacaaatatatgcagtaacaaaaaacaggaagtgagtgccaaattcactaaataacagaacccatatctataatgacatgcataattatcaccgccgaaaaaataaacagaaaacaaaataaaaaatcaaaattgagcagaagcaaaaacacagcaaggaaagaatatgtttgttaccatagcgtagagattggtgaatccattaaccaaagtaggagtcttggtaaagcgttgctgaaatgcatcgctgagattgtgagcagggtcggtggagatgatcaaaacggaagatcgaacttgggagagaagaatggagataatggagctacaagtggtcttgccaacgccgcctttacctccaacgaagacccacttgagactctcctgctccagaatgttctgcacagtcccttcaggtaaatccgatgccgccgccattctcagaggtggatcaatctctcgctctctctggttatggaagtgggatttagaatgagaatctgggttacttcaaaacagcgctctcacctcatctcacacaactcggcaacacccaaaataacctcgctgccacgatacccttttaattttagttacttaaattaattacattttaatttaattagatttaata

SEQ ID NO: 19253 - DNA, 4764 bp, Cannabis sativa
gtatttttgtaaataaagtgccaatttatattttctatgtaataattccattagtttattacaaaatattagtacatattcaaaataatacaaaagcctgatcatttcaactgagcacaaaaaacgacggtgttgatatgtacatttgtcgggagacctctgactcatggttgatccatctttccttttcctttacctgcaccacagaaaaatcgtgagtcacaaagactcggcaaggaaagcagcaaataaaatataatttcatgattaaataaactagtaattaataacaattacacactcaaagcatatattcacacaaaacctttcaacttatcataaaaccaattattcaattatttgtctaataaggcaagctattcctgatgctttataaagtatccatcaactctcgtttctaatgagtcaactaatatagctattgttgcctaatgaggcaaccaataagtaagaaacctaacaacagttttagaatagagttataactcttttatattaacggtcattaccgtatctcaattagccatgcaatgtgatacaattgacttttcttaccttaagtccaagttcaggtgttcggactgacttgagtggaaaaatgcttgacgatctcgggccctatgtcccaacaacggtaaattgataaataatttaatcaatcacgctctaatacttaaactcaaaactgaaaatcccctatcgataaacggtccaccgtattcccaaaagggtccaccgttttcccaaaacggaccatgatttttatgggttcagccctcgaaaaacggtccactatttttacagtaatttgcaaaaatggtaagcaattttttcctacaaaaacagcacaacttgggttttacacttcaaacccaaccaaaaatcctccaaacctaatcaaactttctgaaataggttgataacaaccatataagcattctaaaccttcaaagcaattaattatcccaaaatcacaatttcactattattgagtaaatttttgagttctttaactcaactcacccaacttaaagtataatcgcccttaaattttgaaattaaaacttaaacaacattaatttatacctaagaataagctctcgcaatataaacataaacagcaccaaattcatcaaaaattcttcacaaaacctaactttaaaacccttaaatattcaagaacactaaaggaagcttaccttaagcttgatcaacccctaaagttgatcaatagcaaggaaatgactgaatttagatggaaaagctctggttttctctaaggttttcttgagccgaaaaggaagagagagaatgagttttttgtgtgatatccctattttgattttatctcttaattaggtttatgaaaaataaattaatcttaaattatatattcatattcccttcgacctaggatctactagagtcccatataaaacaaaagaataaaacctagtgaagttaccattttaccctaaactcattacataagaaattttcaaacttaagggtattttggtcatagctaactaccctaaaatatctcgtcaactcaaatgtctactagaacattctgatacaacaaaaattcattctattactatcgtgacatccttggccaaataatcgagcttccacggccgcctaacttaaaaatattttatttcaaaaatggcatacataatacctatatattctaataaaatcttcgtaattaataaattacgcttattaataaattacgcttatttaagtatgttctcaaaagtcgctaattatctcataattagcttttgtaacattataatattactcataatattcatatcactacatatttaataaaatatgtccaattaaacatagttatatttttttagattaattacagtatcgaaattggataagcagaacccagcgtaccaggttatgcccaaaacacattattttattgatggaaaaaaatgctcaaaacactttttctagaaactaattggtaatggcccaggttgacattatgttaacctaggcctaggcctagattcaggcgacctagaagttcgatttggtccttggaaatatttgaatcttaatatttgctaaaaacagagaatatgcctagaataatttttggaaaaattcttcgaaattggcctaggttgacaaaatatcaaccttggtgttgggctagccctaggtgttaatttgggtactgggcctgcccgaggtgtccaccttggcgccatgcccttgttttggaacctaggatgggttatttcttccttgaaagcacttgcttccccatttttttatgaagacgaagaagatgcatgggtcaaatttttgatttgatgtttaaaatgtgcctaggttgatagattatcaacttgtgcgctagggtgcctgggcaccgggtgtccgggtgctcaaaaatgaatgttttcctaatctaattctgatacctcaaatatgtttatggtatgtctagtagattcccaatgaaattttgacttgtcccaaaaactaaaaccctagtggggttgtcaacctaggcgttgggtgaaaccctgggtgcctaggtttacttctaaggtgttggtttgtgtattttcaactcccgatgtctggacttggttactccatgtcttcatggtatagaatactgaaagatagtgagttagaaatgacttatcagatgttgaacttccattttgaagttcccggagtcaacgtaggctgagggctagggaccctttccaggtcgactgctatgactcgggactactcaacttcgagatgtcatcttgcttgccatgtgtcaaacattgatgtcctcatcacctggaaaagtttttgggttaatattatttttcatgcaatcaatctcgtgagaataaaaactcaaagtagacgtagctctattactgtcgcgacacagagagtgaactactataaatttttgtgtgtattatttactttacatagttacttataactttcatctcatctatagatataagtgagttttccaaatttctgcgtcaacattttgatgctttctttgagagccacaactcaagaaatcacttacaagatagttgtaacttcatttacaagtgtggcatgtaccacaacaactggtcaatagactgggggcatgccagtcactgaaactggtgatgggagtacttcacagatgtcaggtggaggtctcaaaaccagatgcataactcgtcccctaaggccactaactgctactggtatcaacaccaatgaacaaattccacctaaggaaccacgtgtggaactacaagctgcatgaacaatttcaaaactggctcatggagaattggaggaattcggagaatcagcatgttgagtaagagcagcaaagggataacctatcccagtaaaccagggaagtttatcgctccagtcgtgaaacaccttccctaagatgagcttctaagctagcaggagagatacactattgaccaactggccacatggggactagcacctaaggggaaaccctcaatgcatgaaacacttctaccatgcccggtattcgtccaaacactcaacgcataacatgtattgtggctcttcgaagggaagcaaactttgagcaaagaactcaagctcaagcacgctaaataataggtcctccgctagatcttgagcaaccatgtgctactaagataaacaattggtcacctccataaggttctcctcattggttgaataacaccaggcctcgtgaccctacaaaaggaaagggacctgagactgatactagagggggaagacaatgactatactttaaaactagaggttatgaaattttaagagtaaggactaacgagccacttcacactcgaaagtacttctgagatgacagaggtcagttatgcttgtacttcgctcgtagcccacgaccaacaatacgagtatttccctcgagtgcatggggaagaattgaacctaagcaataaattcaactcttttcgcacttgtgatcatgctgaagactactttgagggaaatatcactacaatattcctaacaaccactcatacagcgtgtcatcccaaaacgattcaccctttaaaacatggacattaacaaggctataaaagatttaaatggtctcctttcttattttgaagattatagggaaaatgtatttgtaacggctatgaattcaactaaaaaaattgtaagtgagatgggaatagagcctaaattttctaaaaaataattaattcgtaggaaaaagcaatttgataaaaatgttgatgttgatgttgctgtaattaaatcttctgaagaatcatttcgaattgattattatctttacttgattgatcaaattatttgttcacttaaaataggtttgaataatttcaagtgtatgaaaatattttttattttttgtttagtatgaagaaactaaaagcattgggtgaagatggtttaaaagaccactctttaaatgttgaggatgttttaaaatacaatggatgatctgatattgatggtttagatttgttttcaaaattgaaagtgttaaagaaattttttccaaatgaaatagtaactcaattgaaatacttgattatataaaaaaagttgattcttttctaaatgcatatattgcttacagaatattactaatcatttcagtaacagttacttcagcagagagtattgtaacgccctaatgctaaggcacgctacagt

SEQ ID NO: 19254 - DNA, 2130 bp, Cannabis sativa
aaaaaaaaaaaaaaagaaagacttccaaaaaatgtgaggtcttgaacaattgcttaatctgtctcgagagttcggccagccatgtgtatgtgacataatgataggatagccagcaaaacaatcgtgaaaagctgaatttacaattttcgaaaccttctatccaagttaagtccactaatttaattgttagaaaaaaaaaaaaattagtaaaattaaaaatgatagttaaaactttattgatgagccaattcaaaatataattggtgaatttcatctggaaagatatcttttacaaaaacacatctgaaaaaaatattgagaaattctagatttcatcagaactaaaatttttaaccaaattttatttatctgggcatacaaatcttcctttcatttgatcatcatgttgaccaaaaaaggaaaaaaaaactattgaagttgcggagttgctaacaaacatagattacgtacgtgcgtaagtcacgtggttcacggaagccgtaggtatattaatctgtatgtattgttgtctgcttgttacgccgtcctgagtgagacaaagcgtattggatggacgtatgtttcaacattttgttagctgggggttaacaatcctgcattaaattatgctccacaacgcccaactactgcgcatgacttccttcctctccccaataaatgcccattcttttctcctaacaatatttctcagcttcaaactatcaactacttcttcctttttccctctattgtctttatgcctatgtggcttgtaatattctcattctaaacatatctctacattctccctggacaagcagaaagatacaatagccatggagatcgataaagagatcgatgacaacaacacaacagctgaaaacaacagcagcaagaaagcactcaaagctcgtagacgccgctgtctgatcgcagttggagccacaattatagtcctcatcttggttatcttcatcgtcatcctcgtccttgccttaacaattttcaagcccaagcaaccgataaccaagcttatctccacaactgttgtaggtgttacccctcacctcaccttacccgtggttcaactcgaacttaacatcaccctcaacctggagatcctagttaagaaccggaactatgctagctttagacacaatggtggaacaagcttgttgttttatgggaacaatcaagtggggaatgctgatatcttccctggaaatattccggctagaggctctgccacgctaacatgccggctggtcatcgaggtggaccagattgttggtccggacttaagtgggctgatcagcgctgttctctctggtcagctccccatggaaacaaggacaaatattcctggtaacgttacctttcttggacttatcaagaaacatgtggtggctgtatcaacatgtcagttcaccgttggtctttttgacatgaagatagccaaccaggtttgtgacagcgagacaataacctgagagtttctcacagatcagaggaaataatttatggctaggctctggcgccagtcatttgaagcatcactggacaagaatgatttaacaaacaacaaaaactatatatatttctgtaactatcgctgtgatttttctatacggaaatgttctgttttttgtgtagtcccaacagactttttctcgagttcgtaacacatactacttttactgtgaatatttcgaactagattcatgatatgctgagatttttctgactggagtgcatttcagttccaaataagttgtataagcaggtgaaaaaaaaaaaaagaaaatgaaatgatatgacaatgcttacctttaaaatatccacctaaaattgaaaaaaaaaattactaaataataattgtaacatgacaggacataatatcataacaaattttccttgtatagatattatagagaattgctaaagagtatcatggtatctaatacttttctcggtgttatatagaattaagtatcgatgtcatataacataagaaaataatttttagggagaatatcgtaaaccaatcgtggagcgtcacctatagaaaatactgacaccactggtgtaacaccctaactagcataggtgtattacgtgatttttaaacat

SEQ ID NO: 19255 - DNA, 3892 bp, Cannabis sativa
cagctcagaccatttcggaagaaccaacctatcttccttcgctaggtcagtattttccatcttcatctttcttctcttcaccatttctgaaattcttgattacatctcctaattagggtttctctctctcagcttccgctcttctccgtgagtccatgaacccctcctcactccatcgcctcgacaggaccgcagctccccaactggcagagtaagttactttttttattttttttttcagttatattataaaatctttttgatgtgtttgaaatttctgaatgagtgtagataaattactggaaaatgcaaatcaatatgtaaatgtatatatgtgcgcgcgtgtttttatttactctctgtattgttttgctgaaatttttgtgctcttatattatatacattgattgaacaagaaatcttaaactaaagatttaattattgatgttgtttaatgtgaaagttaaattatgctcggttaatttttgtgaaatatgattttagaagcaaaatttgattgtaaatatgaattttcgtttgaatactgttgattgtgatctgtcttgtaatggctttcatgttgattcttgagatattccaataatatcttgagctgctaaaaagttggatgtcaaatttttacaggttgcatattctaagttatttaaaaagcatttatagtctaaacaatattgttgcgaaatgaagataatgagtttacaaaacaaagatgttttgattgagtatatgaatatatatatatttatatgccctacgagtccatatgtgcatgcatttatgttttctggtcatattatcttccttggttttgctttgaagtctgcattcatgtgcatagatgtatgttattgtggccacaatactttgaagtattcttttcgtgttagtaattgttcttcttagttttagttctgagtttactgaatggtctgtttgcatattgatttactatgcactctatttgattttgtagaaagaagctagtgttacagcttggaagaaaataaggagtagatgaaaaaccaagaaagttatgtgccaccctcttatgttcctctggggcagtcagattccgaagcagatgttgtttcacaagatattgatcctgccttgcataaccctatcattgaggggtcattacaatggtcttctggaatctgtgcatgttgcgatgatatgcagagctgtatgctactttttgccttgtcaccttgatttatcagagggaaaattatgaaggtgcctcttgtgaatagagaaaggaaaacctttttctccctttgtttttgcttgtgttttaagctttacaagctttaaaaatggctagtgcacagtgcatatagaatgttttgtaaggctttacttagttaactccttagaacttggagagttcatggctagtttgtaggcattttgaaatagagtgggtttctgttgagaataagagagtgtacagctctacttgagattcaaaaccttattagtgtttccacttatggtcattccattcttttcaaatgtatttagaaagccattatttgtctataatgattcaggtttgggcttggctgcctgcgcaagcaaagatgagcacttgtgatattttgcataaaaggcacctattttcatccatatcatctaaatggtgtattctatccaaagacagtatgggaagtgtaggccgtatccttctccattgctgatactctcttataatgtggtatagattgctcaaggagctggggattcctaaagttgttgagatatctttcattaaagtgtatatggttgggttttagtgaaaacaagaaataattgggaatgtggcagttttaggcatttttaggccattatggtcacatggttggagatgatcagaagaattttgaggatttaaagataggtgatgatgatttatggaatagggtgaagctcgttgcatatgttggtttggtcgtatttttctttacttaaattcctctattctggatatacctacctcatgaacactctaaaactcatagttagctcctcctgtacaaaattgtaaatgacttgttttagaatcatcctccctctttgccttcaggcctaatcttcacatatctggttattgatgttatgagaaataagtttcggttgctttgtagtgtgaaattttgtgtgatattagaaaataagaatatgatttgaataaaatggaatagtttttaggatgctttggaatattttgaagcttttaaagaataaatgatgttctaagtagctttgctgctgtttggccgagaaaaaatttagggcctccctagttccttctattcaatccttatgtttcagtttcttttgttttttgaggttagttccctttgttttttaggtgtttttgccttttgctgttttatctttttggttgttgtgtgatgagaacattctgttctgtttttctaccgtttcattctttgtaaatattttcatttgcgtatcactacgttgggattttgtgaatcatttttcttccttcatgtaaaacttatgactgttcaatttggatttctttttgcacaggctgtataggccttttttgtccatgctttcttttcggaaaaaatgctgaatttctgggctctggaactttaattggatcatgcacaacccattttatattgtggggacttgctagtactgtctgctgcctattgactgatggccttctgttgggtttgcctgtgtgctttgttgcgtgttatgcatgtggctaccgcagggctttaagatcaaagtataatctacaggtatgtcttttaatattttagaggttcttccttagttttggtttcgttcggtgttatgtgactagcacaggactgagacatagtaaggcctttgaattggtatgttgttgataaagattttgcattattgtgttgttgctacattatgcaggaagcgccgtgcggagactatgtcactcatcttttttgccatctgtgtgctaattgtcaagaatatagggagattcgagaaagagctggttccagtactcctgatcttaaccttgccgttgttactgctcctccggtccagacgatggtttcagtctctgagaataacacaaatgcttaggtactaagatcagcattttggcttgggattgtatgattttatcttgtctattatcacatatttctgactattctgaatctgtacaatagggtaatttttgaattacttgtgcccttagattcgattgaatgaatagagttagtagaactcatcagagcccatatttgagtgaggtatcatttctctagttctacttcataaatatgtaataacagacttttataagaagcttttgaaacatgacttttaaagtttggcaaatcgatgtgtatgtaacaactgaaatctgaaatttttgagctatgaggaaacaaaacaaagcttgttgacaagtaaagggaaccttggactaggtgactttggtggtcacctaaacctagtttgtgtgttgctttgctactatagatttgaggcacaatggaaaaggtggcttttaaattctgaggagaaatggtagaagattgagtcggttaactccaaccaactagaaatgtattattgaacttttgatactacatgatcctaccttttctgttaggttccgttatgccacttttgttaggttctgtttcttttatcattatataattatgcttattttgttaggttttatttcttttagggttgagatgcaaaatgattataaatttggtaactaagtttagtaaatgtccactttttaaaaaaattaagaaaatagtcaaatttaataaattagctaataaaaattataaaaatatatttatca

SEQ ID NO: 19256 - DNA, 5442 bp, Cannabis sativa
ttttttttttttttttcaggtttatgcttgttttctttttgttcatgtttttatggtgaaataaatcatgttgattaaaatgaggtgaaatatgctcaataatatgaattttatggatttatcgtgaatttttcaattgtaagatacaatggatgaaaaattctaagctttcgatgctcagcacgctccatttgtgactgcaaataaagcctaaagtttgaagcctattttttactatgatacattcacttctagaaaaaacttttagaattgcatcagtttggaaattttgcttggatattcctcctataaaaggttttggatctaggttttcatatcattcaaacttggaggctgatttggagcacagaaggaagactaggagtagaagacaccattggagaactccaaataatgttatttctcatctatctttatcttttatgtgtttaattgaatctttgttgttttagaatgactcttatgagttaattttattttaaggattattatgtcaatcacttgaatttattttatggattaatgtagttattcaatttcatcttcttctcttatttcaattccaaacaatctgttttaattttgcaattattcactagtcatctataattgttatctatgagtttgaatcaaaattctagaaggtgagatttgaatatgctctaattattatggatttcaattgagttaggacaaaattaccttggttgtttgtatattttattagtttccttacttaatgctatatggggagttttcacctacattgggcttgtaagtcttaactaaattatatactatttaactcaacatgtcaattgaatagaaagaagagaaattggataatttcattaggatataaaataaaggatagtttgaaatcataataatccttgtctttattattgttatttctttatgtttaaatcattgttttagtttatttactttttctccaacatttttgttaatcaaataaaattaaaaaaattaattaatgggtaattgataatcaatccacgtgggaacaatactctatttagccatgttttacttgttttgattgcgtatacttgtgtactgaatttatcaaacaacatcaccaaagacaaaggtgaccgacgacatgaagctcattgccctacaatcacttatattttgctccatgttatggggcaagatgtggagaaagagggttgagaccttgtccgagtttatgtccatagcacaagatatcatcaacttaaaatatgcttattagcaagcctttagagtccatccagtttcggctccttctgtgtccgcaatgacgtttaacacggaagtcctagtccctagcactcagcacactctgattatctatggaccttttgcatctgggtaggcacctacccaaacacatttttctgggtatggagcaacacaaactagatgtagcatcactcccactcctaaaacaatttctaaaacgatttccctaaaaatgtaagttacttccttttatagtgtttcaactagggcttagggttgaatcatcatattcgttaacaaaaatctaccttaatagtttggtgctttcattgagagcctacgtgataaaagctcagaaaaatccctcctaaccaatgacaaaattttttctccatggctgataatggggaaaacgataacactcatcctgaagagactactcatcgtcctggaaaagagatgataggctcacaaaggccacacaattcacgaacaacacgttcgacacggtccacatgctgaaggaggagccaacgtgaaaccaatgctgaagaagatggttatatacctctgactgaggatgtttacgaccccaccagatacgtaccgttggtcgagttggaaaatcatcaactccgacgacatctggaggaggcaaaccaatgaaacgctgagttgaaacaggaggcggttgtagctagggtagcacaggaaaacgacgtacaaaaccaacctaatcctggagtgaggaggccacgaggcagacctcgcggctcacgaactaggttaaaggcaacatctcaagaggaccctcaaaatgctcaggaagaagaacctagggaaactaaggatgcccctaaagatgaataaccgaatgacgaggcacctcataaagaagtgcctcagagaccctggggatttacaacccaggggaatggaaactgtgatttcccagagtcctctagcagaaatgcgaatagaagggaaccccgaactagggaataggaaatccctcgtggtaacgagagagatcttgggactcaacctaggacaagtgggttgcccctaagacatcgtcagcgtccttctcgcactgatagagaaggggcacacacaaaccccagcaggggcatgtatcaactcattcccaaaggagaaggccagtacgtgacgaggcaagttctagctcgagacgtacaagatttcaagatcatagtggatatacgcgaggaggagatagaactcattgcagtagtgatcaagagagtacgggaacaactagaatcgagggctactcaaggatgagatctataagtaattatgacccgcaacgactaaatcttgatgtgaaattgaaccagaagaagcctgacttacgtcaacaactcaatcaaaagaaagagaatcttatccaattgcgaatcattgagttggaggacaaattcaggagataccaagatagggaatatgggaaactgcctggttctgactcgaacaaagagcccaagcctttccatccaaacattatgagtaccgaattcccctagggatttaaaaacccccacatctcgtcatacgatgggactgcagatttggtcgctaacctcaaaattttaacaaaataatgcaagccagaaatgtttcgaataacttacaatatatatttttccctacctcgctagttggggcagcgagcagctagttcaacaaatttacacatcactcgatcacctcttacgaacacttgtctagagacttcaagaaacagttccaggtagcaagagataggcgacccgaagcgtcttctcttactaacataaagtagcaaccggacgagacacttaaggcctacctaatcatttcagtatagctgctgtaagggttagaaacttaaacgatagtgttaaatttactgctcttcaagtagggaatacgactgatcgttcgattgctggaggcgagctgtgggatgacttgcagggtcacccagtaaaaaacatcagcgagttcaatgagagagcttaggtatttgttcaaaaagaggaagtaaagaaagagatgaagttgttaaatattggctcaggaggtaaacccaacactgtctcgacaagcactgtctcgataaaggctgacaatctaggaggctcttttacaaagaggaaagatgagtcttaggagtcagccaaagataagaaaaaacaaaagaagcacaacaagtacgtgccagtctacactatttatactgagcttattgaaacctgggaaaatatctacctcgcacatgagcatagggtcgcattccgtaaacttgagcccatgagacatgcgagacacaaaagagatgcaacaaaattttaactacaaaagttgttgcctagcgactatacaaaatacaaccagctgtcccaaagatcgtacgctctaggtgtaatagccccaacatgtacaatcctcatctgctcatctcgcggctgctcaaccatagccttgcccttacctatatatgcaaacaataactgtgagcgaaaagactaagtaagaatatcataatcataaacataaatttaacattaattataattaggcgcccatacacccaactataaccctatccccgtgtcccacacaatactgagtctagaacgttcatacaaccatactatcaaccaaaatatcagtatatactcggtaatctagtcatactctagtcgtacagatgtgatagcgttgatcttgtaattgccaaacatacatcaatcaatatccagtacaactctacatataaacatgcatgctaaacatgtaagcaaatatgcatatcattgtacaattcttacctcgttttcaaatttaggtgtgccggtcaacttgagtggaactgctgctcgacgatttacacgcccctgaatcacaatattcgtaaaactgatgagtgacatgatatatcactttttgggaacttaaaataaaaaataaattaatccctatcgataaataacttggcaataccctaaatatcgtaaaaatagaaaaaactaaggttcgctaaaataccccaactggtagatcggttccccaaccgtaagatcaattttgtggggtttcctagggaccaaccaaattcttgttcctacaggtcccattgttatggtcgaccaatttagtgcagaaacaccaagaactccacaaacacctcaattcaatcccaaatgctaccaaaccttccagagtacctatttacactacaataaacataatccaacaataaaactagccaataacctctatagcaaaaaccaccattagagagcaaagcttgagttcataaactcaaaccttgctcaatcaccataacaaccagccaatcgatcctaaaagagcttaaataacttcaacataatatcaaaacacaaaatcaaacactgtaaaacatcacaggtcctaaccctaaaatcaagcataaaatcttaacttatagcttaagaaaccatataaaaagagatagggaatttaccatggactaaaacctaaaagatcttgctaaacaccttagattgagctgtagaaatccttgaatgggtgctgacttttcttgagggttcgagaaagagagagaatggaagaaatagagagtttatgtgtttattataatctttgaataaaagtaatattaagttatcatctaacaaagtaaatataaaatcagatcaataaacataacaaaaatgggaaaaagatcattttgcccttgcctaagccaaaagacaacattaccacctaggggtaatttggtcatttctaaaacctcaactatttttgacattcccaatgtctatctaagtttccccattattactaaagtacgaaatcattagaaaatatgatcctatcagtcgaacatcgcgttctaatgttgtcggccataaaatatgaaaaacatgaaatttcatatacaatgtaataccacacaagaattcgaatatatcacataaattcataaatcattactaataatccaatatcacaattaagccatatttatcttctaattaatcatattaaaacttaagcaatctttacaattatcacctgttaaaaggattccgtcctcaaaatctaacttgaataactcttgatattgagccttcatgtcaaactccaactcccagg

SEQ ID NO: 19257 - DNA, 3967 bp, Cannabis sativa
ataattaaaaaattattaaaaataccattagtagtcactactttcttcattagtataattaaatattgagtcatatataacttaaaaaaataatttttaaaaaatatcacaaactactaaaaaataaaaatgttagacactactgatattcagtgctctaataattaataataatggctataaacgagtatatgaggtgttattatattatattattatgttatgatatgaaatacgtaagcataagaataaatgtcttcttcaacaaaaaaaacaccaagggacactatgtaatttacttaacataacatgtaaattaatatataaggtttttggggttgttgataaacttgacaagcatagtattttagtactaaaatctaactagtaagtaatagtgtatcatatcatatcatcatcaggctcagcagcagcaagtagcataagccgataagcttggctataagtcagtcctactcgttagttgattcatgcatatcatgttcacgatcatcatcatgttaaaaatgctaacacaatctaagaagttaagatcctaaatctagtactaagtaacaactaggaaacaaaaaaccaatcatcatatcatatccctccctcactataccctcctctcctccttctcaaaccccccaccaaaatgtccaaccaatctaataattagatggatgcctaatcatattgacaaaactagctatttcattcaccttctcttccattttagccttccaattaaacaactcttgaaacatttcctgccacaaaagaaaacagaatacatatttcgaatgagattttcggttactcttatgtagtatcattgattgagatgaaaaatacagattattacctgacacagaaatgatgaattgtggaaatctgatatggagttagcagtaatagaagaatcgggtgtcacgttagcaggatcttctttctgatttctcggaaactcctggccatccctgagtttgcaaaacacaaattaatcaagggtaactcttaaatatgattattgattattgtgttaaactttatggtgatcttcttactttatcattttgtctttcaatcgttccatttctcttgaagaagcagcgccttgagataggcaatccccggtcttggaaggaagaggcaagaatgagtagagatcttgcatcacaatatcttgctcaagattaagaaggctggtagtagtagtagtagtgctatcgaaccatggtaaaagttcgcttccctggccatcatcgagtttagtactctctaaccaatcttcccactgttcatgagcttgaggactggaagtaggatgttgtagctgagattcttgcatactacttaagaaatttttaatttccaccagctgctgctcgagtttcgctttccatgttattaagtcctcatacattccctattgagaaagaacattcaaatttggcttcatatgactaaatcgaaattgaaacacaaaatgcatcttctgtccaacagaaaacagttgcaagtaaacatgaatgagcaaaaaaaaacctgcatgctcttccaagaagttaaaatcagtttcaggttttgatcagtctcagctttccatttcaccatttccttaaacatttcctgcaaatttgaacagcaattggggtttagcaagcaaaaaaagaataatgatgatcatcatcataattaatactaaccaaacaaatgttgttttgagagctcacctcaattcgattgccattgtatggctcttgcttcttgcgcgataactcttccatatcactttttttatgcagaagaaacaatttagaaacaatgcacatcatctttaataaaagtaacaacaaaaaactgaaaacaaactagctttactacctcttcattttgttcaactcggttctaagcattttcagttctcgagcagcagtaacagaatcatcatcatccactggcttcatgctcttcccagatgatggaatccagaaaggatcttccaccccggcttgctgtcgtatgtcatcaagttcagcatcctccaaccagtattccatcgcaccatctctgttatgccaccttctaaaccgctcagtcccacctggagccaccttcccatcaagatgcttcagcatatgatcaagcaggcctgtatcgcctatggatttacgagcagcacccctcagttcttgtctcgaaattgggttctgaaaagttgctccttcagttttcaaaatgttcaacatgttttcctctgccatcttatacctgcacatttcaattatcatcataaacaaaactcaaccagaaaagaaaagacaagacaagacaaaacacaacacaaccaaaattacctctcagcagaccacctttctatttgacaatcattcttcttcctggacttacgcttagaactactagtctgcttctgcttgccatgtaattttgcagccttagcctctttgagttgtgttcggttaaggcgcttcctcttggtaagtccttcttgtggtaattgaagggtttcagtcttgacaacaacaacaccaccacctttctcttttggttcaggtgatgatgatgatgagtctaatgaaagcaaacaaggattcttcttgtcttgaattacattggggtttttaaacaccatatgaggacgaataccccactcagccattgagggcacacctcaaaaatcacacacaaacccttcttcttcttagacacagtacattccagcagtaaatgagttttgagtttgagtttgacaatgaaacaccttacctaccaactgacaaccccaacaaaaaaataatatatattttaataaataataaaaaaacaaacaaggatttgggtttgttttgttgaggagaaaatgggtcaacaaaaaaaaaaccaaaaaacacaaaagggttgtgctgtaaaaccctaatactaaacaataaataacgagcaaatgtaatgtaatgtaatagtaagggaaaagaggtcaagtggtttcaccttagtaagaatgagaatgaagcaccattgttgaagatgatgatgaagaaggaaggtgtgttgattttgggttgtgattatttacagagtagaacaaaacagaggagaaaaaaaaggaaaaggaggagaaagaaaccttcctaaaccctaaaccgtcaacttctcactcttcacacacactctctctctctctctccccaatcaaaaagccacacctcacttcactgcccttgctctcagctcctctcctctccaatcaaatttttaatttttatttctgggaaacaaaaaaagatttcatttttatttttgtcaaataaaaaaaaaattgatttttatagttttctcgttggtaaaaataaaaaagatgacttttttatgtgtgtgtgtgatatgaaaatgaaaaatgagtattttgtgagtttatgtatttaggaattgggactatagaatagataacatcacattttgtcctaggaattacaaatacaaacattccgacataaatttatgctaacaactcaactgagtttatcaagttttaaggtaaatattacatcattattcaaatttgtatcaaccaatacatcattagtacaatttttctttaacaaaagaaacaactcatctttatttgatttcaaaataaaatgtttttgaagttggtattctaaaatgtgggtgtgtcatccaagataaatggcttgctaacatattgttgcttggaaaataaggttattacaccgtgggtgaatattcgtccaaggtagatgtgtggatcaagttagtgaaattactttccttttttaatgtaaatcaaatccctacttttaaaagattctagcttgtgattggtgtgaattaagaaagtaattttagtttcttattttattcactttcaaaagagcacttggggtattgaatctttgtaaatacttttgagagagaa

SEQ ID NO: 19258 - DNA, 4175 bp, Cannabis sativa
ttttttccctattttttattaatatgtattttttttaaatatactaaaataagaaaaagaaaagaacaattaaaaaaacttaaataataatattattaatttatataaactactgaagtaatttatattttaaaatttatttttaacttatgatctgcgacaaacacataaaattttaccaacgttgatacaaaaaatatatacaattaaaaaattattaaaattataatattacgtattcataaacttatataatcaataaatatatacagttaaaaaattattaaaattataatattacgtattcataaactaataataaaatacactataaattttaaaatataaaagtgtaagggggctagaattctctctagccattatatgagtcagctagtgtttacactctttttgtttcttaataatatatatgaataaagtatattttgaatatttttttcaaagaaatattataaaattatatgaatacttaaaaataaaaataaaacattaatataattgttgactgtaactttagccaattgacgcgaagtctgattaggatcaaattttgcttatggctatcaggggcaaaatgataataaatataaagacacaagaattcatagaggttcgatctctttgatcatgtaatgacttacttcccatttagttgtgttcactcttgagataataccaaccaaattataggttgagttttgataatttctagatatgactctctttagtattataataatgagaatgcgtgttacaggtgagaagtatgaaaaaagtattcggctatgagagaatgcaagaactctaaatatttagaatcttagtgtatggtgattgcatgtgaaggtgtccctttcacgtagggttaagaccctttatatagtgttagggtttacaaagttgttatttgaaatacataaaagatcaaaatatccctaaagaatagggatgttatttgttgatgaagaatcccttaaattgtagatagtttgaactgttccgaagtcgtaggagtgttgaggacgctttggaaggcttgtgggaaaaaacacaagtgttggagcatgacatgtatcttggccgaccaaccatatttaggggttgcccgatgcatgaggctgtctcccctagccggccggctaaaggtccggctaggatcttgccagtgcttgtatatctctatctttgtaagtgactctgatatcaggatgaacttgcttcagaaccttgaagatgtggatcttgtaagtctccatgttgttcttgtttatatctaccgtgcaaccatgtgatcttaaacgatggaaggttccacgacactaacctggccgattagtgttgtcctgtctctaacgtattttttttgctctttaccgcgtggaggtgccacatcagttggacaaaaattgggataaaatttgcccccaagtccctgtctaaacgtctatttgggtagtgactttaaaatctgtctggtattgtgatgccttttatcgtgcaaattcgcatggccaaatataagtctcttcaactggcgtgattttatgacagtgaccagtttttatgtcgatcaatgtgggaaatcgtgtgatggctgcacactttctcatgttgaaactcttggcattctctttcccatgcatgcctatttttgtgacattaactccaaattaagttttttcgggaaaataattttccagaaactatataagtgtctcatttttttttataatctctcacttctcatttatttttcaagatttcctttttgaacaaaaaaaatctctcaagaacttcatagaaaccgaagccttgcgagcttgagttcttcgtggaatttaactttctcgaaacctacactcgtcgtgcggactaggacaatcttgcctgcatctttttagttggtaagttattgttgagtttcaagctttttaaacttcttgattttcatactttagagtaggctttatgcactgtgatccgttcaatagctttaggatacataacgtatcactctttcatgaaaaagattgaatcttgcgctttgttttgagatattgaccttcagggtttgaagaacacgaagaatgtaactttgaattaagaaaattagatttttgatccgttagggaccctgcccagcactttgggtctgttagagaccatgctcagttcttgatcccatccaaattataacacccttctagtttaggcgtgttacaatacttttcataaatactgtgcaacctttgcaaatcaaaaaatttatcaaaagaagtgataaaatttaaactttaataaataaacataatatgcattacatttataaaattcaggattcgtatctacatttttcaactgtacataatcaaaagatgttgcacagcgactacaaaattgtcagccctaactatctcgaagatctaatactctaggtcgaactatctcgatatgtataatcttcatccagctccaaactcactatcttcaacaatagctttgcctttacctgtacataatatagcatatgtgagtcgacagacttaataagaaaaacataaaatataaacatataaccaacttacggctaagtactcatacacctatcaacaagtcataaaccatgtcaaacacgtataactgagtcttgaatgttcttgaccatagtatgattgatcataataccatatacactcaatactctagtcgtactagtgttggtagcatcaatccatactataagtacaactagccataatattacatgcactcagtactctagcatactagtgttggtagcaatagttcatacttttagaagtatacccaatcataataccacatgaactcagttctggtgtactagtgttgatagcattggttcatactttctaaattgccaaacatatatattcacgatatcaagatgcaatcatatatacaccaactattattctaactgatatgtcatacatctagcaaacataaacatgtacatatatatatgtgtgtgtgggttatactagccttaccttaattatgattttaggtgtggcagtcaacccgagtagaaatagccactgacacaacttacaaggaagaaccataagtatgaatgggcagatacttgtgaaaagagccttcaagaactaaaacaacgattaatttcagcaccaattcttactattccaaccggatcaggagggttcactactacaaaataaacttctaacaacacttttttttaactaaaaaaaattaaaaggcaacacttataaaagtgttgtctcctagactgttgctaaaaatctagtatataagacaacacttatataagtgttgccttatgataatatttaatgctttaaaaataattaattgtaacactacttttaaaagtgttgcttaatctttttccattatataatatttgggaacatttttattaagaatgttaccatacttaactttttaaaacttatttatagcaacatttttattttaagtgttgctttatcaatttttctagttagacaactagcaacacttatatgactagtgttgttatatgagtatattcttattatcaataaataccataataaataattaaccaaatgccacaaagtcgtaagaaagaaaaaaaaaaaaaacgtaacctacattaatttaaaatttacaaactcaagagttagtacaaataacaattacaaatctgtttaaagaaaattaattacaacaatatagttcaaagtatgcacatataaattttaaactttaactccctaaattttaaaattgttcaaaatgtgttgcccactcacatcgaaccacatttagttaatcctttgagtaaaattcctgattattacactataaaaaaaaattataagtactaagagatttaatatactataaatacatgagatttcacatacttggaatcatgaaatttttaatctcttaaataaaataaaaaatatacctttgattttatataactacttggttgaggtttaaacacaagatctctcatcatggtgcaaacgtaaaagccacatgtttttaaatcttgttgttgaggacactacatgaatatcaaataataaatagaaatcgttagatattactaagttaataataaacttaaataa

SEQ ID NO: 19259 - DNA, 3028 bp, Cannabis sativa
  modified_base (55)..(55): a, c, t, g, unknown or other
aattaaaccacacttttctaaaaattatagattaataatattaagttataaaagnacacacgtggcgttcctgagagtcagggcgttacagtaattttttagaaaaatactaaaaggtaccagcattttatgtgattatcgttattggtccaattaagtattgagtttcatatagtttaatatgataacttttagagaatatcactaattaatcgtaaaacaatatgtctagagatgctacgactgatgccttaataacaatactcaattctttattattaacaatgccacataacaaacaagctctataacattattgtaaaaaaaagtttgggtaacaccattaactacaccgactaaaaattaataaaactgaaacatttttacacaagagaaatatttttatatattatgatatttatctgataggccacaaaaacataaaataacatagttgaatcagtcattcagctgaaggattctgagtaggtctgagttgggtccatattgtccaatgagttggacgagtcatgagacgatgggcagagagaagagttaaggtgaaataggcaagaaaagccaagtaagaaagcatcacagccaccatcattctattgcaaaatttgggtacttgctcacatacagcttgccacgtcatgtgtacttccccgtgccgccccacgtaccctatggcggtcgccgccgcacatcccgccaccaccaataccatcattacctgcaacaatgtaacaaaattaatattaattagtaacaaaaaaatttaagaatttatatatttgtaattaattatttttagtattataaaatgttaaatgtaaatttttaatattatctaaactaattggtagtgagtggagtaatcgaaacataaatttacttacggtgtcatgtacaaaaagcaagaacaacttggtttggagtgagttaggctcagaacgcttcaagagaccaaaaagaaagatcaaggacagtaaagatgagacacacaatactgcatcagcaccaaccaagaaccttttaaacaaaaagaaaaagggaataatagacttaattaacagaaattaataaggtttttaaaggtgtttaattaattaatttaagtaattttacctgaaagcagaggagtaagagtaacgagctttgaactgaagaccaaatagtgagatggtttgtttatcagtgagtgtaagagaaattgcagccaaggcaaaaacaatggctaagcttctgagacagatttgagctatgaaaatactactacgtgatgagcttgatgatgatgagattggaattgttgttgtagatttctcttcttctgatgaaagtggattcttctccattatttaaataataataaagcttattattaactttctatgagaaaatataactactcttgttgatgagttgggttaatttatatatatatatatatttatagtgaaaagatatatcgaaaaaagagtggacttggaactgtatatagaccaatggcggtacacgtacactcgtctcgtcacatgggtctcgttgttcccgatcctatttgcaaaagtttggttaatggatcgggtcgggtttgaaacggcccatctaaatttcatgcatgtaattgtaagaatgtatactaaagaaaattttataatagtatgcatctttcaaaaatgggtgtattgattcaattttttgtattataatatttagatagttataatattaatttttatattatagttatttataatatttataaattttttgaaatttaaaataattaatcgtactatattacatgtatgtcttttttattttatacatattgtttaaaatatattattaaaaaaatactgttattgaaaataaaaaacaaatgatattactaaatgaaatttctatattaaatcaaattagatcgttctttttaagatgttcgcggcattactcagggatgtgcaaatattcaaaaaattatcagtttttcctagaataaaatagtccaatcgtcgtataatatatcgaaatactactgcactcattagcaaaccgtcgaatacaccttaaataatattactgctcaaaataaatggaatagaaaaaaaaaaaaaaaaaaggctgtttgtaaaaataaatatctctttcttgttggctattatataaagaattctaagagaaattaaacagtaagaaaattgtttttttttctaatgagggaggttgaattggatcatgactgaatagactgctctgttgaccatttaattaaacatgtttagaaaaactgtgttaatcaaataaataaaatattaaataaaaatgcacaccacactaagactcagtccaccacaatatcttatctatatataaatattgttattaggtattggtgtctagtaatactttcttaaaattaatatattaaactatataaaatctgatatatataatacatgttgtttatcatttctttttatatattgctacattaagcacttttgtatgatttgctggacacttggcaggtttggaattgtattttgagtagtgatatatataacactacactcacctcttgaattttaataggatccacttgttttgctttctattaaccaataaaaataaattattaaaaagattacttgattaaatcacattaagccaagtcacatcgtgtctataataaatgagatttataagtataagagtgaaatttgttacaaaagttttattttcatccacaaaattataaatttactttaatattaaaaaattcaacttaaattaattttaaataataaatcttaatattttttttaattttcttttccaatttcttttgtattaatttcagtaattatttaaaaattttaatatattattttattttattttaataagatttcatatagttttttattttaatttttttgtcttaatattgaagatatattttagttttaattttgtgtatgtatattttaaaaatatgagaaaaaagatttttttt

SEQ ID NO: 19260 - DNA, 5107 bp, Cannabis sativa
atacttaattatattaatagtagtctatgtgatatatatatatttttaaatattttagattcagtagtactgtgtcgtataatactatataaaattaatgtataatatatattatatttttatatagtgaaataaatatttagtattgacttgaataaatttgagcataattttctttaactttagttatttttgttttcttctaattaccatacattctatattgagtagtaattgcaatagaaattataattattaattatacctcttttttaactataatcatttttatcttttcttataatactatatatcttaagggtagtacatcttaaatgagtattttggtagaccttttatctggttaagtatctaagagagttttttagtttaatttttttatgtaattatttatgaccacatgtaaattttttaaaaactctaagtagtttacaatattgaaaattaagatttaaatattttgttgcacgcataactactttttcttacatgggtggtaaataactgtttgaatcttattttcgacattatgaactattcaaaattttttaaaaatttacaaatgatcttaaataactacaacatgcactatcatgaaaaaaaaaatagaataaaaaaaattctgaatgctgaaagtgatagggggtctaccaaaacaccccgctaaagaggtgtactgaacaaaatttcttatattctatattcagtaattacaatataaattattttgggattatttcaaaaatacacaaaaattacaaaaatatgatttcacggaattttaaacaattttatgatttttttttttattttatttacaagaaatacggtcttttatgttgtactcttgttaatttgttattgatttttcgttatctgtatgttattttttgttgttgttttgatgttatttagatcttattttcttgttacttttatattgttttcgtgttatttctatggaaaatcgtaaaaatgtaaaaaaaaaaaaaaaatcagtaaaagtaaaaatgtcttatgtaattaacccaattatttttagggggaatcatcctacataccattttttcactttttttattttttattttttttatttttacagtttaagttgttccgataatttttatgtgggttgctatatgaattgtaattgcgatttaagctgctccgttagtttctatgtgagtttctatgtaaattttcgtaaaaatacaaacaaaaaaataactgctttaaaatgtaaaaataaaaattcaccttatttttataccaactattcgtattttattttattatttttactaaagggccaaatataaaaatatttcatatattgagatataggtaataggtaagcaaaattaatgatatttttctacatctatatctaaaaaaaaggaccaagccagccatatgattgatttgccaacttattcccctgttcttctggtgacatatttaaaataagctctacttgtttttctttaccatgggaatggttcaaccaaaatttgactacattgggatttcagtcttcacaaaccttcttctttttcacttatttcttttgtcatgttacaaaccaagttggtgaaatggtagatatacataataaatattatgaaaaattaccatgtcaggaagtctttgttagtatagtatagtatatatatatatatatatatatatatatatcagtgaagtttttggtcatttaagatatgtagtccaatcaagtcagtactcccaacattcttccactatttgtaattttgtatttatggcacttcttagctacacatattacattattattttgaactcagaattttacacactaatattgtacacactatactgttgacactttattgttctttttggttaatactccaaagttgaaatttgcataacacagttaatttagaactctccttgtcttggcttcttgtttaaccttgggacaaaaaaaaaacacaataacaatggtgaattgcgcttaactcgaacattagaaagactgaactacacaagaacaagaataagtctatcgaaaaaccaattcaacatagaagaagcttattactattcttatggagatccttgaatatcaatatgtcaaaatcatacctcaaaatttatgtgaccagcataactctgaaaagttcataatgaatgaaagttctttatacatgtaaaaaaaaaatcagaaggaatgaaatctaatagcctatattatggtaatattacacattcaataccaaacaaatctgatgtgatatgaacaacactgtaaaatggcaattttactaagccaaagttggacttagtggcaaattcaacttcttgcaccaaagggaacttgatatgaaataagtgacatcttcagatattctccttatttaagtggtgagtagtggattatgatgagaatctcagctttagtactaaacacaataattgggtacaagaaagagatagattccttagtcctacatgtctacttgtaattgtgtcaacaacctcttcaatcaaaaacttcaaattcaggtctcctcaccacataaaacaatgacaaattagtaatgttatgaaaataagcaaaggaaaagagtaactgatgttttaaatgagataaagacaatacagtttctgaatgaagttatgtaactaggtaacaaaaaagacaatttttgtaacagaatctaataataacaagaagaagataatattcaatggtgttgttcaaaacaaaaaaacaagtgtacttctaatcaataatcattataacacattcatctgaagacatttttcatgcagaggagattataagatcaattatatgttttatgggcatttttcctcttttctttttgtatacctaagaaagaaagaaagaaagcatgtaatccatgaaaagtgatcaaaagaagagaaactactcattcaaaaattactagtgaactgggaaaattttatataaaagaaaagaaaagaagactcaaactagtttcacttcagacatgcacttacattgcaatggctgaaaatatatatttatatattttcattctttccttcttcaagtacaagattttagcaacaagcaaaaagagagagaaaaacaattgacctcaaaattcaaaagctcatgagaatccttttccaagtttctgaattgcacaaaacattttccttcttgaaccaactgcattaatccccatatctttaagatcttccaaagttaacattggcaatacttcatcatcaacctcatgaatttcaaatacaggagcataacgacctaaccctaatccattaagccaaacccttacaccatcttcaacatacctttctcttagtaatcctaaattcccatttccattcccattcccacttttccattcccttacttctgtatctgatggccctgataattccaccccatcatgatggtcagaaaccctaaccctagttggtctccgattcccatgataaactacttccctttcattcaaattcccatctatccccaaattatcaagagaatgaattgggctctgttctttcaaagggctttccgagttttcgacttcgaaatcccgattcacatcgtcaagatcatctccggcactgtatttctcgtccccatctccgacctctactcctccaacgccgccaccaccttcatcaagcttagaagaaacccaattggatctgacccttttagtagcaaccgagcctcgtttcttcgattccttaagtttccaactcccaatagccatggtttcaagattaccttctctttccctctcttcaactccgtcgagaccttcgtccgtaccggttgagctaaaattcattaaaggtcgagtctttgaggtcttaacagtatcccgactagtccgattgtgattatggccgtggttatggtgatgatggtgatgttccatagaaagcttccagttcttggtgctccgccggacctgagaatcgtacgattggtctcctccaatatcccctaatcggacgctaggtcttcgttgtcgcttcgatccaacagtctcggaagaacccattacaagtaatcctcctcctcctcctccgccgccgccgccgcctaggggtccggttactgctccacttattccaactccgacgccgttgatctgagcttccgggggctgtaactcagccatataataactaagaaaagagagaaaaagatttcaactttctcaatgctctaacaaacaagataaaagaagggttttctttaattcaattgattgatatctctttctagttttttaattagaaaaatttaattgaatatttagaagggttctttttttttttctagagagagaagagaaatgtgagaattgagaggagagagagtgtgtaaggggtttttggagagatggaagtgaagtggagtttttttttttcttttttttttttgtacagagaatgttatgttctattggtttaggaattggacacgtgtccacctggtttggttgagaaaaacgacaatcgttttgcttttgacaagaagaagttttttttttttttttttgtcaaagtgaaaaattctatgttttgtaaaaataattccatgaaaggtctttttgttagggggtgactaattccatatggacaaaaatactaaaatgtattagtagtgtccagcacccatctacataggagtggacatccgattcatttcaatattttttttctcatccgatccaatctaattaataattgaatttaaaaaattatcatccgatctgatctaattaaacctcaaaattcaatctaatctaatccaattataaaaaattaaattagatcaacctaccaaacgagtcttaaaaaaaaagcacaatgaagtacgaaaaaaaatggactagtagtaaaaactcttatcatataagagcatcaacaattcttgtctatttaattttattaaggttaccaatagtaaataacattttgtctatgtttatttaatttgaaataatattttttttattaaaataatatcattgtggattctcttaaaaattatgtgttt

SEQ ID NO: 19261 - DNA, 6506 bp, Cannabis sativa
ggatggaatagcactatgacgaggaggcttatgttggctggtgtaaattatggtaaacttagatgttaggcaataggcgtataaatttaggattcagtttagtgcattacaaacaagcttttaagttatgctctgtttttcccaatgtatgtgaaggaagctaaaatagtattagtttcctagtttatattctctatgtacgtatataattatatgatgattggaatggaatgctttatttatgatagcaacatgttctaacaattgttaataatttcagatttcatccggtgaattaaatttgataatgtatttttctgttgtggcaaacatacaatttgaaatcaaactagacaatatgaaagaaaaaaaaaattatggagaacgtaagctaataaattaatttaatgaaaaatatcgaacaaaccataatatttacaacaaacagaaaattttcacatctataaatagtcacctacttaaatatgcatagaatagagtcatataatcagggtgtcgtatgcaatactgtattgtcgttttgaaagggctcgacctttggagaatgaatgacgtcattgataaagaaatgacaattgacgatgagatgaatgattagaaggaagatgatgaggaagcaaaacatgagtgcgaagaaggttacataatcaaaactgttgtcgttttttgtttgttggttgcttttcatattcctcaaagcctgaacgatgaaatagatgatacagccagctagacataaatccaatgtcacctttatcacgaacccaaataccttcttcaccttctcgtcgaactgcccaactattccttcacctccattgatatccatattatatatttaaccgctctgaaaaccaaattgagtggtggaaagtgaaatggttgaaatagttaaataggagtatgctgacgaacaaggttacatgttatattattatatatagagagagatgttaaacttatatgagtttgaactagtatactataaccgtcttgctttcttataggctgaaatttctacctcaatctcttgaacttttatttaattaagaataattatatgaataaaatatatataatttataaatttatttatatagaattaataattttattttaaattgtaaatattatatttttaaaaaaataattctattataatttagtagtaagaattggttaatgttattgttacatttgatactgtttaattgtgtatttttatattatttttttaagataaatttctggaaactattcctaatgtcgtaactgattgcacttctctggtagaaaacgaaggttaattatgtctattgagaaggtgttgtgtgattatttatatatttatttatttttgaaatgaaacaacttcattattacatcaacaaacaaagatcatataagagcttgacaagactagcctttcataacaatgcagaaaattaattagtacatctaggactgaaatgaacgtcgcaacaattgggatcatgaagtgagggcccgaacagagagaattgcagcctctcaacgtcagtaacgggagccatttcatcagtcccaccagcttggctgcattattgatacagtgggaaatattcccaatgttttagcagcaaacaccatggccaactgaagccatcatttgcgtttactttacaccaataatgttaaggcagccaatttcgggggttaaggtaattccaacaccattctagttaagtcttctggtcttggggaaggctcctcctcatcaaacagttttattcctaacaaaccagatctgccaagccatgggcaaaatatcatttttttttaaagctcttgatagttgatagccttccaaaatccactctcttccatatttgcttggcagatttctaatctcatagagcatgattaatgtcattagcagcctttcctacacacatgttacaagaatgattacttattgcaaacaaagtgttctcgttttccacacattacatttacttgataacaagtgtaagttgttgagtgaacgggtgtggcgtgctgccccatagcacacccacaacgggtcattttgtaatgtggcatgttttggtgcttgattattagtcaagttgtggaccaagcagtagcacctcatcaggatagggagacttttgtgattagcttttcttttgtaatttcattggcatacgtatagaaaattatatatgttcttggaaattccttgaaatctccttaagctttttaagggaggtaacctgatgatttatgaagtactcaagggttatactctcttgtccttttaaagtcatataataataaaataatgtttatctatacttgatgattgtttgttgtttttattggtccattgtgtgccatttgtctatatgcttatttgcgggctgtgtgagatttgtctttggagacgacttatgtttgcttgcactcaacatgtgcgagacatgtattatgcctaacccttgagttttttggcctgcaagcgtgtttaggctgacttgctaccttggtgtgtcagcaagtgttgcacgttctgctatttagaaatgtccaaatagtcggcctgtgacattgggcgaacctcgaacatgggtgtgtgcgtaatcaagtgttagggttggtcggctttaaaaatttaggcatcgcaaggaaaaattattgagcgagaaattaaccttatgatacaaaatttaatgtcaagacccacaaattatgatttaataaataatagggatttttttatttttacactttaaaacagttttgtttttgcatttttacggaactctacatagaaatttttattgcaactagcagagcaacttaaatcacaactaaaaatcgtatagcttcccacataaaaactaccggaaaaattactttaaaaacccaaaccataaattaaaaaaaattaaaaaaataatatataaaataatgtcttaaataataaagaaaactactaacccgcgcatccgtatggggttgggcatagtaatgctcattattttacggtgcactttgtgtgtggatcagcagagcgaaacaacatgacttcaccacttcatctcctccaatatctcccgccaatatctacagcaacgggcacaaaccagaggctaagatcttcactactgccgcccaataacccctctgcctctcccagagactcttatccgtacatcaaagcttgctccggaaccacagccagaagtgagaagaggaatggcccagatgactaccacgcaattctcaaagctctcaactctaaaggccgcttccctaggaaatctcttggccaggtttccctcttttattatattttctctgtatgcttcccgagaaaacaactgtcatctgaatattgagtttgctttctgctctttggtttggttgccgcgaaaagttaaactcacgtgaaaactgaaatgactttgtagtgttttccgaatgatttaggagaatttttgcgtcatatgtggctcaaaatcaccttttctttttggttttggaaatggatttgattgaatttggctctaacccttcgaaattggttgagacattttgtcgagcattgtgtacacgttttctgtagtagactctggtatataatctttttctgttgtactgagttttggccttttggttatgtttttgcagcactacatgttgaactcggaggtcaacgagcagctttccatggcagctgaggttaaagaaggtgatttggtattagagattggaccaggaacggggtctttgactaacgttttaatcaatgcaggtgcttatgtcctcgcaattgagaaggttagtgcgaaagttcataatctctatactgtgaagttgttttcaaagtatgtgaatgataaatcacacgattacctgtttctcagcttttctgaagttgttttcgttgtcgtaacttgtaactggaattaaaatccccaactgttttgttgtacataaaaattttcaagttatctggatcctggttgatattgcagactgattttatgcatggttaatgagttcaggatcctcacatggctgctcttgttagtgaaagatttgcaggcacaaaccgttttaaggtatacaatattttggtgataaattagtgattattatatgttcattaattctagatttctttccagcattagtaaatttatagctttcattgaagagttgaaaatattttgttgcaaaatgaaataataaattgttctacagggaccaaatctttataattgaggatgttggatacatttgattttatgtattgcaagtccctttcattctgtattcttatcaaagcaatttcggtggttaatttgatcaggcattcttattatccttctctttgaaacataaaggttatatccgaggactttctcaaatgccacatccgatcgcatgtgctatcgattatggaaagtgcaaagtctctgaacataaattcaacatatgcaaaagtgagaatacctccatctattattacttcatctgtagtactcttcccttcttggaatgatactcctgaatttgttttgattattattatcaaattttggaaaagaagttaatgaagttgaggctaattttagcaagagcggaaaacaatatccaaaaattcagcaatctagtataattttcttttactgcattagttcataggaattagatttgtttttagtgacggccaatgagcggatatatttgatatttgcatatgttagacctcacttgagatgatatagttatatttatatagcttcaagattgaatctcactccagtaattttgccaatgacaatggcatcgtcattttggaatgccaagtccacgcagtggtattccaaaaacttattgtacatgtatagaatctaacaaggatgacttaacaaggaattctttgggatcatatatttcctcacataatccaatgaaaactaatagtaacaattacttgtttttcctcgtgacattccattgttcaggtagtctcaaatcttccatttaatataagtacagacgtagttaagcaacttcttccaatgggcgacgtattctcagaagttgttctcttactccaggttggtattttttttcctcgtggtccattttggaatcatacattcttgttgaatctgtatcatggtctatttcttacaaaaatattcgttgctaaagtcacttcacttatgaattatgttattctttctgtctttgtatctgggatcaacaacaggcaacatgatgttctatatgttaattttggattgttaatcagattaatcaacaaacagaaaccatatttgatgggctttaattatatgtggtagttggaagatcatgcattgtccatagttaaagacatcacaagttgcttccataatttatagaaatgattcttttttttttttttataatttatagaaatgaattctgagtgcctgaaagtaaaaaatgcgctattttttggtaggcttggaagattaagctctatggtcccacaggatcataaaagcaagtatgaaatgaaaaatcctaatggactactgaacctgtatccttgcattaatatatctatatgcttaaaattaattcaggaggagactgctgtgcgtttagtagaatcgtcgttggggacacctgaataccgaccaatcaatatctctgtcaatttctattcaggtatcttctagatctgtatactactttgttggccaactttgtcctgcttctaagttttataactttggttgtaattcagaaactgtaaaaggcagaaattcctatggttgacttgagcttttcacggtcccatattgtataaatacctcgcgtctcataaaaactactaacattacctgcagaatacagaatacatggtaatgaaaatagttatcaacaggtggacatagacataacttagtagtattatccttttcctaacaaagagaagatcccaagtttaaattcccttgtaagaaaaaacagttgatagatcccaagtttaaattcctctcgtaaaaaaaacagttatcaatgggctctggatatttaagcttttctgttgtaaattcctatttcagatcctgaactcaattttaaggtgccaaggacaaacttcttccctcagcctaatgtaggtgatctatcatctcacgaatacatattaaatgctaattattgctatgaacaatttttttaatatgcttatggttgcattttatagtgtttttattggaaattccaccaaatattcccatagataagtggactagtcaccctacttacttaaaaatgagacatttattggacttttttctttctttacataatgctcatacatggtaaacagacatcatctacattagtcttttatatgaatcgaggctgcactgatgctttttatggtggtgcaggttgatgctgctgttgtaacatttaggctgaagcga

SEQ ID NO: 19262 - DNA, 4849 bp, Cannabis sativa
cgggcttgttgcatgtcgtgcctttcgtacttctcgtgtcgcattgtacttaaggacatatttttcgtgttgtttcgtgcctatgtcgtgcccatgcccatattttttcgtgtctaattgtgctcgtgccagtttcgtgtcgtgtcaaaaaacttgatccgtatttatagcactagtctgaatattgattttaggattttttattgttagttttttagtgttataaaaaaataaaaaatattaaaaccagttgtacgtgcaggtccgggttaaactcggacccgaacacatgtaagaagtccacccaaacacgcccgttcattgtgactaggttcaaccccacccgcctgttttatgcggttttttttttcaatggtcaggttgtacgagccgagtctgggtggtttggtcaggtctagcacctagggcttccaattcccatggtcgagcgcttagtctccaagacgtggccgagtgacacactctcgaggtggaaccgagtgcctacttcaagctcaatatatgaaagcaagactcaacatctaaaagccaaacttcgaagcaccaaagattggaaaccttttggacattctccatactctttgaagaatcatctttcctctcaaaagagaagaaaaaaaaaagtaggattgtattgaagggctcacaatccttacaactattcaaaagaaattgagtgattgagaaatgcccataaaaaattaataaaataaaataaaataataaattttgggttaaaatgacaagacatagacaacaaagttttggtattttgtattatgtttgttaggaatattgttattttttgtttattgctaaattagactaattatgaagatcattactaggccctcattcctctcatctcattttggtgtttctttttgcttaactcatcaaatattcattttatgttgttgtagcaaaaatagatacagttttttctcacattgagatttattataacaaaagtctgatatgcttccttctggtcctttccttttctttctctttctctaatctaaatcctatatccccagaaatttcatcttcatcaaacttttattaatcatttttttttctacaatcgttggattggaagagaagatatatagagctttttagctgtggagagattggtgaaaccatatgcaaaggtatttgacatttggtttatgatatatatatttttatctttttttttttttgctattgggtcaattcataatcatggttcattcatatatttatatttaattaaagtaaaaaaaattacctccttttacaaaattgttattattaagtaataagcaaggtatatgaatttcttttttaaaaattatttaaactatcaacttgattgtcaatatttagaaaataatgagagaatgttggttttccttctttctttttttagtttgatttgtttaatatgtttcattttttttttcatggtttcttattgtttttcatattttgtttattgggttgtgtttgtaatttttttttttttgttttcctcagatgagtaattaggaataatggggaagaaagggaattggttagctgtagtgaaaaaagctctcaattcataccccaaggaaaggaaagatcaggtctgtatatatacatatttatataaatctgtatactttttttttttttttttttatgaaaataaataaaatctaattcagaagcaattgctacatttttcctattagaaaatccataaatccaagaaaacatggtttggagaaaaagacaatataagtgtggtgacttcaacagaagaaacaactatattgcctattcctcatgcttattcaactccttcaatagaaaaggtggaattaagtgagattgagaatgaagagagcaagaagtcttactctatggccccaattgcagaggtggctgtttttgctgatcaagatgttgccgaggttgtttgccttagtggtttgccttggtataatggattatcaaaagaggagattgcagctatcaagattcagaccacttataggagatacatggtatgtcacatgtcttagtttattaaagcatcttcaatgaagtgataaaatagtggtgtagtggtatatattaatatttttgagaaaattgtagttgtttagtttcataatttaaaaactgttttctgtaaactaataatgattgtttggcaaaatcttttaaaaattgagttttaaaaaattagaaaacagaaaatatcaaaatgttgttttcaaatttcaaaaacgattttttttttgtctaacatatcatactgtatatttttgctcacatactcggatcctaaactcagatgcatactcgaactcgaacccgaataggttcatgtcatgtatggtgttaaaatattgattttttttagtaagaaaaaatctaaaaatagttttaaaaatttttgtgccaaacacactattaaatttttaaaatgacaaaaaactgttttctattcttacttttgaaaacacagccaaacagttttctaatggtgtgttaaaatcttgtgtcaaatttggcatacaataaatacaattttgtcattgatcattaatgatacacaatttttaattataataataccattaattattttttaaatatttaattaaattaatgatattttacattttcctaatttgcatcttgaaatgctattgtttattggaacataataatagcaactataacatttgtttatttctagtgtcaaatttgataatatttaaattttacattgtagatgatcttacttcttaacttttagcagaaaatttgtcaaactataattgcaatccgaatggtctacactgaaatgtggaggcctccaaatcttgaatttgtttgatgtttttctttggttgttatgtaacatgtggatttctcatcttctccattacttttattacaagttttgtgcatgaaaagttttcaattgtcaactctttttagtatgtagaaaaggatttttcagttctttgtaggaaaacaatttatgatattctattattgttacttaagattaatggtgtctattctggtattgtttgtgatttcagaccaggagagcattaagggctttaagaggcttagtacggttgaaatcattgatgcaagggcagtctgtcaaaagacaagtagccaccacgttgcgatgcatgcagactttggctcgcgttcagtctcaaatccacgcaaggagaattaaaatgtctgaagagaatcaggcgctacatcgacaacttcaacagaaaagagagaaagagattgataagttcagagcttctgtaagtttcatcactaaattgtctttgtcttaatatccttacatgttagtattttgctcttttcttgtttggtataataactctgccaatcttggtcttttcactccttctctgtcttcctcttatttgataaaatttcaatcaaaatattacatttgaatcagatgggagaaaaatgggttgatagccatcaatctaaggaacaaattgaggcaaaagttttaaacaaacaagaggctgctatgagaagagagaaagctttggcttatgcattttctcttcaggtaccagacacttttactttagaacttaatagaatatttttattaaacctttggtgccatctttgattcctatatgtaattcttaagtagcaattatgtaattcttaagaaatgcaaacttcttcttttaatgaattttattgtataaaagttgaaagagtgctttagtatataaactagtataagctcacattgtcttgttttacttctagtattaattaaatgttcttgctttctcaccttatgactgtgtttttaactaagaaacaatttatatctctgtttattatatcttgccacatttccttatattataaaattataatataacttatgtctgtattgcactttttatagaaaacatcaaagaagtcatcaaaatcaacaaatcatacattcattgaacccaataacttccattggggttggagttggttagaacggtggatggcaactcgtccatgggagagaacaaacacaatagataattatcatgaacttgtttccatcaaaagctcaaccactactaccaaagcatatcatcaacccaatctttgccatgataccacatcagcaccattgtctaaggcatcaacaatgtcatcattaactagaaaaactcccaaacgaaatgaaatgttcaacacccaattagagaggcatcgaaggcatagcattgcagggtctttggtgatagacaatgaagtttttgtggattcccttactgctccaagttacatggcacctacacagtcagcaaaggcaaaatctcggatgtcaaatactatgggctttgagaaaattggcacattggataagggatcagtgtcatctgccaaaaggagtttgtctttttctggctttccaactttaacaaggaggcactctagtccacccaagatggattccacaactattaagcatagggaggagaacatgatgagtacacgaggtagaagatagttgtggacaaagaaaaaataccatcaacatagttcaagaaaattgtattgatttatttatatatataatttttcttaagaaaaaaagagtaattatgtgtgtgatgatgagggaggggaaatgtttttatcatgttgtgtatcatccatgtcaatatagatatctttgcttgatcttattattattattattattatttagattttttatcttattcttgttctttgacacaactaatattatttattaggagaattatct

SEQ ID NO: 19263 - DNA, 4308 bp, Cannabis sativa
tagtcaataagttgctcatccatccgtagagcatgcaaaactaatcccctctcaatctctcactcaaacctaaaacagtcattttgacggttccttcagtgtggtgttgcatctgtgacggtagaagcatttgtgtaactccaaaatagaaatgcttatatagcttaaagtattacctaattttgtatttcaaacaaatatatatatttttagatttttcaatctaaaataatccaaccacaaattttctcgcatctcacatatattaatttaataatatttaataacaactataaaaaattattaaatgattaataaaatgtcatttattaaacaccaatagtgcctaattaggttaagtttctctttagacataaaactctttttttataccactatgagacataaactctctcttttctagtttaaatacacaataaaagtaggacctaagaatgtttgaagaatgttgcaacaggttcaaacaaaatcccaaaaaataataaaaagcaatgttttgtacaatgaatgattcatttcattccattaacaccaaacaaactcacattcattcatttcgtataagatttgattctgttgagatatataaaaccaatgagatattcccaaaccagatttagataagactttactttttctccaacaaacacattctataatcgaactaacattaaaaaaaaaaacaaaaacaaaaggattcttactcttaggactttgtaccatattttctccattagataaggacgacatggtactatactgatgagttgagaatcatggtcagatcaggtgtggttagactcacctgtcatcaaaagcagattccaattgcatcttcctttatcccatctctttctgacacatgacacatggaaccaccacaccaagttcaacaacagagtccataactattggagaccccacaacccaactttaatgagaaccaggtttttagttttgctaacaagacaaatattgcagtgacctatagtggaatgtacatatattattactagtcctaattttatagaccatgctctcatctttgaactagaatcagatactccaaacaagtctacatcacaagaattaagtgatttttattattataataaagaccaattaacaaaatggtaaagaaagaaggggttttttgttttcctagaaaaaggcatcttacatacaagagctcaagctcacatgtacagtgaaaagataataaagaggggaaaaaagacacagaaaatttcctatgtgtgaagattggaagaaggtgaaagcagctgttatctttcagtaattcaaaaattgataacgtaggcaccctcatattccaattgcaaaaaaaggtattcactgctttattctaaataactagtcagacagagagtcatccacctcctcagtcagattctggtctattatcatcgcttttctcttcgggggaagatgaaccctttctcgagctatgaagtgaatgagctttcgggtcatacttctgagaagcgaggtaattaagagctgtgacaacatctgatataacaggacgcatgttaggctgttcttgaacacacattgcagcaatggccagagcttggtacaatcctctaacggggtattgaccttgtagcaatggatcaatcatttgcgagaatttctttcggtccctaaacaatggtcgagcctgcaaataaacagattccataaaacaataaaaatggtttagatatggcgcgcacaagacgtgctagtaacaaaagatcagcacgagagcagtggttatgattatcttacccatgcaacaaggttttgttccttaggaccttttgtatgatcaatggctttcctgcctgtgatgagctccaaaagcacaaccccgaagctataaatatcggatttaaatgtaagttgacctgtcatggcataatcaggtgcacagtatccatatgttcccataaccctcgttgaaacatgtgtcttatcaccgctcggccctacttttgccaaaccaaagtcagatagcttcgcatgaaacccttccccaagcaaaatgttcgagcacttgaggtcgcgatatataacagggggattcattttatcgtgcaaatactccaatcctcttgctgcaccagctgctatcttcattcttgtattccaatcaagtacattcataccagggcgaagatctgaaaaataaagtccccaattaggcatcatcacattaccatacatgtcaaaggagactaagagaaagagttatataccgtgtaaatggttttccaaagatcctaaaggcatgtattcgtagaccaatagcctctgatcaccctcagcacaaaacccaatcaacttgacaagattaggatggtcagcaagacttagtgtcaatacttcaacaacaaattccctaatcccttgtagtccatttcggtcaagttgcttgatggccacaacctacaccgaaagaaatataacacatctaagcacattgaatgtagcatatgaaataattttgtgtgtaaaatcaaaagcaattcacaagattcttcccaagtatataccgcaacttgttaaatggggataaccgagcaacatggtttaatcctacaaagcatctaaattagaaaaacaagaccaaactgacgaacctgattgattttctccaagtgacccttgtaaactttgccgaaacctccctctcccagaaagcaatccaatctgaaatttccggttgcagctgcaagttcttcaaaactaaacgtctgcgcccttctgccattggtttctccatccttagaaacctcttcctttaagtttaaattctttacatctaatgataattggtcaaccttagagacaacctcctttacatccaaatctcttttcacgtttgaattgactttctgagcacctgatcacataaaaaacacaatcaaattcagtaatgagagaaaacaagagattacagctaaaagaaaaaacactacaagaaaaaaggcatatatggtaagagaaaaaaatgacattagcaaaaccatactcattaaaatttgaaaacccaaaaaaaaaaagtacataataatgatatggggaaggaaaaaaaaaatcaataccaagaaggaacagggattatggactggaccttggcaaccatgcaaacaaacaaaaaagcattagtaactaactaataaaacatattaacaaagtaataacaacagtaaattagtacttgattcctttagcacgaatgcctaaaattaataataataataaaaaaatatcgacatgggagacaaaattgagaaggtacattctttctaaagccaaaatggaaaacctagctttctccgcaagaataacatgatttctaaagcaaacccaacaaggtttagctgtaataacaacaaataattgcttgaacaggcaacgaagttgatagggtaaaacccagaaaataacaaaatagaaaaattgcagaaaagtccaaatttgaggaacggaacaaatcagcaaacggaagataaaattaagggtttcaatatgaatcgataacaaaacgaaagggtatttcacagagtaccaccgacgaagaacaagggttagatgattattttgtaaaaataaaaattatattttgatgaattcccacaaacacataaatcaagagtgaagaaagaatgcataaatgaataatctttttttttttttttcaagatcgttttttttttttcttaaaaatgaaatttttaaattaagaacgaaaagaaaagagggttaaccaaagtattaaagaaaaataaaagaaattaccttgaggatcatctgacttttttctattattgtctttaggggagttttctgatcttgaattactggactttccagagcaacggaagcaacccataacggcgtcgtttcctttccacgttctctccccctctttcctcttatacttaaatttttctgagaatatgcagtcaaaacaaaaccaaaacaccaacccaagaacaacacatgaaaaaaaacagaaaaacagaggtaatgcgagacttggaaactcgttacacagagctacagacaagaaaatagaagagaagagagagaaaggaagagaaagagagagttcttctacagaactaacacagttttttttaatttttttcttcccttaaatactcagtttcctttgatttatatttttcatggtcctgttatcttctgcaaatcgacatacaaaacaaacgcacactcttcccaattaaaacttgccacgtggtatgtcgaagg

SEQ ID NO: 19264 - DNA, 3129 bp, Cannabis sativa
ctctctctctctctctctcccgttagattaatataactatacatacacacacacacacatatatttatattgcatctctttttttccaactacttcaacattggtcttttgcacttcatattcatcctcagggaaattctggggggcctcttgtcaatgttgatggagaagttgttggtatgaatattatgaaagtccttgatgctgatggattaagttttgctgtaccaattgattcagtcaacaaaatcattgagcatttcaaaaaaagtgggtaggtgtactttaaaacagaacaacagtgccagtatgcttgagaacttcactttttcctttgtggttgtgatgttattggtaagacatttttttcgggtgttacaggagagttgttcgaccttggcttggtttgaaaatgcttgaacttaatgacatggttgttgctcagcttaaagaaagagatgcagcttttccggatgtcaataaaggtgttcttgtagtaatggtaagttctaatgtggctcatcctgtaggttgaaaatatctgcattgttgttgttttgactgtgagtaatgctagtgctttttatgtacttgtacatttctgaaatatgttttggcaaggtaggttttgataagcatgtagtatttgacttgtgctgtttttgctctacaagtttttcccttctagattttggtttcgtctttatattaaactacatattgattgaactataaatctagatacggtattagcaaagaaattaagcgaagtcacagagaaagtggaatgaaaatgaaagagaaagatagtgataatagctaaataattttcagtatttaataggtcaaactcaggtccaagggttgaaggacccaaatgccttcacaatttcgcgggattgtcacttatttgtacttgtaatgatctagctggaatttaatatcctaaatgaactagttccaattaactatatcaattcataggaatccatcacatttcacacctctagttttccatttcgtttacatttacctaaactcaattttattttttgagatggcaattgatattatctgtattcttgtctatttgctgatatgatgttcccttcccaatgacgagtgcaccaatcacatacaattttcaaagaatttgatggtgctttcatgttttaataatttcttaattttctcaagtagataactcctggatcacctgctgatcgtgctgggttccatcctggtgatattgtagttgagtttgatgggaaatctgttgaaagcgttaaacaggtatttttttggaccctctacttttattacttctgttgttatggtgaagggaaaattttagcgagcaatataagctcaccaaggcaacaaatgactagaatagaatttagatgcagagtttgctatcagcctaaaattaactgaaaagtcatcaagatcttaaatatgccgattgccaaagatagtgatacaattctgttccaccagcaagatagcaaaacagagagaaaagagaagaagaagaattttattgatgtccggagaaattacagaagatagttccaagctcgtcgagtggcaagggtgactccttgagtatattctactcctttacaatttaatcatgaaaaaataagaaataaaaagaaaattctatttatactaaactgagactaaggctaataaacttagactgccatatcagcaggaaagtcatcactattgactgccacgtcagcaacaaatttctttataattaaatagcttatttcttatttcttatagtgtaggtcttaattggtggtataacaatacccctgggtgcactttcaccttgtcctcaaggtgaaatgtgggaatttagtatcaatatcagcaaaatcttcccaagttttttcaaagtccgaaagtgatttccatttaataagaacttctaagccatcttgtttgcgactggtaagttgcctaacttgcagtagctcctcaacttccacttgcagctctagttcaggagacaataggggaagggaagaagaagacgaagccatcttgtttgtgactggtacgttgcctgacttgcagtagctcctcagcttccacttgcagctctagttcaggagacaagaggggaagggaagaagaagacgaagctgctttatgggacctttttaattgggaaacatggaacaccgggtgaatggatgaagtagctggtaagtctaacttgtatgcaactgccccaatgcgagccagcaccttgagtggttcataataacaggttgcaagcttctcaaatctcctcttagccaaggactgctgtctatgtggtcggagcttgagacataccaagtcaccctcatgaaattcctcgtgatgtcggtgttggtcagcttgatgcttcattcgttgctgagctcatagtaaatgcatgcaaagatcatctaaaatggcagcccaatcaaccaatacaatgtctacaacaaagacatgagaggtgcgagtcagataccggattaagggtggctgatccttgccataaagggccaaaaattgcgtacacttggtagcggagtgggcagaagtgttgtaccaatatcttgcgcatgctaaccgtttggcccattgttttggtttctcatttgcaaaaaatctgagataagtttcaagtgttcgattgactactttagtttgcctattagtttgggggtggtacaccgtaattctcttcaacgttgtgccttgccatttgtggaggccattcaaaaaatgacttgtaaaaattcggtcttgatctgaaatgatacccaggtagtccatgcaatcgtaccacttcctttaagaatacttgtgctacagtggctgctataaatgggtgtctcaatgtgataaaatgggcatacttagtttgtccaccacaactaagattgtattccatccgtctgagttaggcaatccttcaataaagtccattgagatctcatcacaaacttgagcaggtaaagcaatcggttggagcaaacccaccggagtagtagctgcatatttcacttgttggcatatggaacattcgcgaagaaacctcatcacatcactcatcccaacgcaatagacttccac

SEQ ID NO: 19265 - DNA, 4926 bp, Cannabis sativa
  modified_base (2816)..(2816): a, c, t, g, unknown or other
atgaaattaaaattagtcactattaattcaagatcaagaggtatggatgaccactaatattttatttcaaaagtcttgtctattgacatgttttgaaagttctgtggtctcttattttttgtgagtttggttgttctttgctatggcttcgagtagccatgaagatgaggtacggatggatcagtatgcacatttacagttggaagaagaggatgaggggggtctaattgccgaagatcaaaagggagaggcccaagcttttgatgataggtggtgtttggttggtaagtttctcactaatagaactattgattttgatgcaatgagacacatgttggcttccctttggcaacctggtaaaggcatttatgtcaaagaactggacacgaatagatatctttttcagttttaccatgaaattgatattcaaactgtgattgatggaagtccttggactttcaatcggatgcaattggtgtttcatcgtttaaagagaggagaagatccaagattggttcagttacatgaattggatatgtgggttcagcttcatgatctgaaatatggctttatgtcggattgggtggttagacatgccggtaattatattggtaagtttgtcaaatctgatccaaaaaactttattggaatttggcgagattatcttcgtgtgcgggtcacatttgacataaacaaacctttaaagagacgcatgaagttgattaaacaagatggctcttggctttggaccacatttaaatatgaacatgttcctacgttctgttttatatgcggtttcattggccattcggataggttctgtccaaggagatttgatcctcagtttgatccaaatgtcaaaccttatggtgagtggatgaaagctcctacaaggaagaagaattacctcatcggggctcaatggttacgttcagggcgtgaggaagaagaaggcggtgctgctggcagtggacagcctcgaagtatggcagagatgcgagaatcaatcaatcctactctagtgcgatttgatggagataatcctggaggtaatgggggagcaattcgggtagctaatcaaggaggatataaaggaaagaatattatggctagtaatgagaatcatggcaataaagatcaccaggtggatatttttattgacgatcctgtgcttattttgaataataaaagaaggcgtactgttaagaaaattttaaaggagtctcatgaagtggaagatgatactatgggcagtatggaggatttgaatgatagcctaaaaaacgattcacaggtgggccttggtgcacaggcccaccagtcattatcagtatattggcttggaattgccatgggcttgggaacccatgggctaatcaattcttaaaggatttagttatccaaaagcagcccaaagttgtttttctttgtgaaactttgtcaaagtctgaaggtttggagagcacacgtgtgtctttgggttttgagggggtgttttcagtcgatgctagaggaaaaagtggggttgttgctatgttgtggcgtgatagtagtgatgtcaagttactgggttatggggggaattatattgatgttgaaatcattgagaatgatgggaaaaaatggcgcctcactggtctttatggagagccaaactgaagccttcggagaaacacttggggatcaaattcggtctctaaaagacaactattctttgccttggtgtgttattggggatctcaacaatgttacttctcaatcggataagaggggtggtcttccatatcctaattggctcattgaaggatttgggaatatgttggaggagtgtaatttattcgacatggagttaggtggatatccttacacttgggagaagggacgtggtactagtgcttggattgaggttcggattgatagggctttagtctctcaaacttggcttgatgctttcctacttgctaaattgattaatcttgaagtatcaacctcggaccactgcccgattcagctgacacttgatgttgttaagaaaaaagagttacacaagaggtttcggtttgagaatttatggctcagggagccggtgtgtttgcaaattattcgtgatacctgggaggcttctgcaggcagtcctgtaatggagaagatacgtagctgtggtgcaaacttactggtgtgggggaaagactattcaggcaactttaaagctcgtattcgggactgtaaaaacgagattaaaaggtggaagcatggtagggaggttgcttcggttcagaattataaaaatgcagaaaattggctgcaagaggtgttgattcagaaggagatattttggcgccagcgatcgaaacaattatggcttaaggagggagatcaaaattctaagtattttcatgctatggccacttcaagaaggagaaataactctattcacaagctgaaaaatgaccatggtgtgtggattgatcgggagaacaacttggaaggccttatggttgatcatttcagcaagttattttcttcttcttcgttggaaccacgggaggttactgatgctatacaaagtgttgtcacggctgagcagaattctttgttgttggaaccaattacggatgatgaagttcgcagagcacttttccaaatgcatcctgacaaatcacctggatcagacagtatgactccgggttttattcaaaaatgctggaatgtggtggctgatgatgttatctcgcaagtctgaatgttttttgattcaggttacttttctcctttgcttaatgaaactaatattgttcttattccaaagaagaaanacctgaaactatgatggatcttcgacctatctcgctttgtaatgttgtgcacaaagtcatatctaaggttcttgccaacagactgaagcttgttttaccttatgttatttttgaaactcagagtgcttttatatagggaagattaatttatgataatatcatgatttcctttgagataatgcattatcttaaaagaaagagaatgggcaaaacaggtaatatggctctgaaattggatatgagtaaagcgtatgatagggtggaatgggcttttcttaaactgatgatgcttaagatggggttctctagtcaaattgttgcgttgattatgtactgtgtgtcttcagttacttacaagatcactcatggtggtaaagtttttggttctatcgttccaagtagaggtattaggcagggaggtccattatcccctacctatttttgatttgtgctgaggggttctcttatctggttaatttgtttgtgtgtaaacattggttaacagggtatcgtgttgctagaaatgctcctattatttctcatatgttgtttgcagatgatagttatattttctgcaaagcaaatgagacggaggttgctagtgtacttcggcttcttgctatctatgagagagcttcgggacaaaagatcaactttactaaatcatcagtcttcttcagtaataatgtgtcttatgaggttcagactcacctatgtcatctactaggcatggctcctgcttctgacaacagcacatacttgggtttgccttgtactatgggaagaagtaaaaatgctatcttgggttttcttaaggataagatgatcaagaagattcaaagttgggaaactagatttctttctaaggctgggaaagaggttttgttgaagtctgttgctcaatcgctcccaagttatgctatgagtgtttttcttctcactaaagaaatatgctctagccttgaggggttaatggctaatttttggtggaaatcgcaaggtaagggttcgtctaagggagtcagttggctgagctgacgtaagctttgttttcataaagatgttggtggacttggttttcggaatctaagggactataacttggcctttctagggaaacaggggtggcgtttgcttactaatgaaaattcattagtagcaaaagtttataaagcaagatattttcctaaaggccatttcttatctgctgagttaggacccaacccaagtttcatttggcaaagcatattggaggctaaaaatcttgttcagttgggtgctataaggtctatctgtgatgggaaatcaacttcgattttagaagacccttggcttccaaatatggacaacaagttcgtaacaacttaccactcaagtcttatgggtcaatcggttgataccttgctccaaatgaactcaagagaatgggatgctaacttgattcgggatatgttcaatcaacatgatcgtgatttaattctttccattcagctgagtagttctagtagtgttgattgctggtattggtctaaagagacaagcgggatatattcagttcgaagtgcttataaacttctgcaatttgttaatggggattggccgagtactggaggactgaatcattggaagcaaatctgaaatttgaatgtccctgctaaggttcaacacctgctttggagggtcattgcaggctgtctcccaactaagttacagctctttatcaagcatgttccagttgatcatacttgtcctatgtgcaatcttgaacctgagaccgtgtcacatgtactgttcaggtgcaattttgcacgttcttgctggaacttggcgtctgctgacactgctagtgcggataatatggagttcagcagctggttttgtaacttgctgctgcattgtaggaaggcagttgttgaggaagcggctatggttatttggcgaatttggatggctcgaaatgatctcttgtggaataacaaatcgactactgcttcggagttgattcgatcggcaaaaattaatcttgacaattggcaaaatgctcaattaaatggttccatacctttactaaatgttaattttagtaatggtagagagcattggacaaaac

SEQ ID NO: 19266 - DNA, 4036 bp, Cannabis sativa
tataaaatatatttctaaaatatgcattccataattattaatacataaaccttaaataattaataatacaaagtactattcataggcggtctttacacggaacaacactcaaattgtaaaaatttaaaaaaaaaaaccaaaataagtttaaaccaacctagtttaattttttgttttataattacatatgttgcgttatttaggattacttgaaaattttttaaaaaaatctaaatagatttaaacaattacttactaagtataagaaaaaaaaatagtcgcgcagacacaacaaaatatgtaaattttgttttcggcattgtaaattacacgaaattttcaataaatttcagatgatcttaaataattatatcatacacgataatgaaaaaaattggactaaattttttttaagtgtcgaaacagataaagaatctacctaaccaacattttaagtggtgtatttatactatgtataatgtgtctttatattttgggtggttttgatgtaacttttcagctgctaaataatcttttattactgtacaataatacaccacataataaataaataaatattatttttatttatgtgaagagaaaatattgagaacatatggaaaaataatagagaaaaataactctttgggatcacttatttaaccctagctacatttactactcacaactgtcccataacgctcattttaggctataaaagcgttcaaaagccaaccaagcccttcaggtcaaacaaactagttaagaacaagttaaagacagagaaaaaaaaacaagtatagtgaagagagacatggcctcaaagtggtgcattgcgttgtttattgccctagctgtggctcatcaagtcacagctagaaatgtccctgcagcatcaaaagatgctgcagttggactcgacgaccagaaaaacttcatgacctatggtggcatgggagggtactctggagttggaaacaacggtcttccatttggaggagtcggtggtgcatttggtggaggcggtggtggcataaatgctggcattggtggcggtgttggacttggtggaggtggtggacttggtggcttcggtggactaggtggcggtggtggtgccggtcttggtggtggtgctggcaccggtattctcccgggtggagttgttcctttcccatgaagttaagaaaaaaaaaattgcatgaaaaaaaaattgagtgtactcatgtttttctttgttattgttggatcgatttactatagctaggtagctagttaagtagatctagtaatataaaatgtaagtgttatgagagaagggtttggatttgtagtaatgtgagaattttttctcttcttttggctaatgtttattatgtaagtgttgttttatatatttgtctagtactattattatatatgttttgtttatgttttttcctttaaaaaaaatattggagaaaataaaacaacatatgtataatcaaaaatctttcttctcttgcttgtacgtacttattgatttttctttttttatataaagaggttttataatttattacaagacttttaaaaaggagtaatattaatattcagtattcacacacttgaggattttcctataaattatctgagaaaatgtaaattaatgaaaaaaaaaaaaaaggtttaaaaagcaaaaagtttctatcatatggatttgaccacgtgtagtatgatgatttatttccaacattaattctaaagctatatatatatatatatatcaccaaccaaccaggcaattaccaaccttgttttaaataactaattagttattataataagctcatgatatttgtgttcttttaaaaaaccaaatacactctattaataaccaacactaaattttggaaccattattgcaaattagcatgatcataaaaacaaattaatatatataatgagtaattgcaaatgccctttcaaattatacactttttatacatagagttgttagaattaatttagaatgaaagtgattaaggttaattattgtagttccatctcaaaattaattggtgataaaaaaaaaataatgtattccttttatataccatattttattttcatatattagcaatgtgagactataactctaattatgagtcacattggatgtttgagattaaaattatataacaagaatttagttagtacatcatattaaattgtatatattatattaaaatttattatttattatatttttatataatactaagtcaaatttttatttatataaaaatattatatatttatatgcacaaacatttcaatatcaaacatatataataatactatataaaatatgatatataatataattttatttaatattattatacaatataatatgatgttaattatagttatctcggtaggatttctctaaatattttatattgtctgctaggtttctctttctacgaataaaatagctaattagcatgatttcttaaaaaaaaaaaaaagaaataccagaatatacgtttggtattactattaatttaattagaatttaaaacaatattgacaaataatgtaaaatttaatattaaatacatcaaataatattattgattatatcatttggtgcttggtgccaaacaacattaatactcagaattaaaatgtggtgtacgtagtaaggattctcttctttcttataataatattttttttcttttatcttttttcccaagattaatattaattaacactgtattctgtagacttctcattactacagtactgagtacagtacctatatatatatattaagagtgttaaattcaaatataaaaattaagacaacaatatcctatttattacttgtctttaatttttttttttatagatgaaagaatggtgatcgatgagtagaaaaggtaataagaaaatggctaggtagggtttaaataggtgtggtgaattaatgcatatttaatggagttagcttaaatattattattattatgtagtaaaaagactagttgagttgtctacttaatttatttttgtcaggatttttagacagtgaggtagatgactcattcaatgcatttttattcagttggtgagactagtaataataactctctctgcatgtatgtaaatatcctcaacaacaggtaaaaaggcaacaaccagcttcttgtgatttcatcactaccactaattaataattcaactatatataaattatttaatatatatatgctatatccaactcatcatataaataaatatatatttctatgtgtatatatttaggaaaaacttatggtggcaatgacacaacgtcttttaacttattaaaaccgaaaagatctacattgcttagtcggtaaaaccaatgtgtcactacaacaaatatatgtattaggggttacaaaagtcgcccctaaaactataaaaagttgcctttaaaaagtcgtcagctcctaataattcgcgcctaaaaatatttgtagaggcaacaaaaaagttgtctttcactactacaaaaataggttttagtcactcacgttgagtgactctaaaacatttcagtgacacttcactgcgtgtcactgttgtcggtgactggaaaaatagtatttagtgactcttaggacacgtcactacaatcttttagactcttttatggagtatcactatagccatttagaatcccactttatctgaatataaggataacaaccacccatatggagtgtcactatatttatttttttttttaattattttcttaatataattattgataatatctgacatttacttggggccataaaactcctaaatgtcgcccttaaaaaagtgtgtcataaattaaattttaactttttatggacaactttattgcccctataagttttccctaatactttttatattaagaaaataattttttatattattataaatatttaaatatattttatatatgtcaatcaaaatagtataaatatttatatgaaaaaataatata

SEQ ID NO: 19267 - DNA, 4551 bp, Cannabis sativa
tccttgataaaattctcacccgaatttgggggcagttgattagctgcccgctgtggaagcgcaggtttaaccatttttggagggaaattgatatccaaaagctgaactggagaagactgttttttccgaagaggaacagaatttaacttcggggtttcataaatttctggagtaggaattccctgtacatgcatagtatgagaatctgttatgatttcatcttcaacattgttggctgcaggagaacagctcggtccagcctgatccctggcttttgagacggtgttagatgaagatggcgtgccttcgtgatctgcatctgttgacttgaaaaccggcctcaaagtgaaggaagcacaggaatgttcactcttctggcccgaagacatcagtcttatgattggtaatttcggtttgttaagatcatcaaggctaccttcccaatgctgattcaaccaatcacaaatgatgggaatggggataccaaattgcataggaagatcctttttccacgatgaagaagacgacgaagatgtggatgaggatttattggttggagatgttgctattttcatgggatcacagatcatgaaagcaagattgccttgtacatcaaaaccagctgaacccgggctccacattatcccatcagtagacaattttatgagattatcagtggctatcaccaccttcccttcaccaactgttaactcctctttgtctgtatgtcctaaaaggtatactgcatttccaagatccagacttggtttaaaacaagtcttcaagaagtgaagatgttgcccttgagcatttgaatctccatccatggtatctaaaccaactattgtaagatctaaaacagagctggtaatgaaaaacctacaacaagaacaaattgtgctagtaaatatcaaattatgatcaactaaaggggccaataccaaataccattccacaagttaagcgacaaacaattaatcctcaatcacaaccaaccaggaatggagattaaatttgggtaggtggttcacctcacttgtttcattcaaatcaacaaatcatgattagccccactatgattagcatcagtacttcaattccattccaagtaatcattctcacattagatctttaagcaattcaaattttcccaaacacaaaaataacagcaagcatcaaacactgaactaaactttccattaatagaggtgaaaattgtacttgaatgaacaaactaaaagtatcaaaaacactctttgaaaaccatcatttgggacccacgaaagggaacaagattgtccctttaacgaacccaatgcaacttagctagcctactcatattaaattgcttctattcctaaaagaaaacccatatctaagaacaacaaaacaaaacccagaaaccattttaaacaaaagaaatataaaaccccatttacctgtgaggaacaagactcgaagctacaccattctgtagccagatctcagcgttttcagcagcactaactgaaggaatattgacatgggtagtcaaaagaaggttcctatgaatcaaaaaaccagtaccggagatctcatttccggtacctgagattctagccatggccggagctttactagtaaaaatggcacctttcattctctcggacttactcactcccttacaaaaacaccacgattctctcagacccaccattattttaaactaaagcttgaaactttaagtaaagattcggcaggttcaagtaatttggttatgagaaatggcattatagtttggttatctgaaatgggtttccatggctcttttatttttgttgtggagtagaagaaaatgacagaagggaatagagagtgttagtagaagaaccgtcgaggtggtcgtgaaatgagtaaagaaggtttttgggtttcaaatgagctggaattttggcctacaaggaaaatttgtacaactccaagaaaaaaataataattaaagagtattttttattttgaaaaattaagagtaaaagaaaaattgagaatgaaagaaagaaaaaggataaagctttgcttgagagaagtggcaaatttgggagacagaatctcttcatttactgtcggtaaacattcatactatttatggataattatacagatacaataacttattatttcagattttttgtttcattttagttaaaagattttgaaaaattctatggtgcacctatacattaatagagttacatatagttttttgcaccgataaataacctttggctagaataaataaaaatataaaaatggaataaaattaaatctaaaatgtataaaaaaataatatatttttttttaatttggcactggaatgatttttacagtcattcactaacatgattggaaagtcatttaattaaaatgacattcttatttaaacaaaaaaatagaatgaaaataaatttatttccattctataaggccacctaatggttgcaaatttccaaaaaattcttaaaattttaacatgtggaaaataatattcgataatatattggatgtgttattacatgtatataataatctgtttacattctataatgtaaattattctgattttttcaaaataaaaattaaaattataactattcaatattaaaattatagtgggagtagtgatagaactacttattgagataaggtgttgtagtcctcttaattttttaattatatcattttctaatttacctctcaaaagtattttttaacattttgccacccctccaaattgagtgagagtaaatcggtacacccattttgcgatttgcatcttagagacacaaagatttttgtcattggtaagaagacaatgtaaactttaataattgtttaatcctattactatctatctctatgttttgagccgtgggtagattggaaaaaaggcaactttgtataaaaatatggttttgaagaccaaatatgttttcttccaattataaaattgacattaacaaagattgatgcttttaatatgcaggaaaatgggcatcactcattttattagggacatataattccaaacatgtttgactattgaagaaacaagtaaccagctttgaagtgggaaacaagcacaatgcatgtgattccaatcaatcaataattgaaatatttcgtgtgagccatgtgtacaacgggccctaagagaagctatattcataattgacaaaatatcataagttcataaccctcaaaaactaatcacttaacattgataatcatgatatatttcgatacaaaacaaattacttagtttgacttggccacttgtggtctctaatctttgttctcaatagtataatcgattaatctaaacaatcacagcaaatcttctttgctacccaacagaaagctatctttgacttgaccatatatgcatagatacaaatcaatttagaataacaaagatggcatgtgcctaataatttgaattagattttaccataaaaccaaattcaatgacattgtatatgttggaatgggattttgattttatctaccttgtcctgaagagggttcattaacaaattattcatacatggaaatcatactccaaacttgcagcatccaaaccatggaataatgaaaaatccaagatatatactttgatcatttaactaagaaagagttaacagcaatgatgataataatcccatcaaaccaatccaaagttcatgtagaaacttttaagacaaatttctaagacaacttagtattgttaaacccatataggcatattcaaggagcaattcatcatcaaaacaacgaatatgattactgtttgtcttcctaacttacatcaccatttcatttaacacctagaacacagaagcatattcaaaacaaccaacttcaagccccttgtaacgcctttaactttcatcaactgccttcgcttttgtccatagctggaatagagtataatagtagagtgagatcatcattgactcagagggaaaaacataataaaacatttcaaaattgtcacgtacagaatagagagaaagaacttactattgtagttaagaagcttctcgatgagatcaacatgagtcatgagcattcgtctgcaacagtaacgaaccaagcctaatgcatcaagagcatctctgcacaccaatgataaaaagtcaccaatggaacttctccaagtcttttaagaggcaatgttagataataggcagggcaaaactaggaataaattaacaagtccaacttcactgcacttgaaaaatgcaatatatgaaccttgaacatgtaactccacaaccgtaagctaggaaaccttaaaactttataaaatctttaacaactaacaagcccccaaaatccacaccttatcacacttcaggacactatgcattggaataagcttccataagtaaaattggtgattgataatgacatggttagattgaaagtaaccatagcaattaaagacctaaacaacggaccttataacaaactctgcacatgaaaacccatacagcaataagagaagattaa

SEQ ID NO: 19268 - DNA, 4187 bp, Cannabis sativa
  modified_base (3804)..(3806): a, c, t, g, unknown or other
agagagagagagagacttagttttaagtctatctttacccttctcaaataccctaacattgactacaacatataaccctttaaactctcctacccaattctaagatattttacatcaatccatcaaaggcttaattcaacttaaatgaaaattttcaaaaatttcattacttaactacttggtaatcaataaccctaggataaaattgtcataatccaataccctaatattctaaaatactaatccatactaatgtgatattttggacaatccgtcgagtttctactgttgtcatgcattaaacatggaatcattaaatttcatatgtaacatatataatatacctaaaattcaataaaatctctgtaatcgagaaattattttcctaaggcgtatttctaacaataagccctaattatttactaaaaatcataaactcataaaataatattttaatccatacacatctaataattctcaaaattaagttatccagtcattacaggaagtttattgattacatgagttgttgtcttcatacttttggcccaaaatcttcctacaacattctttgcatgtagcatgctttgacatgtctctgcaaggtggcaattcttcctttcagctactccactatattgtggcgtatttgtacatatgaattaatggtgtatgcagcattctcgaagatacccaaaatatttaacgaggtatatttgccattgttgtctgttcaaaggcattggattttcttctcgacttctcattcacctatttttttgaactctttaaattttgaaaagtttcatacttttttttcataaagaaaacttacacgtaccttgagaagtcattgatgaatgtagccatttactgcatgacgttgattgatggttgcttgactcgtccaaacacatatgaatggactacttctaatggtgctttggcgttgaactttgaatcttcataagcaaattaatgcaccttatcgtattgacagtcggcacatatgatctctgttctgccctcaagttgaggaagacctttcagcatagacttcttcatcatcaccttgagtttgtggtagctgacatgtcctagcctagcatgccacaaatctgttattttgttctttcaagtcttgtctacataagttgattttgctaacattacataaaaaaactttaaacattgtcctttcatcatcaatgttctagaaatttgaagatcttagtagatcttaacatcttgaggaccgaatatgatatggtggcctaatgctgtaagtggagctactgacattaaatttttcttcttctcaaaaacgtgaaaaacatcctagagttaaacgtctttcagactgaatctcaatgtgaatattgctttaccgatatgagcaattagtaatccgaagttgttggatgtcaccactacgtaaccacctttatactcaaccttgtcttttagcttctctttgtctcttgtcatatgatttgagtagccaaagtcgaatatccaatcatgattgtagtcgatcgtgcaggaatagtagttgctagatctaattcttctttctccagtgtgaatgatgcatttgcgtcccattcttcattacttggatttccttcatttgatgtggttgcattgatttctccagttttctcattgaaccagcaaattttaaccaagtgtccatacttttcactattatagcattttttatcaaatttgttgttattctttgactagctatgctagttgtttatcttttgagctctcctatttgggagcttccataatgactatcattgccattatttttcttaaaaatattctaatatttggtcgagatcaacctttcttatcaccattaaagagtgcttcttcgtcactctttaatgagactctagatgtttgcttagctaacgcttcttggtcagcaagcaagttttctaattcaataagagaaggttggcttggccaaccttgtattgtagtactaacattctaaattctggcattaatccatgaataataattattctaattctagcatctgacatgctagcacaagaatcaaatgcaaagattttgagacaaagagagatattaccttggtgaagtattggttgatcatcatgtcgcgctgcgtgattgagagaagctcattttctagaagttgcaatctcgtgtcatttttcttggtgaatagtgatgcaaaagtgtcccgtgcttccttttgtgtctttgtgggtctgatgtgctccaacatttcgtcttcaactgtggtctgaatcgcaaacatgaccttgtcagctttaatcttccatttcttcaaagttgttgtgtcctccagttgtgtcacttcattgccaccaataatttctcacaagtcttggccttggagatatgcttccatgtgcatcgaccacatgctataattttggttgttaagtttcttaatgcccctgaccacttgaaggtcacctatcatgcaagctctctagtactaaaccacacacaatcactctaagaaactcaacaaaagactcttttagaatgaatccaattcggctctgataccacttgtaggataatacaatacatgaaaacgtaattactttattattgtaacagtaattacaccaagacttgaatacttttaactaaaacataatacatcaagcccatatttttattttaccactagacacatttattatacacttatatataactcacttttttgaaacactatatttatgttggtatactttataacacactcttactcttttgaacacactttgaaacactcttgtttgatgcacaacttgaggatccaaggtacgtatttatactactcaaaagaattcagctataatagtcaagacaattctagctaattgtgttactaaaatattcttgaagctttcacaaaattcatttatttttaattacttttattgtaatgtcttgacctaaaatgatagatttatctagttaatgtctaaaaaaaactctagagaattaatgatgattcttcataactgacttttttttctctagagtttgtgggaaggagacaagggtttaattcttagtcacggcgaggattgagcactgccttgtcaagaaggcatgggacatttccccttcgatacatcacgtcttgatggtggttgagcgagtagaccatatacaaaacacaccataatatatcaaatttgatcctaattctaccaaatttttggtagcataacgactgtaattgaatgctccaaaattttttaaacatgcctatataataacaaataacacagatataacagttgtttattcatctatcccaccacagcatatatattcgcagaacctacttcactatagttgaatatttaagatattcaaactccactaatcattcataattaatttataacaaaagttaccttgggtattccaattaggtatttaggccaaggaaggaacatgtttgctacttctttaaaatatctgcacgcgtcaaatgagattcggatttcagcatcctcttgcagaatttctaaaatcaaaacccgagcatgtgaattattgtagtccttgcaaggaactttgattggaccctcatgttcgtacagatatgctcgggtcacaatgttgttaatattattagagcatagatatactagttgatcacgggctctctgttcatcaaaattgtacaggagaggtggctcattgagggaaacaaactcctcagtataaatgagtgatccaccctcatcctcacgagcgtattgnnntggaacatacgcctgatcagccacctctgcttcttcctcttgttgggcaatgtttttcttctattaagggatttgattttggcttttaatttctcaatctccctctatttctgagccacgtatcagaaacttccctcttcttcctgtcaaacagtttagatgccttggcaaggaacctgcaaatcaataaataaaattatctatgatttattttgtataactaagaaaataatatttcttagttactagcatacccaacaacactgacatgtccaggatgctctggtgtcctaagggccttcgtcaggatgtcattttagccatggacctgaacttgtccctgagtaacttgctcctctaattgagcctaatgcacatatt

SEQ ID NO: 19269 - DNA, 4672 bp, Cannabis sativa
acataattaaaaaaaaaaaaaattgggtgaaggaagaagacgacgatgaattctgtgttctccatcgatgatatctccgattcctattggtctacgtctccggccatgaatcggagcgcttctgagtgggccttagagcgctttctcgaggagttttctactccgaccaccgctactttgaatcatcgaccgcatccgatgaccgctcccacttcttcgccttctttgctttctcaatcgtccagttccaagtttccggaagccgatgatgaggtcgtcgaaattaagaagcctgaaaatcatcgccatcatcttccttcctccgatgcttcgtccacggttactatgctccctggggattccgattcgtaccgtgaatttctgaaaaatcaacttgatttggcttgcgctgctgttgctctcactcgcgtataaaatctttctctcttttttgtttgtgtaattttcggatcatgatgaaatctgtttgacaaaatatatatttttgtattgtgtattattatttttttttcttcatgaatatgctgacaggaatcattggctgtgaagcctggggattctattaatttatctcagagtcacttgccggcgtcggggacttcacaattgggatctggagctcacgatgaaggttcttttctcaaacccttgtttttgctgttttttcttgaacaaaaaatcatgtatttcaattgttaagctgcattgtcagttgatgaatggtttttgagtacttgtttctatatttgaaaaattgatgatggggatagttggaatatggttatttgggtaagtgatttttccatgtcaaagttgatttccaaatactcaaagggaagctcgttcattatactgtggttattttatggagtctacatggactccaggtctagatcatagtgttattattgatgctttttatttatttattcttttcctttttattaaaggagctctagtctaaaatcagatcttttacaatttatttgatcttggttaaaggtagatagtgagttacgaaaaccctgatatattattactcacataggtaggggtcatggtctctcaacggcacgggttgatattgatgatggaccaaacgttattccagcattacctcctatacaaaagaaattaggacctcaaagtaggcaaacaactagtggatcatcaaaggaggactcagatgatgatgatcttgatggagatatggataacctggacaacttggatccttctgatacaaaacgtgctaggaggtaaagataataatgtccgagtattaggccatttttctgtgttttctattcatattttttcccctcacatctattgcatttaagctgttaatgtgatattagcagggagtgagtaattttaatagtatttcttagtcagcaaattatgggtagctatgttcttgcagcagtcgccttgagattcattatatattcagttacacaaattgagaagggatctatgaatctatgccttgaagacaatttatcattggtgtgagaaaaaaaaatcatgtttttcttaatataaaataaattgagagacagtctaccccgtaatgcctgacatggaaacttatgtcattattaaacaattggatttcatgaagggaactaactttcgcaggtttaggtgtttacctgatacatttatttgaaaacaggtttgtctcaaaattgtgatctgctataccagcaaatcaacaaattctctccgtaaaaaggataataaactataagtacgttgaaaaatcataagcctttatcaactttatctattgatggttgctcaggatgctgtctaatcgagagtcagctagacgttcaagaagaagaaaacaagcacaaatgagtgaacttgaaacacaggtgcagcttcacattctgattcaacatttgtcttggtctttgtctttgatcattttccattcccagtaacttaattatgtatgtacattggtggttttaggttggtcaactaagggttgagcactctacacttttaaagcgtctttctgatgtgaaccacaagtatgataatgctgctgttgacaacagaatcttaaaagctgatatcgagacattgagagctaaggttagctaccatcatattcaaatgtccagttttttcaatcataccttttttttttatagcattctatatggtaacaaatataaagacgttgcaatgccccaccttgtgaatcttgtgacaattacaacttagaaacataatagaagaagagatatatcttctttatggaaatagaagtcaaatatctcaagtcaatctacatttcaagaatctacgttattttcaatgggcctgctaaaccctggtggtcgtggtttttggggcttcaattttagagttgaaactttacaaaaatcatttaattgttcatatgcacatgtatctggagaagtgaggtttgatgattagccaatatgctcacctccagtgcagaatcacaattagtttagctgaaggaaggttttcttttgtaccaaagctttcacttgttcgtcttctttaaatgcaagtcctcctgttatctgattttggtatgccctttaaatgaatccttacttgataactggccttgtaatctgaatattttgttcggaatcttttaacatgaaattacttgtctgaaattcttgctctatttataaagtctataggcttttcatgacagaagaaaaaaagaataactgatgatccatatttttgcttcctattttttcaattgttggagaacttctttatggctaaagacgttttaggggtatatacatttcttgaaaacttttcactttccaggtgaagatggcggaagagacagttaagagagtgacaggactcaatccactgcttctagctgcgtccaatggctcgtgcacaggcttaccctccatgaatggtccaatggatgcatctactaacgctgctgttgcaatgcaacggaaccaaaaccagatgtttcaccaagcagtcccaggtatcaacgctcccattccacaccatcagagattagatggaagaggcggaggtggaggctaccatggtaacacctcaatgtctcttgttgggaacccaaggaacgatgttgctccgcagaatgatgtcgggggaaacaaattaggtgagatgccttcgattcagcattcgggtagagttggaaacttgccgaagcatctcagtcaaggaacaaattcatcagcagcagcagcggctgaggcgttgcccagttggggaggtgatgttgccaaaaataacaagcagaaccgtatttagtggttcgtatcccattttagatatggggcctagaaacaaacttactcatttgaataagataatggattcagaattatgctttcctttttttttttctttttaatttctgttgcgtcttttatattattattattattattatcatcattaatattctccatgcaatgtttgactcctcagacccattccttcgatgaaattatactctagggaaatataattagcaagataaatagttagttatgacttatgtgtaaaagatatcctttctgtttgtcattaaatccttttttttttttgttaattttaataacaaagtaaaagatggtagttgtctcatggcataagtgttgtaattccattccactaaaattaaccatgatacatgacatgataaatatgaatgtgtacatcaatactaaaagaaaaaaagagtataaacaataaatgaaatagtcaaaagatgagttagcctatctaaaatctaaaacataaaatacatgatgacatgaccaattactagtccatccagtgcacttgtaaaattcactgctgctgaattttagtaccagcttggagacctgattgaactttgctttgaaaatgagtttccagcctaaaccaaagagagcacttatgaaattagaattgattataaataacaaaaagatgagtaagtaagagcaagatcatcatgttcatgacataccttgttgaacatttgtaataaatagtctcgggagaattgtaggtgcgtgcattgacgaacatcctcttcacatccgcaatgaacatctctagtgtaacgtaatattgctctgactctaccctctttgacaaagtccttagatctgcacagtttacacacactacatctgagaacaccatcactatggaaataataatctttgacataaaagtgttactgtaactgcataaataaaggacaaaggaaaaaggaagcataatttatctttgatctcttaagataaaaaatccaatactttggctgtgtggctcctttggcatctgtgtccataaaatattaggacacaacgcaaactgcgtgcatctgattcatttccattccatttaatactccaaggacaatcaatttgaacataaacattaaaaataattctaattggcaaaggctaaacaaagaaatggcacatcagtatccacaattttatcataaaacctttaaaatgcgagaataataaaatgatacttacccattggatctttgataatgtcataataatcaggaacgtcacgtgcatcgactggctctttgaatggccacgcatcaacatggtcatgcatagactgcttt

SEQ ID NO: 19270 - DNA, 5632 bp, Cannabis sativa
  modified_base (4765)..(4768): a, c, t, g, unknown or other
  modified_base (4866)..(4867): a, c, t, g, unknown or other
aaaaaaaaaaaaaaccctattttgaagtgtaaaaataaaaaaattcctaaaattttcttataaggattttttttaatataacttttatttaaattatacatacactgatataattaaaccacatagaataaaattaaatataagtaaaaaaaattaacggataaaaagattcaaagagacatagtttagtaataattaattgatgagtgctaagtacaatttcttagttaatttttacgttcgaaattatatgccgaaatattttttatttttttatagtggtatttattatagttacagtatcatctctgtaaaattttaaaaaatttagaatagtttacaatgtcgaaaacagagttcttgatattccagtttagcacgcgtgttcaaaaatcttcaaacatgtgttcagtactgtaaactattcgaaaatttttaaatatttacagagtggatgttgtaagcataacaaacactgctgtgaaaaaaaaaaacaaatattttgatatatgttttcaggcataaaagttgactaaaaatttgtaacagaaaattgatgataacattcctcgatctaattataataatttgaaaataggaggttaatttaacactcctctaattataatagtttaaaaagtaaaaaccatatattagtttgtgatatatattaatggagcattgctatttggcactagtggtgcctaatatctttgcgacatgttgcgttgcgatgggctagcgacactccttaaaaattattatattaaattatatgagactcgatatttagttggaccaatagcaatattaacacataagagggtgctagacaccactaatgtcctttagcatttctcacattaatgatatctacatcaaaattatatatacaatgagaggtgattatttattataaccaaccaataacaattagtttagatgggatccactattttataagggattgtcataatattttatgttggtatttgagttgaatgaggaagaaaggggttttgtaattaatttgaacagtatatttttccttggatgtggggtactgaaattgccaagaagctctcctttttatattttatataatcctttttcacttggtcaaaggaaagtctctttcaaaattctcaagagacacaactcccctcaatctcattctcatattgcaacttgcaaccctttttttgttttatccaaaaaaaaaaaaaaaaaaaaaactctgcacgctttcatgaagattctaagaaataagtgtcaaataattcaatttgtaaaagatctgtaagatatatagtaactattaagatggaaacaaccccaataaaaaaaaataggtgaaattaatgcaaacattttataaaatgaggagtgttaattataaatttttattacagtttcttaattaatttttgtacttaaaattatatgttagaatataatttttttttaatttttttataatagtattccttataattacagtattatctttgtaaattattaaaaatttttgaataacttacaatattgaaataaaattcttgatattttaatttatcacgtgagtttaaaaaactttaaatatattttcggcactataaattatttgaaatttttttaaaatttacaaaattgatattataagtataacgaatatcgatataaaaaaaatattacatgaaattaattaaaaaattataataaaaaattaatattaaccatatgcatgggagttttaatgaaatcaagtcaaacaaaacaacaataaattagatcctgtaatttttattatttaaataaaagaattaagttataattatatcagggtcatgtatgaagtacgaaaagatatatgtgaataaataattatatatatggacaaaagtagcagccttttaacatgcaaattataaagaaaccatgcatatgtaaataatataatatatattctattcacaaacgcgtataaatatgtaaatatatatgtgaaaatatgaagtgtgatgatcatgaataattgatatacatttattatgtagcattaaatgtcattatatttaggttgaaaaatgaacagcaatatagtgatcatcgatgatgtgtaaaaaaaatgctaataatgctaataataataattaataggtgatttatctcaaaaaaaaataattaatagatgatgatgataaattaattggacatatatactatatataatagaagaagaaaagggtaggtagggagatatggcatcatatttacaaagaaagaagaaaaagacaatatatatgttgtcatatatttatatatatatatatagggaggtttaattagggatgtagtaagagtttccattgctggccatagaaagcaacagcagtgatttttagagaagagagaggtttgactagtaatgtggcagtgaaaaatgagctggtcatgatgccgacccatcaaaacagaccacgtgaaatcttctcaattctcaattccattcccatttcattatatttatagcaccaataaaattacatatattgattactcaaacaagtatatgtatttggttggattaataactttatataaataattccgggtggaaactattgtgcggtggctattgtgagagatcatacggaatcaattttatgggtggtgacaaataagctcggggaagcggtgacttgtatgttagctttgaagacggcggtcacaatgcatcattttgttatggtggagagtaattctaagatggtgatcaagaacctaaagggtgtcgaatctttttggcagcttgagaattacacacgacaatgcaagcatctctctacttttttcactagttgtaatttttcttatgtttttagaaactgtaattttgcgtctcataatgtgttcaaataaacttttgccaacaatgtttcgggtatgatagaaactactactattctgaatattatcttttgtaatgaccgtgagatctgactgctttgttattgtcatatgtaaagctttatttcaaaaaaaaaattggtttcaattatttctgaaacaatgggaagtgaggattttaaaggctcttttctttttacgtgtgttgttagttgggagagaagtaatgaattattattattaaatggggaacttactgaagccttattaatagaaatattattctagtaatgcagaaaaaggacatagttgtcactcacgtggtttttattttgaaagtggtcaatcaaatggggttatgacacgtggcagaccctgccaaaggagaagtactcctgtgtttatcagatggtggtcagatgtggtcaggtcagtcaaaatgcaatgtattttgatttctaataagcctctgaaaatttgctaggaaatcaattcctcgtggcctattataagatgccattgccagtcccccctactctttaactctctcccaatataatatcatttatatagatggatttgttaatagtaaccaaaattattagtttctaaatcttaaccgtataaatttaatatttaattttaatgatatatttgtaatttttttttagtttgatcagtgcaaatttattaaaaaatatttagttttataaacattagttacttataaaattaaaaataaacattgagtttataccacttataaacttatattgatatttactctattatatatttttaatgaaaattattaattttattcttaaaatataatattttacacatatattattatgcttcatttattataatattattcattaatttatttgtcaaaaataaaataaaattataaaatatgcatcatcaaattaatgtgaaaaaatatttattataattgattagtcgaaaacaacacaaaatcataaaaatgtttagaccattcatatataataattaagttgttttagaaatttatgaaacaattataaataaacacagaataattgattaaatatatattatatatataaatagaggatcagtatatatgtacctccagctattgattttgatagcgattcataaacttcggctattgatgcatgtaaattcgtatttgagctttagatatgcaaaaataaaggagaaagaattaatggtatatagactttccaagcttttattagccttctttaatggagatttgatagaatgaatataaatagtgagtttgggactaatacatacaaattaattatcaaaatactttaataattaataaaaaaaatataatttttagaattgagttaaagaaaattgataactaaataatattgattatatttaaaatattatgtcaattaaactgaatttatttgtaatcaatttaaattatacaattaataattctaatattcgtacaggttacactcatggtccaagctataataataatcactagtaaacaaatgcaaaataaatcattgtacatagtgcagcaatggaatgggtatttaattcgaatacaatcctttaaatgaatgattggtactatctgttttatttattttgggaaattttatttgtaatttataaaatgataagtacactttaatatttaaaaaattaaatttaaataattttaaaaatcactcttaattttttttaaaaaagttcttatattattttgtattaattttaatacttaattttatttttgtatatatattttacaattatgtataatttttttttaataaaatttcacataatttttttgttataatatttnnnntataatttatttttatttgatatgtatatttttcaataatataaattggaagaatttttttaaaaaaattaacataattaaagatatatattttatannaaataaaaattattaaaatatagtatatctatgaatatttagagtgaaaataaaacttcctcacttatatttccataaattggttaataagtacaaggtaatagttctttcgacttgcaagtgccaagcccaactgagtccaaaagtgctgaaccttggtgcaggcttaactctactgtgtgtagacggaagcccaatttactttaactggttcatagcccaagcctgagacaccatcttgcttgttttttaatttgaaaagtacctcatatacaaaaacattacaaaaatacttaattattagttcaacacttctataaaaatgatctcatcatttgaagatgaatgaacttattattaggctaattttagcctggtcacattctatagttgtttttttttttattattatttttagaataaaattatacttattttctttgttttcaggtttcgacacttggaatgcatggattggacaaatttcggaaaacagtgatttataaaatagagaaaattttgaacgagataaagctgaaacttcaagcccaaattcaactattttctgatcatattttggaaaaagtcgtagcataaaagttttagatctctttttttatctttccaacgcatcttgaattagctcatttggagtttgtatgagaaagttatgcctattttactgagagggctcgaagtagaaaaaaatgggctcagtggccgcggcgaaggactatagaaagcccgttttttcactattctaca

SEQ ID NO: 19271 - DNA, 3241 bp, Cannabis sativa
tttcatgtatacacatgagtacactatagttattcatttgatatttatcggtaatatttaactgacacctcaaatttacaaaaaaaaaaataaatttaatggagttttgccaaaaaaaagtagaattaccctatctatattattttttatttttattttttcaaatttacgatctgggttctcctatggttttgggtcgctatgtaaatttttgttacgatttaaattgttttattagttgctatgtgaatttttataaaaatataaataaaattgttttttaagtgtaaaaataaaataaaaaaaagttgtgtataaacttaaaaggtaacggagtatcgattacttaatatatttagtaactagtaactattatgttactcattgtatactctataagcgacgtttggtgacattaatggatctcgaaaattgagaagaaatatatataaggaaaataatactaataaaaatggataatttcagtttctcaaactaaaatcacacactcccgccatttcacctccaaacacttcccattttccctccattttctcactccaaattcctccattttcccggaaaacttctcactcccttctctcctcaattttatgatcattttgaaccctaatttcaccctttttgtctgaaaccccttactctggtgctttgtctagggttttggctcaaccatgccggccagaatggctcgggggaaaattgttcgtttggagcttgagaatttcaaatcatataagggacttcagacaattggtcctttctatgactttactgctataattggccctaatggtgcgggaaaatcgaatcttatggacgctattagcttcgtgcttggtgttcgaactggtcaacttcgtggttcgcagttgaaggatctgatctatgcttttgatgataaggagaaggaacagaggggacgaagggcttttgttcgattggtttatcagcttggtaatgaatctgagcttcagtttactcggattattactagctccggtggaagtgattataggattgatggagtttctgtgacgtgggatgagtataattcgaggttgaagtcgttggatattcttgtcaaggctaggaattttctggtttttcaggtttgtttttctcattctttgttataataatgtttacattttctgatgttgaaatgattttagtttcaagtgttatttgattgtcctaattgtgaataattattggttctataaattgtgaattattcagctttcatatccaaatttcacttacatttttagagaaaataaattatgattttgacagtggttttgagactatcttttgtagatgcatttgctttgtggctcactttgcccttttttttttcatttctgtttaagaacaacttgtttatttttagagaagccaatcaagctcacatcttagccaatcaagttttgttatctaaaactagtactatgtgaatcgggggttttgcccccttgtgtttgtcaaactcttcggtttggtgagccattttctttgtaattgttagacttgaatgaatgaattccattagaaaaaaaataatataaaatgttttttttatctttagagacttgaatgtaattcaatgcatttgtaaaatcactatgtaattgaatttgagtgtagtcaggtaacacaataaccatgtaattggaggtaattgagcggtctcaattactctccaattctcatgatcctcatgaaaattgattgtaattacactgtttaattgtaaaatattaccatttttaggtaattaatgttattaaactatgtacttatcaactcatttgccaaacatgaaaatactaattcatatgcaattactatttgacatccaaatacacgttgtatttgagattagtgtgttgtaattacactatctagtaattatgtagttacttccaaacacacccttaaggtttggcatggttaattggaataaggtggagaaataattgtctttgtgaccttattcattttgttggatataacttacggtgcgtttggaagtaactgtgtagttagtggtgattacattgaatattaaaatataatttgcattagttatctaaaaatagtgacattttgtaattacacccaattcttatgagggctatgagatttggagaatggaatctcaattaccttcaattaaatggttactgtgtaattacctggttgaattaacttgccaagtcttgtaattactcaaaattgcactcaattccaattacatagtggctttccaaacgcacccttattggagagactttcattttttttttgtgggtgtgtgtgaatgtgctctgttggtaggtgcttttagttgttaccaattttgaaccttggtcctttatgtattacttacaagaaagaacacacagataggtaattagggatggagtagcgatggctagttagatttgtgttgggtcatttgaaccaatgagccatggtggattatgctctgttttcagttcacatggtggttgctaatactattgtaaacttgctgcttgcttgtggatttagtattttggaatttatatttacgcaaatgaatttgttgtgtgtgcagggtgatgtggagtccattgcatctaaaaaccccaaggaacttactggacttcttgagcagatttcaggttctgatgacctgaagagagattatgaaaagtttgaagaagagaaaggtatagctgaagaaaaatcggcacttgtttatcagaaaaaaagaacaattgtgtcggagaggaagcaaaagaaagaacaaaaggaagaagcagagaaacatctacgtttacaagaagaactggtatggaggttctttggttgtttatggttagatgcatttttagatgctgatgcttgttgtaatagagtgtgctttagtacatgtcatattcaattgctcatgcatagattacataattccctttagaatttgatgttgctcccaccctcttaggttattatattcttatcaagttatgatttggtcctgcctaggtcgatattttatatttataatggttttgatggtggtcaaaaaatttaaaaagagtttaaggtcaatttctaaataaacttgtactcaatgatggatgatttttaaatactatatgaaatctgtgattctccactcaatcttgtatgacaaatcaatatatgctcataggaattcctctctttt

SEQ ID NO: 19272 - DNA, 2113 bp, Cannabis sativa
taaacataattctttttttaatttgtgaaataattccatattcaattaacatcttaaaccgttccaaatgggcccactacattacgctagatttcatgtggagcccacaaaccggcccaaaatcaaataaagaggctacaatgaactggacggactccacacagttactaccatggacatgcgaagcagcaaataaaaaatacaatatatcgtcgagtattactcacctgaaataattctcttcaaaataccgcgagaaatagaaacaacgaccgtcaatttctcatcgtcgtcttcgtaacgtgaatctcaagaaaacattaaaaccgtcgacaagtgctctctctctctctcttctctgttctgtttcaaacaaacaaaaaaaggtttttaaaaataccatttttataaacaaaaatcaaataaaaaagcaccaactttggatcaaaaacataaaagaagaaactttggataattaccttgaataaaataaaaagttgatcttggaaatagaatatgggttttgattgatcttcaaagtctgatgaaatgggttttttattttctgaaggaaatatagagagagaaatggattgagaagtttttgtagagagagaaatttgaggtatttataatataaattagagagagaaagagaaagagagtttcagagctcgaggaaggagacagagaaaaacagagagagaaggtttaataatataaaggaaaagacgaaaaaggacaggtctttttctttttggggagaagagttttacagtgtttgtaagggtattgggggaatcaaaacctgttttagttgaatttactattttagcctctgggtatttgggtaattacattatccgttgtgactggttgggttgtgaatatgtttaaaaggggttgagggtattttggggatttcctaaagcgaggctatgatggttcaatgagaaagcgcggatcttattcaccgttggattaagggtcttggttgaaatcgacggtctgggtttattgttggggaaagttaaagcgtgtaggctagatactcgggttattatgtttgtacacgtggtgggattttattggattgaaatcctgccacgtcggtatatttatgtcctaattaaatattatcaaaattgaaaaaaataaaagttagattacaattttttgtttagaatcttcttagagtatctaatgtcatttagttacttttttgctattttttgatttgttaatattctaaaattggattaggtacttttcaaaaatattcaacactatattttaaatttcatattagaataaaaaatatttaaatgtaaaaaataaaatgattaaaaatgtagtttagtgacatcttaaatactgaaatatgtatttataagaagaagaaaaaaaatcatttattattggtaaaaataaaaattaattattatctttttaaaaaaattatatgcattacactaaaaaaaatggcaacttacacaaataattacaataataattgtatttgagtgtaattttatatgataattttaaacaattcatgacaaaataatagagattttattacacgataaaaattatatttttgtaaaaaatttctcgagtaattactaaaaaatatattttttacacatgtcaaaccgaccatgttctaagaaaatttggaaaactatacttctaatgatatcttttatataaaaatatgttttattttaaaataattaaaggtattgtaacaattatttaattttttttaaaaaaaaaatcatatctagtaaaattatttatttttttatcttctgaaataagaataagatatcaacatgaatcaatgatagtccaaaaaaatattatatattaaaataatagtaacattaatgaataaatatttaatgagatcatttatgttaattaattaaaataatttaacactaattaataaatatttaatgagatcatttatgttaattaattaaaataatatattagtgataattaactagacaaaacaatgataaaaaattatttggcctaaacttgaatgtaaaacatgaaggtgtacaaatcatttatgtctatgcactctttttctttttat

SEQ ID NO: 19273 - DNA, 8191 bp, Cannabis sativa
atacaactaatttaaattgtaaaaaagccataagttaagtaaatctctaatttttccatatctatgaaatttaacgaaaaaataccatattctacttaatttcctctttcctctttttaaatttttttttttttttttgattaatagccattaaggcaagagcaaacagcaaacacgagcctcacgccccacacagtcgggaaccagagacagcaaacaaagaacaaaatactaacccagaaacgaacaaaccagtaaaagagttaactactcaaagaaaaaacaaaaagaactaacaggcactaaactaaactaacaagctagagtaccacatggccatctgcatcccaaggatacagggaaccaccaaaattggccaaatcgaagcacccaaacattctgtgccgatttgcccagcgagccgcatcatgggccacaccattcaagtttcttcggatccaatgagcctcccacaagttgagggcggttactgcactgtggaatttgagcagaaggctttggatgttatggtgattgatcgataaggaggattggttgcactgaatcgcattgatcgcattgatggagtcactttggaaaatgactttcttgaagcccaactcggcagccatttcagctcctttgacgagggcatagacttcccctgcaagtgagtccaagtaatgggaattgaaagtatggatctttagcgtgttacctttgtcattgcgaaaaatagctgcccctgccgactccgaatttcccaaagaaatatctgtgttgcacattatccaacctggagggggaggaaaccaggacatttgatcagagcagtgtccttcatgaattgaagtaatttccatgaggcgttgatttatgcgatggatcaaaactggtagaggatcctgtgtgttgtcatgtgttagtttgtttctagctctccatatttcttcgaacacagttgctgctccccccaagaacaggtgtatgtgcattctgttaggacgtttatcttcatctgagaaccatatcagccattcctcccaacttgcagctgtagtcacgtttgtacgcacttgccacatgcagccaaaccaaatggcccgcgcaagttcacagttccatagcaggtgaagagagttctcttcgtcgatgttgcaaagcgggcagagagtgttatccaaggcaaacaccatactaagcctagctttggtaagaaggctattagacagtattttccaccataacatcttaaggcgattgtgaatcctcactccccaaactgttttccatttggtgtactcaggtcggttggtatctatgttcaacgacaaacggtaggccgattttaaagagaattcaccattcggttcgggcaaccatagccaggaatccttcgaaggattcgttggaagtgagatgttgaggatccttctggagtcctctgcattgaaccattgtctaattaaagcaacgtcccactcgttgtgcctgatgaagttactgaccaagctaattcccccggtggcgtcaactcggggtattggttggcgacactcgcccggcacccaaggatcaaaccagatggaggtggttctaccatccccaattcttctacagagaccttccatgagaaggggacgccccctgagaatggccttccatattagggagtccgaatgcttgatttccaagtccaagaaactttggtttgggaagtatttgtgcttcattagcttcccccataggctattctcatccattagaattttccaggcccatttcaaaagtaacgccttattagtagccagagtcgatcgaaatccgagaccccccgccaccttgggggtgcaaagtttttcccatgagacagtgtggagtgttcttttgtcgtccgtgtctccccaccagaagtctctaagagctctgtcaattttgttagctgtagtgatcgggataacatctgaagaatttacatagtttgaaagcgttgatcccacggatttgactaagcaggtctttccagcactagaaagaagtctagccttccaaccttgaacacgctgaagtactctgtccacaagatgattagtgtcctccgttcttttgagcgatcggaataggggcaggccgaggtatgtagctttattattcattttcttcattcctagcagctgagagatagcttgggcttttcttggtgaaactcccttcgaaaagaagattgaagacttggccccattaactgcttggcccgaccaattgcaatacatgttgaggcagtctagaaatgatcttgcttctttgatggtagcttgcccgaataggataatgtcatccgcgaacattagatgagtaattggcgaacctcttctagatagtttaaatccctttagaaggccagccctttctttggaaaacagcaatcttgataaagtttcggccgcaaggataaaaagggagggggagagcggatctccttgtctcaagcctcgatcgggtgtgaatttccccgcaatggacccattgagtagtactttaactgctgagatcgaaatgcaagttttgatccactgcaggaaattattagggaaccccaacagaccgagaatcttgatgacaaattcccaactcattctatcataggccttctcgagatcgatcttgataagcatgaagcccccttttcctttcctctttttcatagagtgtataatttcccgcgcaatcatagtgttctcggcaatgtatcggcctttgacaaatgccgcttggttgggagagataatcttttgtagaaaaggtcgcaatcgagtggcaataatcttcgaaattactttgtaggtagtgttgcacaacgcaatagggcggtagtccgtcacaagtgatggggagtccttcttcgggattagaacaatggatgtatcattgatgtagtttggcagatcattgtggttgaagaaatgggagatcacttggaataagtcagaacggacagtgtcccaatggtgattatagaagcttggagggaatccatctggccccggggccttgtcttttcccatttcagatagagcctcttccatctcactctcagacggaattgaacatagactaattccttcctccgtattgattacattctggaagagatcgggaggagttgaggccgagccatccctttggtttcgaaagccatcactgagtttcttgataaagcaattggcaatttgttgctggtctctaatccaatccccgtccattgtggccttgacgcattgaatatagttccttcggcgacggactatggtggaggccataaagaattttgagcacttatctccctcgtgcagccattgcactctggatttttgtttccagtgtatttcttccctgaggagagcttcattgagctgggatttcgcttgttcaatcgccgatccattagacgggtcttccatctcaactttttgcagaagagtgtttgcatcatggacttgctttttgacttcctggaattgaattttgttccaggatttgagcttgtctcgagtagctttaagttttctattgaagctaaccattgggttgtggtgcccctggctagcccaagcttccttaaccacccaaacacatctaggatccctcatccacatattttcatacttaaaggaatgtcttctgcaatttacgcccgctgtagtatccaggagtagtggtctgtggtcagaaccagtagctgagaggtgcgtgataatggcgtttgggaagagaatacgccaatctggcgaggccagcccatgatctagccttgcacgtttagtagttcttcccaggtggctgcaatttccatctttgatccaagtaaatccagggcccagatagccaagatcaaccaaaccgactcgctgaaccattctcctaaagtcaaatgagtatctagatgagttgcttcttctaacatagttgaaacattcagaatctttcagagtcccattcacgtcaccacaaagtagtattggagtacccgcagccagagctagttcccctgtatgagtccaaaattcttccttatcactgctatgtggtggcccataagcaccgaagagtttccagtggcatccaggggggtccgaagagatttccccaactattaagaacctgcttgcgaattggatgttgcaagtaactcctttcatccagcataggccaagtccccccccattaccaactggaggaacataatgagaattttgaaacttcaattggttgcaaattctagtaaatttggtgcttaagagccgaacttcagaaaggattaccacttcgggattatgttgacggataagcgccgtcaattgtcgaactgtcgtggaattcccgagaccacgacaattccaggatagaattttcatggcgactttggagacttttctgggcaagtctccgtagccccaaatcgaaaatcctcatgtctgttgccttggttgtcttgactagttgatacttcggatatttcagtgattatgcagctggtggtcggtcgttcattcttctcaattaccacaaaatgattatctaaattcacagtcaagtcgaaagaactaccttcccagtggcttagtgttgttgattttcgtcccacccttgacttggagttgtgttttcctttaaaagcttttggcgttgctgcaagattgctacgatccttcggtggtctgcctctttgcttcggggtagggaattccagggatgtggccggtggctttcttgtggtcctttgagttcggccagtcgaaccattttccgtcttgatcccaggtgagaattgggtcggaacagaggggtcattgagcatttctcgctccacctgggacgaagaggcctccatatcagttggtagaatattctcattgaaagcattatctcttgagttgggtattttcgagtttggttgtgaagtagcagagttttttggaggtgtaaagatcaaaccatcagatgcttttcttttccgtgggccttggaggtgctcttgaactctgaagtcttcaatatcaagtattgggctaaggagattgggctctctaaaatatttgtccacagttattgatcccattaaaagctctctagctttaggatcagcccaacacttagaagtgggccaatccactagttgggcttgagtaccaaggagtgggttatagtaaggcttagttgggcttttaggtggggccccgttggtgctggtgttgaaagcctcctctccctcattttggtgtgtttcatttgaattcaactttcttatctctaaatggctagattccaagccatgaatttcttcatccccatctgcctcctccaaaatgggattttcagcttctgtcacaatcggcctctcttctgcctccagtgcgtgcctgcctcccaaagtaccgttggtagcctgtggtagagcatcggtacagcgtgcaagttgcagttccagaatagagacaacttttgtattatttccaaagggggcaacttctccaatacctgggagataaaccatggggagctgggtaatgaccatgccaccttgttccgcctcatcgtcggagacaatccgtttcttggagggaagttgtcttcggctttccctaagttcatccgaatcgccatttttaagtgccttctgcacttttatctggttccgtagggtcgggtcattgattatcctcttctgtagagtccaatcctggaaccatttggcaaagggagtggagaatgttgatttctcacttgcatccttcttgagccatatcccgtacattgggtagaaattcccctgttcatccttgatgacagttgggggtttgaaacaaaggctttggtcatgcgttaagactccacatttgaaacacattttggggagtttctcatacttatattgcagccacagatccttgagacgttgtctacggaggaagaatccagagaatagtggcttattgaggtcgattgtggctctgaagcgtagagaactcgtaccgacggcgtcttcaatacccgaaggaagctcatacacaggagaggctttagatgcgagttccttcaggttggagaggttccaatagaatggagggatgctgttgatgttcacccaaatgggtgttttatcaaatcttacttcagatggagatagccatgatggccacggcatgattactatgagagccccacacacgaaccatgggcgcctggataggacattcaaagcatcattacggttagcaaatgtgaattggatgatattgtcatcgagctccttccacttccatcctttaatcgcattccatgaaagtttgagggatccctgaattgcagccttaccaagcttataacggctgataattttccccagtaggacttggttagcctcctctggctcatccacttcaccggggttaagggcaaatgtgatatcatcgtgcgaaatctgaacggcatcctggaacatatttgaaacagctgcaggatccatggagtgtgataactaactgtgtgttgcagtagtgaggtagcttagttgagaagagcaaaactctatgaacttctatgaagtaggctccttagagagcatttttccccatcttcgtgaatatttatcaagtaacattcctctttttaaatttaattagacataggctcactgatataactgatgtaacaattctagctagctcgcaatttctaaaaataattaaagaacataaaataaaaaataaattatccgttaataaaataacacgtgtaaaagacagagaaaatcttggaagtttctcgaggaaagacgtaacaacgtagtagcttcgcctggtggtttcctttctctctttctttttatctttctcaactcccaaacaaccaaactctttccattttctattattattcctctaaccttctaaaattgccaacacctcaatctttcttcttcttcttcttccactttcatttttttttgttctgttattattatagttaataattatattaattgtgatctggtgaagataattcaaccatggcggtggagactaacggcgaattatctgccgccgactcccaaaagccattaccgacaccgttcttgaccaagagttatcagctggtcgacgatcccaccattgacgacgtcatctcttggaactacgacggatctaccttcatcgtttgggatccgactgtttttgcaagagatttgctcccaaaatatttcaagcacaataacttttccagctttgttagacaactcaacacctatgtaagtttccaaatttttcttcttgtaatatttttaggtaacttatctttgaaaattttctaatttctttatcaccatgtttagggatttaggaaggttgttcctgatcggtgggaattctcaaacgacttctttcgcaaaaacgagaaacaactcctatgcgaaatacaacgccgaaaaattgcaacacctacgccgacagtagcggcaatccctacggcaaggcctataatatcgccgtcgaattcggatgaagagcaagtattttcctctaactcgtcatcgataatagctcccacggagctcgtagatgagaatgagaggttaaggaaggagaaccagcagctcaagaaagagttagcggaaatgaaaactctctgcagtagtatcttcaatatggtttcgaactatgcttgtgttcaatcccatagcagttttcaaacagaggaatttctggaaatgaaacctcttgatttgatgcctggtaagcggtttggcgacgaaatcgactcaactttaggtatcaaacgagctagagccgacgacggtgaagaagtggcggcggcggtggtggtcgagaatgcgatgaatctacggttgcagcagcagccagctggagttgaggttaaatcagagccgttagatgtagatcatcaggacaaaccgtggcttaaacagtgccacagagctaatcaaagagtttgtaattgatgaagagcagccagtttgtcgttctaatattatccgaagtcccgtacaaaggagaggcacgtgccgaatgggtcacgtgcgtcaactttgtttcaagaagtttctcggacttacttgccgaacccttttaaccctttctagaaagacagctcctttttttttttttttttt

SEQ ID NO: 19274 - DNA, 1743 bp, Cannabis sativa
  modified_base (247)..(252): a, c, t, g, unknown or other
aattgatctaatttaatgacaattaattgatctaattacaattgattgtcaaatattggatatcaaattgtaatcaaatcaaattaaatgctactttttaatatccaaaatggatcggattggatgatcgaaaattggatgtagtgtctaaaaatccaaaacatccaatcaaactaataagaatttttatttaatttggatgagtattaaaattttatattatcatacgtaaaatatatatgtatannnnnnaattaacattaaaattttattttttttaagattaaacgatccaatccactagatctaaaatataaatattggatgaacctaattctatcaaaaaaaaaaaaaaatactaaatctaaattattgaataaactaaaattaaatcaataaatatactgcaatctaatagatattggattgattaaataactaaaattaattacattggtaaaatctaacaatccaatttaaaattagatcaaatatgaatatgtagtccaataaacaccccatctaaaacttttctctgcaaaagttttagcttaagctttctcctttaaaaccatgtaaaactatgtaggaccacaaaaaactaacactttcccacccttattttgaagagaacaataaaatgtgtacactttcccataaccataccccaccgactacaccaaacaccccctaagtggtttgttaagatactacccttgtaattatagcataatgtcatctctattctctagttaaaagaaaataaaaacatatgtacaccaaaccaaaagagattgataattccaatcttcatttcgtatgagaaaaaggagtagttttgtagatcttaagttgataaaacaaaaagtaaaactactccctcaagccttaacattgtttttcccaattactatagtagattccaaactccacattcgaaagcatggattacaaataaatagatatactagctagaatgaagagctaaacatggattcttcttcccctatacacaacagccctttgttctaatcatcatcatcataatcatcagtatcatcatcgtcatcatcatcagtatcatcagtatcatcatcgtcatcttcgtcatcatcatcataggctgtaaaatcgtcatagtctaagaaatcatcataatcatagttgatggacatagagtcatcattgtctaagaaatcatcctcacttgagtatccaaaatcataatcagagtcatcatcaccattctcatcttcaacttcagcagaattattacccatagagaaaaaatgatgagaacagttaagattataatcttcctctgaaaacgtctcaccaatatcagaaataaattcagtgcccttgagtgaatcataaggaagctttacatgtttaatctgctcagcacaccttctccccaaattttcttttaatctaatattgaaacatccgcgcaggtcaagtgactcgagtttatgacaaccatcaagaatggcttctaagccaatgttagtcatccagcttccaataagctctaggtggtgtaatcctggcaagtatttaccaatggcaatggcatgtttactataatccttcccataagaaggattaacgtatactttatgaacaaaagagttcagtttcaatgttttgaaaagagggcaacatcgccccaatgcttccatacaactttcaagggatttgaagtatgtctgtgttagatcaagctcctccaacaatgga

SEQ ID NO: 19275 - DNA, 5131 bp, Cannabis sativa
  modified_base (4829)..(4836): a, c, t, g, unknown or other
  modified_base (4947)..(4949): a, c, t, g, unknown or other
  modified_base (5065)..(5074): a, c, t, g, unknown or other
ttaaataattataacatatacgataataaaaaaaaatattttttatagcaaaacaaatataaaatctactgaaacattgaactgtagagtggtagccacaccacacacattagataaaaaaagataatatatatattgttattaaaatgaagaatatatacaaaatttcagaaattctcattaaattccaaatcaaaaattctattcctaattaattaattaatatataactattaattagatagaagagaaaatggataatttggattatatcaatgagggaaaaaaacaaaaaatatacatatattatatgtagctttcttggactttgtccaattttattgatttgatgaagctaattatattgtgaatggtatatgaaaaccatagattaaaaaacaagcaaacaagtacatgggattcgacaaataatcgtattacagatgaggtcacacacatatatattaatataatataatataatgatttatattaatttatatagtccgacccacatgacaatatatatgagaaattaattaattaattaaatttgatgttttttgttttttggcttcttaaactatgaaataatattaatcttacataaatcattttgttatagaaacaaggtcaatatatcatcaccccctagaaatgcattctttgagccacaaaaatggagagaaattctatatattaattatttattattaataattattatatattataaatattaatttcattatatttatgggaagactccataatttatttttggtacattgggatttgactgtatctcaatgtagttatgtgagagtcaataaatattagcactaacacctagatttgctcttgtttctgagtatgaatatatttatatatatataaattgtataaattaattattgaacaatgataatgtttatgaaacatattagaagaagtacttcactctattctccataattaattaataaattaaaaattaataataaaatatagagagttgcatgcatgtggaaatggagcttgatctatagtacactgtttattattatcatgagattcttttttatttcactcatatatgctattaaatatatatatagcagtactataattataagatcatgatataaatatatatatatgttttaattctatttattttaattattatatttatggtaactagtacgtaggaatttgatttcgattcaatgtatatatcatatggaaagttaaaaaaatacttaataataattaaaaaatatatatttaataataattagaaaaaattcataacaaaaacaacacaattcaatgtaaacggtttggtcttgtgatatggctatgggtgcttcacatttaccaaattttagatttttgtgttcttactatagtttttacttttttcacttattttcaattttttattttaaaattttgggatgtgttatcgtctttatttactcaattattattatgtttttcttttcttaattttaagaaacttttgttcttctttatttattgaataaaagaaaattatcattagactgacgttaaaataagtctaagaacttatataaactcaagtaatttcgaccaccaaattcttgcctcatcaagagaaatagcgagtttggcaaggttatgagctatagagttcggagagcgattataaaaaaaatataaaaacattaagcttatcacaaactaaataaatatcttgtaaaaccgaatcataatctgctagacaagcctctcttttatttacgagttttgtaacaatttgacaatccgtctccaccttaatattatgatatccaagacgagaacacaattgcaacccaactagtatagccatagtttcggcaaaaaataacagagttaaaagacacaccgctggggtcactacagacgccacataatatcctataaagtcccgcatgaccgctccaaaatccatacaatagtcaaaaagtcgcaacctaacatcaatattagtttgaaccacccttcaattggaggagaccatagtgcctcagggggtcgaccatcagactaatagctaaagtatgactagaagccacacatccaattctcacccgagcttcttgataggtctgagaaaatgaaaaggcccagtccaatatgccttcgatatcaagaagtttttgatcatgaacccaatggtttcgacgataccaaatgcgctaaagaagaactaggagccactccatctcatctctacgaagaataaatttatgttctcagaagaaagagagaaggctaacctgaggcaactctttagatgcatccactagcttaattatagaagcaagacttatacaatttcaaaatgcatggaatgatgttgcgttttccagcacacaaattggacaaattaagaagattcatgggaactttatgagaggcaagattagacatagtaggaaactaatataaacaagctctccaaataaacacttttatcttaggaggaatatagtaagactccaaaggtacttctaccaagaagatgagcccaaagaggaatcatattgacctaatctcaataaccttatggcatttcaatacccacttttaatcgtataactccctgaagaataatagtgccagattagatggtcttgttgttgattagatctcgaaatagataggatctattcaccgaaaataaagattcagcaaggcctttattccaatctccattagctaatttcaaattactaatcatggaaattgaatcaattggccacaaagaataagagagcaattgaaacttttgggatccaaacatgatgtttaatactcacagaagaccatcaccaataagccaacgactaccttccaagaactactctttcccccactgaatactcctccaaaggtaagagtctttgttagattttatagtaaagagtatattcccattttaaaagtaaatacccttcatgactcgagcgacaagggagtgtggaatagaatatagacaccaagcttgtttagctagcaaggccttattgaagatggaaagatcctaaaagctcccatccgctttatgccaacagaagcaatcccaagaacaccaatgcactttcctattatcatcgtcacctctccactaaaatctggcgcaaagtactctatgaatttcctcaacgagtttcacaagaagccgaaacaaattcttagcatatgtcagaatagattggataataaactttagaagcacttcacgctctcgcgcagaaaaggattcagcttttcaaccaaaaactttataccataccttgtcccgaatagattgaaaaagattagacttacttcgacccgcaaaacaaagaaagcaaaattatttctcatgacaagaaacttttgttcttaaaacatgaaacatttttttcacttgtatatattttcacatatacatttccttttttttttttttgaatggaaaatataattttattaaccattaaattttgttactaatgttagtaacgatcaagatacaaattaaatgaatgctctagtaaaattgtgacattagttgacctttttaacaaaacataaattaaaacattctcctattattttaactaaagtaacaaaactaattaccttccactagcaaattaattaaccctatatctatatgtatattaaatgtatgtatatatatacagctaagtaattagtaaccatgtgtggagagagtacaaaaaaagataaagagtcaaaatgtgtagagaaaaccttaattttactcaaagaattttcagatatatatgtagaaaaacatttctggccatgggagactctagtcaaaccctatatatatatataaatatacatacatatatatatatatatatatatattaccacgtgtgtcgtgtagacaagaatggctaagtatccaaagaaataatagtatttttttgaagttgtgaaggcaaattgtgtattttgtttgttctcatgacttaatttgaaatagttttatcaaaaaaaaaaaaatggaaatacttaatttgcaaatagtataatggagacaaatttcagccatacattttatatcaactataagatgcttaatctattttaattggctaattaaataatgagattttcttatttatatatatatatatatttacagaaattcacatattgtaattcacatagcaacttaaatcgtagctcaaatatacataacaaccacgggagcagtccaaattataaaaataaaaaaaagatatataggtgattccccttaaataatttatgtgttagctagttagttcgacttttaaaagttattttaagagttttggagcttaatttattttaggacatgtttggatacatttgatttgatttgattttttactaaaaaagagttaatatatattttgatgacaaactaatcttaatttgtaacttcaaaataatgtgtttttgagaagctaaagcaaaaatttaaccaaccgagctcttattataaaattgcttattttcgcaataacttgaaaaaaaaaattaataatatttatttttatttttaaaaataaaaccattgacaagtcagcaacaaagaccatacttgcaagttgcgatagtaaaaagattcctattttaaatagcactaactcgttgatcaagatcgtattggctcgacaataagttaagttattattaatctccctaaaactaaaagaaaatccaacaaaacaactattcgaagttaaggtagcgtttggtaatacttttttaatcagttttttgttnnnnnnnntagaaaagtgaaaatattttttaaacatatgttctataaaactgtttttgtttttcaattttttaattaagaatcaaaattttaaaaataaaaaaaaatcactttcaatannnttttaaacaattttttttcttaatcaatattttggactccgacaagacccggacccaaatcctctctcacggcccttgtggtgaactcgacctctgacccgaatccgaattcgacnnnnnnnnnnacccgacttaaataaaataaaataaatgaaaataaaaaagaactttacagaacacac

SEQ ID NO: 19276 - DNA, 2423 bp, Cannabis sativa
  modified_base (27)..(32): a, c, t, g, unknown or other
  modified_base (58)..(63): a, c, t, g, unknown or other
  modified_base (95)..(100): a, c, t, g, unknown or other
  modified_base (1832)..(1832): a, c, t, g, unknown or other
agaggtatgtttcaaataaatataaannnnnntttcaaataaatataaaattagaagnnnnnnttcaaataaatataaaattagaagcaaatttnnnnnnttgattaataaaagagacatttttcaacttaccccaatttataatggtccaaagtccaaaagcacaaactagtagtatgaagaaaagaacgaaaaaaaattatttactataagatagttgtgcttcgaatataagttctaaactatttcttcactttttatatgagtaaattacatgaatgttgagtaagaaaaatactaacattaggataatagttggccaatttttacccttattaactgaaatttaggttgaaaaatgaagaacaaaggtaaagttgctctaaaaccacgactttagaacagtcacaaaacaattacctagtaaagaacaagatgggccttgtagtttgaacttgaagaaacattttattaaattttgagtttttttctttagtgattatacatgataatattatgacatccagggccgtcacgaatttcagtgagccttaggaaaaataattcttttggaccgttatctaaaaaaaatatggtatttaaaattaataaaaatttatgtgtatttttgaaaagaaaaatatttttttggctctaggcatgagcctagcctgccttaatctagggattgccctgatgacatcttatgtgtattgattattgttgactcctaaaaaattgctaagtataattttggagatcttaagattaaacataaagaaaatctcataatacacacttttaaaggtaagtaaatcatgtatgggtcaaccccatcaaaataaacgaagagccccttgacacgaggagcaactggccgtggagaagctccccgcacgcttcccttgtgcgcccgcaccagcgagagtttcctcctattctctctactgccatacgccaagcagggacatcttgcttcccttcgtgcctactcatctcctatgctcgacatctaagtggaaagattcacatgggctaggctaaacacttaaatgaattttctaagtgccattctcgtatcttgaacacgagatgtaaaaagagaaactccaaaatgacacacaataagggaaatgactgataaagcatgcacgccactgaaggaagagtggaagtacgacaagtactagtggtggagacatagcttgtctcattcggggtacaggctgacacattaccaccattttttcactacccatctgatacgctgatttttatggtataaaagaaattttgtgccctaacatttggaactacatgtatttaaaagactcagtagctcaagtataaatagctcattttaaaaattgtaaagagataggaaaatttttgtaagaagaattttgagtatcaatagaacaacacaatttcatattattggatcaagatttcaaagagttttcataatcatcttatttctaagtttcttatatttaagtttttctaattatttaattgatgagttcttatcgtcaataattatttttaatttaaaatatgtagtatttaaaattaaattattctaataatatcacgacatgttatgtagtcttggacataattaatgctaattgcaaattcctattataatttcttagttaactcttaagctaatttcgcatgtaagaatatttttttgaagaattacttcatatactatttttttttaacttttttttcaaatttacagtttggatttctaaagtggttgcagcgctagttgtaatatggatttccatgtagaattacataaaaatacaaaaaaaaaaaanaaaaaactattttaaaatgtaaaagtaaaaaataccctatttttttagtgatattcgttttagttatagtattacttttataaatttttaaataatttataatactaaaaacaaaatttctattattctaatttaccatacatattcaaaacactttaaacttatttttattgttgtaaattattataaagttttcaataaaatttcctcctctatataatttaaggcttcttttttttttcttttcttttaaattacatcttatacacacaatatatatatatagtagctagattatagaagagtacttaatacttctttattaccctttggagatgtcgaaatagtaagccacagcccaaagattaaggtcccctacatacacatatacacaccaacttgccaactgctaccaattcacttatgtgggtcccactcacatatcattattacaattatttatttatttatttattaaattatttattatttattgtggttctccttacccctttgggaagtggaaaaaataaaactcaaaatccaagtgcatgtttggcatcataactaaaaaacagttttttgttttta

SEQ ID NO: 19277 - DNA, 5709 bp, Cannabis sativa
  modified_base (541)..(546): a, c, t, g, unknown or other
aagtgttcttcattctagttcttttcttctccttctactcttactaaatattataatttttattataatgtctaattcagagtagtgttcttttagttaagggtaattttaaaacccgaaacatgaattcttaatttcattattgaatgtaaatttctagttttcattatacatcaaattgcttctattcttctatgttcaatgtcatgattattgttttaatcttgtttggatggccactaaattaggttttactttaatttaccgtcatcttatgattattattcacctaatagtctaggattctaagtgtttgtgacaaattgtaatttttatttgtgatgaagaatagaacctaggttaaataaattatatgtttcattgatttgttgcctagattagtctatctccataaaactcaatgctttatctaagttaaataaattgcatgctttgtggatttactgcttaagcaaaagagttaattattgagtgtttcgccttgattacatacaatagggagattgggataattgactgnnnnnnctttatctgcgggattaatagtttcattggaaactaaaaattacatctttaataggaattaggaatgatcgctgagggtgacgaacaacctttaattagtctctcatatcgtagtctcaattttagtttgtctgttttacttttatttttgctattttaatttcaatcataaaatcccccttttctaacttttgacactaatttctgaataattaaataaacatagtcctcgtgagatcgacccttacttataattatactaaaataattggaggtattgaaaataaatattagtaaatttgttgtggcttacgacatgcatcaaatttgatgtgtgtcgtatgccgtatcaaatttactattttttttaattacaatacccccaattattttagtataattataagtaagggtcgatcccacgaggactatgtttattcaattattcacaaattagtaactagaattagagaagagaggattttgagattaagattaaaatagcagaaataaaaataaaataaacaaattaaaattgagattatgatatgagaaactagttaaaggttattcgccactctcaacaatcattcctaattcctattaaagaatgtaattttcagtttccaatcaaactattaatcctgcatataaagttaaagcagtcaattatctcaatctccttattgtatgtaatcaagacgaaacactcaataattaactcttttcctaagtagtaaatccacgaagcatgcaatttatttaacttagataaagctatgagatttatggagatagactaatctaggcaacaaatcaataaagtatataattcatttaacctaggttctattcttcatcaaccacttgaggttagctcaagtggccataggagggtgcgtatgtgttggaggtcctgggttcgagtcctaggttatgcaatgtaatatataaacgcttaaataaaaaaaaaataggttatattcttcatcacaaataaaaattgtaatttgtcacaaacacttaaaatcctagactattaggtgaatagtgatgacggtagattagttgtaatgtgattaatgtttttaaattttaaaaaattgaatatgtgattagttgagaatctcaaaattacaagataaaagaatatttgaaaaattttggattctatggattgaaaacatagaaaacataaaaatagtatttttcatgtttaacctcaaacttaaaataatattcagattttatttttaaaaatactcactccatcaagaattcttatgtaaactccaccattttaatttttaaaaacataaaacagttttcaaattctaaaccaataacattataatagaagtgttattttatttttttatttaatcacatcaaaataatctatatttaattactaaaactctatcttaaatttatagtttggtaactactttgtaatacaatgtgagacaaacacaaatttatctaacttattttttccaatgttaagaaagaaagaaaaagaaaaacaaagtgacagcaaagagaatagaatcaaaaagatataggaagaaacttaaaatagtagggacacagtttaccttaataacatatgtattatgtggaccaacaacagcccaaaccaggttgggttaaaggttaatcaatcacatgagtttaggaccgttttaatgggatcacatcacaatttggtgcatacaaacaaaaaaaaaacaaaaaattataattaattaatgcaattgacagaaaagctttgttcaattccctagaaactagaacactctttcctactttcattacatttaacaaatataaatgaaactataacatgaaaatgaatatttaaccattaattaatatttaatatttttatttttaacaaataataatgttaaaaaagagaaaaagggcatttcagatacagacacccactactcactactactattacccaccgtcactcttcatctttctcattattgtctactagaaagtagaattctctctctctctctctctctctctctctctacagcttttctttaaggcttgagctctaaaatttctgcacaaggaatacttgccctttaccgatttctacaagctttcatttcatcaaccatggctgctctagtgtatatcctggttttcttggctctcactggctattcaagtaagcattagattatgctgttttgtttcctactatctttcttttcctttctttaatttaggtttagaaattcatgagtgctaaacttctctgatgaaaaagaaaaatgtttgattcagccctgagatcagtttgagatgaaaaattatatctttctttcttcttaaaaatttaatttttcttttcccctgtttattgctcctgtctcagtacattcttcaagaacatatattttgtttatagatgaaagattttagcttttcttggggtacatacatctcaagaaaaaattcaatctttggtggtggtaaaaaagaagttggtttcatctgggtatttttgaatttttctttttggaaataggtggtgctacctattgcatatgtaaagatgggactagtgaccaagctcttcagaaggcactagattatgcttgtggggctggagctgactgctccccaatccttcagagtggtgcttgttaccaacccaatactgttaaagatcactgcagttatgctgtcaatagttatttccaaaagaaaggccaagttgctggaagctgtgatttttcaggctctgccatgcagtctcaaactcccccagctagtaagttctaacaatttcagattcaaccccaacaagaaatcttctctctttcacttaattaattaatctattttcttaaaacagcccaaaactctaactgtgtatttccttcaagtggcagcagcaggtatgtttgttcatcatttttttacttctgatttctgaacgaatgtcaactctcctttctaattattttggatttttattaaagataaaagtataataataattaaaaagaaaaatccccatgtgttgtatcttagaatctggttggataggttcctagaaccttctttttttgtggccaaaataacatattcttgtttttgttcactgcaaatttttgttttctgacactattaacatgaagcagattttgggtgagttgtcatcaatttttaatgaacttgagaccttcattttcacttctttgaatttattttgttagtatctcactgtctttttggatgttgcaactaactaatgtgataccacaaaccatagtttctatagccgggttttctttttagtattgaaataaaccaaagattaactgattgagaaatattaaccgagggattagtactagttgatttgagatgtaaaaataccaccatttgtgtaacgatattatttatttttattttttcaatttcctcagcaccccaacaacaggtaccccaacagggaccccaacaactggtaccccaacgacaggaacaactccctcaactacaccaacaactggaacgacaactccttctaccacaccaacaactggaacgacaacaggaacaggaggattcacacccacattcggaagcggcggcatcagccccggcagcagcaccacctttgatggtagtggtgctggatcagtcctctcaccaggcctcactaacatctttatcatgtcttcttcggtggctgcccttctctggcttttggtacaaaattagaacaaaccatttttagtagaaagtgatcaaaataattatatgtattaatttagtggggagggggtaattctgatgtgcggaccagattatgccacgaagaaataggggtgtagacgtgtaactctatgtggtgtatgaggctgtgtactagagataacacgtgtaggtaaaatgataaaaagaaaaaagaaaaccccactagggtttttgttttctttctcttcctccctatatgtgaaaaagttggaatgtgattccttttttatttttttattttaagtggggtgatatggacttgtatgggggtagagtagaagaacatgagatctctttaatcttttctttctagatttgtcgcttttgtatatctaagagaggccctctattttttaatttaatggaactctgctctacctcatctatataaatatatatatatatttatgactctttttctcataaattatgatgcatggtaatggcatggtgatggcatttaagttcagatgttggcatttccttttcgtcatgatatcaccacgtttacatgtgagataaacttttatttttcctgatataaaaaacttgaatttcatgcaaaaaggttatgatgaataataatagtttaaataagtgtatgtaccttttgtgaattttttttttgctggaggtaccttttgtgaaattattataaatgttaccggagttattgaattgtattttgacttttgtggccgaaaaagcagaaaactgaatcaaacaaagcattaaaggaatatgtatacaatatacatatatgtgtaatttcattaattgatttgacctttggaatagtgtgaggtttgagggattaagacctgtgaactacctaccaagtaccatctggccacaacctcaaaacatggttgtattgtatgatataatggaccaaaggaatttattccgtccgacatgattctgttctttcccacatgattttttttctttctttctgtttttgcaccaaatattttggtacttgttttgctagtgttcatctctgtagagtttcatatcaaactggtcaatattcttttgtaatacaagtatgatctgcaacagaaaaagcagtgttagtaaccaaaatatactaataaatagcttaaacgcgttatcttatcaagcaaagcaagaacagcgagacaagagaacaatagcgttttaagtatttcaacataacttaatagacagaaaagatggattgaagggcaatgaatatgacaatctttgacttagaaattagaaagtaatggaacatttaaggaaaaaaaaaactaaacgtagaatcaatattattaaagcagagggatagggaccttcaaagttgagaaatgcattgagctttctcatagcaatcttgttgac

SEQ ID NO: 19278 - DNA, 4005 bp, Cannabis sativa
ttaacaaaacagaaagtctaattaataacttttgcaaaacacaagatccaaaatggtatttatcccaatataaaattcaaaataatattcaggcctgaataaaataaataaataaataaatgtattcagttattattacatgcttccaaataaataattttggcatattttattatgaagcacgagtttcatgctgtaataataatacttttctctccacctaattttcacccacttttgtacaaattatgaactgtaatcctaaaaataaagaaaaataataaaaataaaaagtattttcaaatcaagatgccaaagtggatggttcacaaccatcagggacacaagccaagacatctctgtaatctcttgatattgtgaaagagtcatacacatttccatctctgcttttcttgtattcaaaaagcaatgaagagtgattaaaggctgtcattttgacaaatccccaatcataatctctgtatacactccatttgggtcttacttggctgaactcagacaagtgactcccagctcctcctaccacaacatgaatagtcccattcacaactcctgagtaatgggatgtccctgtttttacacattgattctgtaaaacaaaaacaaaaaacatagattaacttgtttgtgaaaaaaaatcccagatgatgaatatggtatggtgagtgtttttgcaataaaggaaaacccaagtgattatatggacctggtagatgggacatgtcctttcatagttatggacatggccatagaaagcaatgtcaactttgtatttctgccaaagtttctgcaaactttctcttcccatgggctcttcaaacgagccctcctgaccgtaccagtaatcagaggaatacccgagtacgcgatgagcagcaaagatcaaccatggttgtttctgtctatctacagatgcaaggcatttctctatgaacctgtattgctctgatccctctctccaatcatgctcactgtcagctatacagaagtgaaacatgccataatctgttgaatacctgtatagggatggaataacactttatgtattaacttgatatgattactcttagatgtgaaatttactttagtcaactaatgatgcatttagtgaccggaaagcagaaaaatgagagctagtcgacaaggctttgtaaactttttacttgggtgagacagcccttttttgttatttaaagttttcatgatgatttcttaataatcaatttttaggcatctatttgtcacgggaaattttgagcctcatcctattagtttcataacagtataaatgaatgcaattaatgataaacaagttaagaattttaccaaaacttagctcgattttccgctggaacataatacatggtttcagctaacaccccacattctccacctgaatccgtcttgtcatagaaggaccccgaattcggccaatcacgttcgtggttaccactagatttaacaaactagaaaaatcagtattcacaatcttgattatttcaaaatacacatgaatattatacatgcatataggatttcatactaaccttgcaaccatatatggtacagttgatgcaatgggctccacttgtgatgtgaattgatcccactgggaaaggtatccatttgcatatgttatatctccaatatgaaaaactatgtctatgtttggcaagtccctgatcaattggtctgtagtgttaagcgaacctggttgatagttactatactcgtttgaaccatcacgctctgcctgaaagattcaaacatcataagcttaattttctcaggtcgttgtatgtgaatgcaatttatgattggaacactggtatactgtgccagtcatgtacaggttgttgtagcttgatttgggttgtattccagcctattagctgagttagttgctagattatgtggttagtagagagaataaaagagagttaattaaatgagattacgtatgttaagattgacaagaattatggagtaacatatgttcttataaagactcaatatgtttacattaaatctattgtgggataatattgttcaatattctcttcaaaatggtggctatttttttatcaccaatcttgaaacaccatatcacaagtgaccatttactcactttgttcggatctcaagtgtccttttgcactatgcggatcgcggatctcatgcagcgtactttttttttggctaactatttaaataggtgtagatcgagtgactactagggatatggttttgatactacaggttctattttaaatctaattggtaataaatggagtaattcatgttcttataaatagctcaatatttttacacttaatatacgtggaacaatattgtctaataaaaataggtgaaagtaaaaaaaaactggttaatcctaaggctttcaataaagtcttctattctacaacgatttcaagaagagcataacaaaaacagatgagacgagataaaaattgtaggtcttaacccttagagcaaggtacattaagcaatcataatagaaacacggttcaggaatcagtacatgaaagctcaaattataaataagtttgaatctgttaactacctttcccatgtccccaaacattataacgcgctgtaatgaatcctgcccagggtatggcgatgacttgaaggagtacattttgctccaaatatacgtaccgttagataaaaggtgacccatcttgtatgtgtacctgagtgaccatcattacaaacattgcatgttaatactttatagcatgtaacaaacgaataagaactatctcttcttatacatacactttattaggccacaaatcttttaggaaacttgtgtgtatgaaaccaggatcacgccatccaactgttcttgcaggtgaacctgaataccaatgtaaatcttattaagaataatgcctacttactacataataatatcaaatgcagacaaatggaatgtgttaaacaggaaattggtaagggaaaaaagaaggttaaaacgaaagtttgtaggattccgaaataagaaataaacaaggatttgcaattagcttttctgagttagcaaagtaagcagtaattaatggataaaagagttgataaaccaatacagtagaatctataatattgaatcctaccacacatgctgtgtcgaccaaatgtcaatgttccagctggggatctcacttgattttctcccttcagtccccactcaacaaatggaactgtctcatctatgttgtagccacttgtccaggtaactgtcatctgcacaacatatttaaaagttgtaaagatttcagctagtaacttttctgccttcgaatataattctttaaaaggcaactctgatcgtgtccaactgtgaatactagctaggcttatcctcagtcaaataatctctcttgcctaaagtggatgttctcctaaaacatatttatttgaatttgattgaaatgaagttttagaaacaaaagaaggtaacattattgaaggtgtataaggaaattattctctcagcgcatgtcaagtagagatggatcctctctatttcaaaatcagaagtcataatttgatacctattacaggttacagtggaaattgactcttcacccttttacatgctacttcaggattaaacaatacagaacttggaacaaataaaaagagaaaaatccgaatcagactagcaatgtctgatttcaagctcagaacattaaacaatacttcttattgtacatgaaaacagcctgccaagaagcctcagttaaatgaaaaacttacttcatcccaagattttccctgagcaagacgtggatagagcggtgcttttggattgacaaatgatataaaatttgaaactgccacaacttttggctgcaatatagtacaaaaaagttagtcatgtgatggaaacatcaatagtacaaaaagttttataatcaagatggtacatagaagagaatgtgtgaatgataa

SEQ ID NO: 19279 - DNA, 1577 bp, Cannabis sativa
ttattataaaacataggataccttgaatgcatcttcatctgttcgatcatccccaatataaacaggaaaaacatcggcacaatttgcgaatcctatttaaaaagatttcagaatattagttagtgtgatgttaaagatagataattataagtactattcattattttgtctattgtcactactttatagtaaaaaaataaataaataatcaaagagagggccctgcagctggggctttctcttttaaagcaatacttgggattttacaaatattcccataaaccaaccaacatcaaaggtctcactacaacaactttagtatatggagtggatcatgtgtgctcaataatgattaaaaatatattaattaatattaactaaacaagtagatccaataaattaatatataattaaaacaagacaaatcatattattgattacacaaaatttaactcaccaagtgattccaacaaaaactcaagggctttgcctttgtcccatttgatagtaggtcggatttctaacacctgtaatacaagtacaatcgaaagtgagacttctctctcatattatatccttaaaataatgaacttactatactactaataataaatatataagtatgtataattattaactctagaagattgactaggacaaaaatagtttgtatacctttcttccatgtgttagtctcagcttgggatactccttcagaactgactttacttgctgggccacttcgttccatttctgtcatgattttattcataattttagaatccaggtttataatatatatatatatatatatgcacgtaaagagagaactagaaagtttattaccttttcctcaacacaacgataatgtactgagacacagaacttgttgtgctcaacttttgctcctggagttgatttagttttctcaatcaactgtttgcaaacctgaaaatgaaaatataaaggttaaattgtttgatatgcgttttcctattctttattttattttattttattttatttttatatatatatagatgtatggcaaaggaaaaatacaaattatcaactaacctcatcgatcatgggaagaaattcactggctggttgaaacagaacaccttttgcattatcctgaacccaaaaaataaaataaataaataaaaaatcaaaaggagaaagaaaaaaaaagtgaaagaactctatttcagggtattaaaaactgacactaatattgtaaacatatgcagtatagctgttgcttacttttttgtatttggaaccttttgctggtcctttaatgtccatgccatggcttccggcatagtacagctctgccaatcgtacaaagctatacacctacacaaagtaatacacaaagttaattcaaaatcgagtgattaaaattttaattattgaaaaagggataattttaatagaattgaatgtaccttatctctgcacctgccgctcactatagcagttggaaaacatcgtgcgaggcttttcactgtctttctcatctgtgattgtttcccgggaaaaacaaataagaaagaatgggaaaacgtcaa

SEQ ID NO: 19280 - DNA, 4929 bp, Cannabis sativa
  modified_base (4870)..(4898): a, c, t, g, unknown or other
taaaataatttccaacagtgtcttttgtttctctttaaatacccataatcaaatacctaaaatcctttttccaataggcccgtttctccgaaaaacgattctgatagatggtgccacccttaaacacatgtgagcttaccccaatagcaaagtcgacaagtgtatagctggccgaggccttatcgacggcctgcacatcattcttcttctttttccctttctctcatcaacattgtaaaatcaaaatttgggtttcaaaattaaatccaatacatcaaacagaactctgattcaattatattcactactatttcttcgtcgtcgtcttcttcccctctacttattaggaaaggagaataagtaagaaaaacctgagtggggattgggggactgtcaatttgatttgcaaaatctgccatttttggtcgattatctttttgggtagcttcgatttgaatttcttctttcccatttcatattatccttcagtttcacaatcactctcattctaggcggcttcaattcttccttcctttgagtttcacgattattgtttcaagaaaagggacagtcgttcttcgatttcctttgaagcaacaatcgttcttcaatttcctttgattattttataactcaacattaatcgattattaatttccttcaatcatttttttaagtgacaatcaaacaattttcttattcgtcaaatgatttcatttaaaaaaattataaatgaaaataaattggagatttaaaagttaacgaagatgttctcccgttagtttttattaaaagaaaaggaaacgttaaaaaaaatgttaaaccgagaattctgttacatagccacaaagatatatagtattaaataaaataaggatagtgtaatatttatttttaaaatattatacttttatgagatctacacttatacataaatatatatactaaaatgaacggcacttggagtcatttaggtttttctttaagaaaataaaatttgtgcttaatataaaaattaataagaaaatttattaaaaattttacacgatatattaattttttttaccatgttttttaactaatagaaggtttctaatttatatttattattgacatcaaatttcgttaactgatagcagaatcatatttattattgatgcttatcacatgtacataataagaatagcaaagtaaaagagatacaatattatttatagagatttggcccctttaattagcggttaatgaccttttcctcttttagttgtattaataccagagaaaatacaactcagatctacaaggattgtgaaatacgaagtggctctctgaagattacaatatgagaatcaagttagcaaatctcaagtgagaatgaagcttgggcgtgtgagagagaagggaagagtgagttaggctttcaaacttggagcttgagagctttagtgagccttagagacatagaacttagaagaattaggattaggctaatgctctttatacaagagattatcaaccaatatctctaaaaaataggaactgtaaagcattatttacataattaataataaatgataaaatgattaattatccccaaagaatatgggagtagctgatatttctcccatattttgtgggttattgaagcccaaatcgcaacatagcttgctatctcagatgaaggctgcgcaccaagtgcctaccaggtgcaggctggctggccatgtacctaccaggtgcaaactggccagccttacaatagctagaggctgatcgacctatggtggccatagggtcgaccagggtggcttggcagactcctcagggtagtcagttcatcgtcttttcgtccctcttaggtactcagacttcctatcagctgaagtgttgtgtagatgacttggccttcttgttgacaagttgtactctgcgtggcatggatattggccacgtggatatgccacgtcatgtgagcaaaaataaggataaaatttaccccacaagtccctgtgcagatgcatttactgatagagactttccaactaagttttgactgatgtagccttaaccaggcagatcttgtagtatatttagctttcgaaatatttgctcttgcttgtctgatcacattccttggcagaaaattgatattacatttctgcatgttatttgttgcatgttgaaaggccagtgagagagggtcccacagaagctatataaacttatgggagtaactcacttcttatttctcacttttcattatctctcttcaaaaagcaagtaaagaaatcgcttcacttccccttgaggttgatgccccattatcctccaacactcatgattttttcattattttgatgatcaaagctttccaccatctttctcgaaggtttttactagtgggtaagctttcaaatcccgttctcttcttgtttacttggatttaccattactgctttgaagcttttctatgctttgaaaattctttgattctcacgtttgattgtagtctttttggtacgtgatagttttagaatgcataatgtgtcatttcttgacgaaaaagattcaattttggccttcattgtgattcttaactctttgagtcacgaagagcaggtttgagttttgaaaaacacacattttgattcaacatcaaccctggccaaccataagggtcttgtttaagacctagtcggccctagcactttttcatgggagctggccgaccataggggttcgccctagaaggttggcccgtctatgcctaggtcttgaggccttggctagttcttggctgggtcatgggaccctggccggccgaggcctaggttctaagcgagtggccaactttctatcctcttttgaccacgacaagaatctcgttaaggccttgtatgcatgtacaatcttagtctcacacgtggtggccttagaaactctatatgaaacttaatggtgagtctattatagtcgaatgctcaacttaagactcaacatttttccaagttgttacactgatgactgtactttgctggtacgcatccttgtacgatgaaattatttggaaagtacccttgggtatgatttaccaagactttgtctataccttttcgctttgtctggttgctcacctccccttgtgtcttgtgtgtaagagatctcgagtgacagtcatgggaggtgacaaccacgtcaacagagattcagttggtcttcccttcgtggaatagtatctagttcactcctctagtagctccttgagtgatcttaaggctagtagtggtccattatggaaatgatcaaatagacctaccgcaaagcaccaccttacgaccctgatatcacaagggtggcaagcagagtgagagttggtgtagttgaggaggttgcacagcctcacgatggcagagagccaaggattggccaggcagaggcacctgtggctaaccaagatgcagagagctcagatagtgagtctgagatcgaggaggttgtacctgtcaagacgagacaatataggaagcccttaggctcgtatgatgaggctaggcagcccttgatagcctcaataagcctttcgaggttagagttgaccatgtcctaaaggaagctggtgggccttaagttcttgattagggagagcaacgggactagtggatctcgcctccatcaactattagtgccaagacacttgacaagatcagggagagtggactggtgggagatgtctagggtgacaagcctttaagggaccaacatgtgcatcggttggcactcaacttgatggcgtgatcaaaacaccacatagaacagggactagtattacccctacatccttaatttagagacaataccaaccacttcagggtgtgcctgacttaaatcaccccaaaaggtataaagtacctttcgatgatgttcatactcgacgtcaagttaggctggcctcagccctctcctatgagatagggtacttctttgagttgaaatatttttcgaaacagaatcagatatgatacttctactttatccagatcagttatcagtggttgggcgataccaacaacgcgttcttgtcaaaagtaggaggatatgctaggaattattctattgattgggacatccaataggttccccattgcttctagagagtgtcgatctatacacgctccatccccaccctatagatgcgggatagagctaatcatattctatccatcccagttgataggaggaatatactaaggctagcatgtgaagccaacttccagaggtatgatctataccctccagtgtttggcattgtaggagctgaggagacatgcccaggaggtgggggtattgctatcatggatgatgatatccccctctccaggattgcaaagaacatggagagaagagagggagccctccgctaacgtttggctcacggaggcactgtgggtgatgccactctactaattaggcctagaggccaagattctgccaagcccactcaccccatgcctatgtctagaggtaagggcaaggctactgctcgcgttcaaatgactcctcttctgaagatgatggtaaatgatagttgataacactaacttttctactcttttcttgtattgaatatttgtaacttgtattctaactttttactttctttttgtagatatagcttccaggctaagagatcttattggagagccctagggcagagcttcaagtcgtcccagggtcaaggtggcctagacaacacgatctggtgatgttgtagggtccttactacctccccatcctttggggcctgcaccggctagtcagccaatgatccttgttcctccactgaggaacacctgttggaaattattttacnnnnnnnnnnnnnnnnnnnnnnnnnnnnnttattaacatcctaaataagaactttctaaa

SEQ ID NO: 19281 - DNA, 6599 bp, Cannabis sativa
ctgttaagggaacataataagtacaatacgaattggcaattttgaaaaatagataaaaccctacataagcagataaggtaaggccaacacaagtaaaattcaaagtcctagcaaggaagaacttaactactttaaaaaaagttctcatctctacagttttccacaaaaacaagtttactacaacaggtcattaaataatgctcttcatgtttaataagatactccttacatgttacgaccacaatgagtgttaacgagcataaaataaacacatctgaaataaaataagatgaactccaaaacaaaattccaagattacatgatccttgaaagaataaataaaagctgcaaaggtatagatcataacctcaacccgcaagtcatccacagaggcagctgagaaagtaggcactaaatcagctccattgataacagaagtaatgaaatcaccgcctgattctgccaagtcccatgtcatacatgcagctgcattgccatacaaaatcaaaacttttagaaccataagaaaaccattcactagtacaacagttacaaagatacaaataagatatatttgaaggaaattgaacctgcaccaccactaacaagcactcattcacccaactgcttgagtctctaactcatgtactcttttttgttttttaaataacacttgtttgttatggaggagagatgggtagatggagaggggtggagggaaagagtagaagggattggtggaatccattgtttggtagtggagagaaagggagggaaatgagagttggagggagaccttttccctccaaatcccaaaaatgtaatccctccacatttggaatgatttaagaagatgacaaaatgaaaataccaaatatcaaaactatcctttaaaaaataataaatattaatgttgaaaaggatattatagtaattttaccaactaatttcctctccatccttccaacctttctcctaataccaaacaatacaaaggagagatactatcctctccatccttcctaaactcaccctccatcatactctccatccatcctactcccctccttcctacaatatatggggacctagaaactatagctattgctatgtaggtagctaggagagacttaacctcagaattgaggaaacaagaccatttgagctactccttttaggttggaatggttacatacattgaacaggctaaataatcctaagcagtttggaataaaaggaaaccatagcagccaacaagaagcgcacaaacctggagcaaatgtcacacaagtagctgttgacagttctttctgctctcgcaatatatatgttagaagtgcggctgtacctccacccaaagagtgccccacaatctgttttgatcaataagattaatttgttacacatgttctactaggaggaggagaagaataaaaagaagaaaatccaaacaagtttaaggaaaattatttagatttaaaaaatgcattccaacactcgtaatttcagcaaagatttaaggattacaaatagctaatcaacaaatcatcgtagatacctttagtttgtaaccaggattttgaccaagtgctttaagaatacaaggagttgcaagtttcgcaatccaccgtgcagctgcaaccattccacaatgtgcataacccaaaactagatcagtaactcctccctcgtgtacaacactgtgatggaatggtaccacagctcctgttgcagcagttagagtatccttaatactatgagttccgcgaataagcaagagaaaacattcagtattgtgatcaacgagaattgtaaacgctggtttcaagatctgcattagaaaacaaggaagttcagatcgaattcaaatgtacaggaacatgtgttccttcccacaactcgaaaagtaagcaaatgatttcttgtaaaaccacttactcctgctttgggttcttgaagaagtacattctcttcagaaaaaccagtctcctccagaaacaaaggaaatggttttttagaaaaatgccaacaaagcgtcaacaagtgcaagagatatctaagttcagcaattatttcgggtccctttagttgctgactgtctttcccaccaaagacactcccaacatgtaaatgaccctgaaaacgaaaaagtgatttaagtcaattctcttcaagatttatgctaaaacctgccagcgaatacaactaaaagcattagtttttttacctgcctctttagaaggaaactgatcccaaatgccaaatccccaattggccacttccctaaggtttcagaataagtaaacctcagtgtctccgacaaggttgaaatcgtctccaaccaagttgcaggggcctgaattaacctatttgaaacgcgttcaattcctatccggggatggttaggcaaactactttcaatctcatcatcatcttcttcagcagaaggtcccgactgtaatttacgattcaatgtataatataagagggcagctgcaccggcagccgtggccattgttgcagtcgccattagcttcaccttcctatcaaaaagagaataatctaatattcaagacacttaaaagaatcaacttcaatttattttctgacattgtacataaagattccaatacaaataacttcttagcttaatgggtaggcagcataacaaagagttagttttttctatccaaacttaaagcttgaaaattctatttcctctactcgtttatgcttcataataacactaaagaaaacaaaagagtaacaaaagcctcctcttttccttcaaaaatcaaagaaattcgactaaaaattcatacaagtggaacgaaaacagagaagaaattaaaacagaaccaaaacagctcaaatggataaccctaaaaatccccaaatgctaaagagtaacaaaatccaacaaacctgaattgaatactaataggagtctgccaaattgaatatgaggcgcgaggaaccgaagaagagaggtttaatggaagttagtgaagatagagtttgattagggaggaagcaaaacgccgccttcaacgtaattttgtgctttttgtatattaataattaataattaatattaaaatacgcgtatgatgagacacgtggcgataagttagtgtagaaagtagcgggaaccgacctctactgctctgcctgtttggtgaggtgtggttctagatctactgactaactactactatttatttttgcttagtttttcactacactttgtgaaattattaacgttgttttatcatatatatatatatacaaacaggtgctgatggtgctgatgatattcaatactaaatttatgttttcatttttcccttttaaagaatctgtcaaggttggagttagatgaatatcgattataataaaggcccaacattgtgactaactgtaatgaacacgcttggtcaattagtgaattatgtacggccaagtatccagtccacccatctagatagagtttcctttcttatctcaagttcttttatcttaggccaataattttattctcagacttcctaacacctatctaaatagatcattttgtagcagacttaccattttctaaatctaaattcattgagtatttaatgacattcatattccatacaaaatactactcttttacaattttatatccaccagatggtggtaacaacaaggacaattgtactatcccataaaataattttcaataacttgttgggaataattaattttacaggagctagaaaagaaatgaaatcatttaaaaaaaaaaaaatccaacttttcctcaaaagagaatcagatatgtgaagattcaatcaggctctcgcttatagctgtcaggtgttcgtcaatttcctctgtggataacactctaaacaccgggttgtcctgcttcacaactcccacctacaatttaaataagaacaatcaattcaaactttattttttatcaaaagtcaaagcatagattctgaatgcaatatggaccccctcagcaaaataattaaagcccaaaaatgaattgcaagcgtgaaaatactaacataaaaccacagtattagaccatgccaataaaaaacaaaggcgatggaaccagaataaatgcaacaaggactagaaattctcaagtcaaaaaatactaatggcagtatctgactagagaacaaacataagaataagatagtatgatcaaaagaggaaaaagagaaagaatgcaaaagttggtgagtgattaaagatttgacgaaggtaatctcagcattgtgttcagaattacatttttaacggaaaaagaaaaaggaatgccatgcacaatagatctcaattagatatgagacgttcaagtaccatcactaccacgtcaagcaaagataaaatcagaaaggaaatccagatgaggaaaaaatgaatgaaaaatcaaaagttacaaacattatttagtttcaacttagctgctgtaatccatcacaaattcacaatgtcaagttaccaatcccatcataataaaacaatgaaattttagcaaaatgaactttaatacctcaatctcagaggccttgaaatcctcctgcagaactgattgcagtacagaaatggcagtctacaaaattaacgtcatgattccagtagttagacacaatacaattctatagatatagagatgctgattttgttgacaaactgcataatcatgttgctacatgtagcacagaaaatactaccactgccatggcctgcgagcaatttggaaaagaataaagaattcacaacttttcatagctaggaatgctctgaagtcctaaaattagaatctaaaagatctccattgtgtaattttttaatagcaagcaaccatagctgaaatggtcagcatgtggtttgctcccaaaaagtttaaaatacccctgcataactacaaaacaattgctaaaataatgagttaggctaggagcccaatgtcagaaagcaaattatacacaatccataaagggaagtacaaataataattaacacataatgtttacctgtatgctttcctcatatgtaaaatcaggattgttcttcatttttttctccaagaagttgattacctcttgttcttttaatcctgaacttgtggcctaaagtacaaagtaatgaaactccagtaataagaattacatatatttgataatccacacataaaaagggaatgactgaacaaaacaatgaaaggaaaagaaagttctccacttccctttcctagtacagaaacacataaataagtgctgaaaacttatgacaatgtaccttgtggccgaagaaatgaccagctgggtcacatttgtacaggcaaggtccaaactcatcgtcaaaccccaaaaccattgcaaattcccaaatcaagcagaaatcacaagaaaataaataaataaaaatcagtcacaatatataaataatatatctctattactaaatctaaaaaacatttactcttttttttcctattatataataagaaatttttagaagtaacttacattacgaactaacctactccaagtggtctcatgtaagcatgttgagtatacacttgtgatttgtctgcaatcctattcacaacaaatagtacagcacatgaggcagagaatcacaaatacactccagctaaaataaataaatatgtagcaaaccccttttggaatttggagtgtatcattctagaaatctactcggggaagaaaaatgaaactactataatgtcataccatagtagagtagaaaaaatgaattaccattgagccaatacatttactggcatttcataaccatatctgaagcgaaactcagctgcttcatttcttgcttgtgataccaaggttcttgcatcagctggaaaatgaaaagtcagaaagataaatcaaagtaacaaaagtcagtatacaaggtatgttgtgggatactgtctcacgtggaataaatggtaaaatattgagttatttataataagaagataggttactccatttatcaccaatcggtattaaaatgaaattccataattctcaacaaggtacatctagggaaataaaaaacagcagaactacaagcaagataaagcttaagaagatgccatcaatcgtaataacaaattttcaacaaaaatcacaaaattaccagaggttcaaatctataattacagggaccttcttctgagtgacaacaaaaactaaatcttttccgcagacacctattgaggtgatcccagcagccttaacagccttgaaagcatattctacacagccttaacgtctgtaaaggctaccataaataagctagcgtaattactaacaaataattcattttacattattaaaatcatcgaaattcagcaaatacaatgtagatgtttctaatttgatcattctttttgcaaaaacaatgacaagaaatttagtaaaaagctgacttgtttcaaacttataatctctacttaggtaaaagatacgactgattcctcaaccgttgttaaccaaaataactagaacattcaatctggtgatcttctctctatcgctgaaataacactaatactcgga

SEQ ID NO: 19282 - DNA, 4578 bp, Cannabis sativa
ttattaaccataagatagcttctgtggtttataatttgtggcaggtgaggaatgaagcattataatttatatagcaaataaggcatacaatcaaaaagatacaacatgatgctttgactagactaataggaacactacctagcaaaatgtcaattgggaataagacttggtttgctgaaattgtaaaaaaaatataattaatatgggcgaataaatgtatagaatgatatataattgagtttgagtaataattcatgtttataaaaatttgattaaataatacaattgatcttattcatcaaaaaaaattaattattaattaattaatatttggagatcatttattagttaacaaaaatttatcttaataacaataatatatattttattaattgatgataaaatggaactttcctttttaatatataaatgttttgataaatatttaatgtcatatttatatttatgatgaatccttattttttattgaaaaaatatttaatatgtactataatgatatacactaatgttttaataagaaatataaattttcaaatatattatatttattaaaaaaaaactaataacgaattaacaagtttgaaaaagtcaaaactcattgggatataacaaatgtttagcacttaaagaaactcccaaatttttggatcaaagaaaatttataaccacttaaagtggaataataatataattatttggtaaaatcagaatcaaaattccataacttaatcatttagaattaggcttttgagattaagatatatattcttgatttgcatgggtgaagaagaaagaagaagaagaagattaagagatggactcatcaacattctcatcaatatcaagaggatcttctcttggagattcttcagaacttgatgcacatttaactctaagtgataagcttaagcccttcaaaacttctcatttcgatcctgatgcttacattacctctaaatgttacaccatgaatgaaaaggtacgtacgtactactcatcaatattaatttttatatacttttcttcttcttcttcctcacattttaatacatatatttatatatatatatatatatatataggagattaggcacttgagctctaacctggtggatttgaagaaagcttcggctgaggaaatgcgtaagagtgtttatgctaactatggagccttcattcggtaagaaattacacaaaatttaatactttctactctaagataaaattaaattttgggtcctataattgggtccattaggagaaaaattagaatatttgggccgtgtgtatttttaaagatttttttgtccttttgggccaagcccgctttagcatagagctaacattgatccccttcaacttcctaacttcctatgagatcattaggtcaatgatacttaactgtatagtttcttcatgatatgtgcgtttgaaaaaccataattagatttgtgtgtaattagaggtagttacataatttgacatatttgtttgaccatgtaattacactgtaactacactgtaactatgtaattgaaagtaattaaagggttctaattacactctataattcttatgacccccatgagaattgaatgtaattacactgtgtaattactaaaaactttctatattaaatattagctactaaaaaatattattttctcatgtaattattaactattttgccaaacaatatattaggaattcatatgtaattactatctcatatccaaacatacattgcattttaaaatatagtataattattaaactgtgtaattaccaccttagtaattatcctatctagtaattatacagttacttaatctttttccttgcagatcacgtgactctgactgtcacaattctttaccattatacttaacactatattaatatatttttgtattatttaaaactttattagtttatcaactatgccgtattatattaaattaattgaaaatataaaatataattttatataatattatataatacaacacgacttaataaggtgtactaaataaactcgtataagccaataatatattttttttcttcacaatttcggggtctgagcgttgatgattttcatacatgatagtttcttataaaaattcatttttattttgatgatatttttcagtacatcaaaggagatatctgatcttgaggggcaacttctttcgatgagaaatctcttatcaactcaagcagcttttgttcatagtttagctgaaggagttggtcttgattcactatcaagtgatgaagaagattcatgtttagaagatcatacatctcagcaaaacatacacctttcaaagatggagaattggcttgtagagtttctcgacaccctcgaggttctcttagccgaaaaaagagtagacgaagctttagccgccttagacgaaggagaaaaaatagtagaagaagccaaccaaagaaaatcccttaacacatcttcactcttgtcattccaaatcgcaataaccgaacaaagacagaaactagctgatcaactagccgaaaccatgagcctaagttcaattcgcggtgttgaattgcgctcagctgttttagccttaaaaaaactcggggatggtcctcgagctcacacattacttctcaattctcatcaacaaaggctccacacaagcattcagagctttcgctcctcaaatgcattgtgtggaagagcttacacaactactatttcgcagcttgtgttctcaactattgctcaagctgttaatgactctatgttggctttcggggaagaacccgcttactcgtctgagctagttacttggacagtaaaacaaaccgaaactctagctcttcatcttaagagacatgttttggtatcttcagcagcatcagggagtttaagagtggctgcagagtgtgttcaagtgtgtttaggctattgttctttgttggaagctcgcgggctgtcgctttcgtctgtgttgttaaggctatttagaccctttattgagcagacatttagtgatagtttgaggaagattgagcagagcagtgctgctgttgctgctgctgatgattggtgtctggtttaccctgttggaactcgccctgttcttgggtcaaatgcttctcagcctaaactatcaagtagtgctcataaattcagttcaatggttcaggtgattgtttctttcttttgttatgataatgaaattcttagtgtgacagatttgtgaagtaaatgaatttttattttcaatgtttgtaaaataactaaaatatttttttgctactaaaaattgatgccaattgagaaaacagaattgcaagaagggttattgatgtagtaatcttcttaggttttgattttatacacttaattttcttttttttggggggcaaaactcctttaagcttattttgctttataaatttgagatgttaattaaatattgtcgttaagtactatttggatgatcattgtattggcttattgtgaatgggtccgtccctgcataggtgtgcacaatgatcatctaattgatatttaacgttaatatttaactagtacctcaaatttataatgaaaaataaacttaagagattttgccacaaaaaataaaaaaattcagtgtataaaaattaaaatataaaaataaaagaattaaatgtatatataatattacagaatagcttcaacttcaagtagtaataaacagttagggtaacaaaatttagctaaagagtataatgagagtaagttaaggcgagctagacccacacttagagccaccgaatcccaaaaaaaaaattatttcaaaaatacttatatttttattttagcaattttcaaatatactactttattttaaagagctcaataattttgttgttacacccaataaatctcagggcagcccagaataatagtttctcagtagaaaactcaactacataactcactcagggaacatcattaacaatgccaaattgctttaagctatgttctaatgctatcatttgtgaaatcaatttttccaaacataaaaaaacaaaaaagacaactaattatagatgtgtgtttttgtttaggactttgttgaagatacagggccacttgagagttttaaaatggataatctaacattagaaggaatgcttaaagtgttcaattcctatgtcaatttgcttataaatgcattgcccggttcaaccgaaaatgagaacttagaaggttttgggaacaaaattgtgaggatagccgaaaccgaagctcaacagattgcgttgctcgcgaatgcgtcgttgttagcggatgagatactcccccgagctgccttaaaacttatgccttttcaacaacaaaccaacaatagatcattggagactccgaggaaaggtcattctgataggcaaaatcgtgtccccgaacaaagggaaataaaaaggcgacttcaacgtgctgtggatcgccttcgtgacagcttttgtcgccaacatgcactcgatctcatctttactgaagacggcgaaactcaactttgtgcacaaatgtac

SEQ ID NO: 19283 - DNA, 2696 bp, Cannabis sativa
tatatatatatatcttataggtagtactgtttaaaagcgtttgacttaataaccatttagttaagaagcacatgattacttccttttctttacaaggtggcacaaacttcagtttcaagctaaaatcaagtgttttttaacttttgctgtagaaaaaaaaaatcaaattaaacattttctctaaaatttattgcactacctaatcgatcgtcattaattaatcccaagctagcagatcactaagaccattttatttgatttgatttttgtaacaaacaatataataatcatcaatatcggccggtaattttaggtgaattaattatttcttagtgtgacaacgtgattaaattttattaacatattttattttacgtacgtatgtactatatacttactatatgtatattatatatgttgagcagagtacaaatattacaagggtaaaaataaaagagattcttacaacaagaaaaatattatgtactcattttccaagaaatatcctctcttcaacaaccagccaaaaaaataagaaaaaagaaaagaaccaatgttacatgcataaaccttatttaacaaataatgcatgaaacttttgtctgtttcctttcttttataaaataaactaagttataatatgagaatgtaccatatttaactagcataggctcagaaaccagggtctgctctagttttaacttttggttttaatacaaacgataatatataatatatttgacgatggagttacatacatgcatgaacagagctattttaattaattaatttgtaataaaataaaatcctatattatccatttattaattaatttaaccagattcgaaatgtgtcgaaagtctttatccgaccaaccctgctgtcatcacattatatagtgtttataaaaatatataaaattaaataagaaacttcacccactgatctactgagcagccacatagtgaggtgattgttgttactgttacatatatttacgtcaaatatattttatagaaaaaaaaaggaagaagaaaaaaccatgcacgtaatttgttttttaatcctcagtatggtcatacctattacctaacaacagaaattaactctttgacatatatataataaacaatattaatgtgtaaaaaaagttaattaaaaaatttgtcacgggcgatgttaatatggatataacacatcacattcacacgtctccatgattattatatggctcataatttttaaaaaaataataataataattcgattaattttgtatagaaaaatagggatttgttcatttacttaaacatttcattttttttttcatcaatactgtaataaattggtataaattataaatatagtaaatatcctaatcacaatttcaaaccacaacttaattaaaattgcaatttaaatggcaactcaagttacaataatctaaattgcaacctaactcaattcgcaacccatattgtcacgttagcaactaaaatcacataaatttaagaaaaaaaaaaaaaagaagtgtgacctacatggtataattacccaaataaatattggagtgaatatatcaaattttttaatagaaattattaaaatgaaacaaagaagtctatggaggcaggcttcttatgggtccggtggtgtgattattcttaggatacttattatatgaaattaataataattatagctagtagctactactcactaaatatgatacatgcatatatttatatatatgtagatatagacgattgagagtgtatgtttcaaatgttaattgagtagattatacaaaattctgcgtacaaaataatattgacatatcaaaattgatcgatttaattagagtactcataattcatctcattttatatcaactagtgaattatatgttttatctaaaaacatcgttaatatacctttttctcctctctagtggttgaaagttttaactatttgtcaatatttttattaataactctcgtaaaattcaatcacaatcaattttattaattattatagggaattcgatcgaactactatggtgatctggttggaattacttggagcatcaaaagtctaatttctcacaattgtcacaagcgaagttagaaataaaataaagtgaaacaataacatatatttttatatcatgtcgatattttaagattttaattaaaattatagaattagatagggaaataaaatatatttaattatgtttaagtgatttttatgtaatgatatattttttttttttttaccttagatgttagttgttagctaggtagttcaaattccaacaataaaattttaattttttctttttaattttggtatatggagtgttgatatgttgaacttgtgaccttcttaaatttttaaaattataataccactacatcaaacaaacttactttatattgtatgttcagaaaagcttttgtatatagtaccccaaacaaatttatttagaccgaaactctaaatagattaatccaaataattttagctggattttgtatgtccaaaaaagtatttgtataaaacccaaaacaaatttatttagatctaaactttaaatagtttaagacggatacaaataatttcaactggggtggcctgctccacctagtctacacttagtttcgtccctattacacctagcttcttgtgctttc

SEQ ID NO: 19284 - DNA, 4154 bp, Cannabis sativa
agtattggaatgtcattccaataggatgtcctttccaccattttagtggaatgacttccattttgaaatggaaggaaagaccattctaatgtaacataagaacaaatttaatgatttttttatgaattttctttatgcattttaaattttattccatttcattcctattctcattcttattcctatgttttcattcttcccaaccaaacgcaacctaaatttttgtaaaataataaaattgttttattgtacttcatttagtactatataatcaaataatcaaatccaatccagaccaattcaatacggtcttaacaaataattcagacttatccaatccaatccatcttgttcgtcaaacaagcccttaagtataaagagcaacctcttgaaggtaagcaggaaaaataaagaaacaaaccttgttagatacagcttctttgagcttattgtaaaagaaggtattaaagaaatggcaatcgtgcattgcccggtttgttggagaagcatgttgctgtaggtacctagccaataatcgaacagttagaacatctccaagggtgcaccattccaccaaattggtgtggaaattttaaaccattttactccaagaatggtgtgcaccaaattacacaccattaatggtgttggattttgaatctacactaaattggtgcataactttttcttttcattccaacagttcttttaatttgttttaaaatattatcattaattatttgttgataatcataattatatcatgaattagttattattggttattaatcttaaataatataagatatgaagtcttttaagcaaaatatttttatttggtgtcatatttggatttggtgttgaattattggaattgttgcaccaaaagtaatagattctgcaccaaattggtaaaaaaatgtacaccaaaatggtgcaactgttggagatggtcttagtaaaatacgtagcaaaatgttaacaagagatctaataatatgcataatgctagcacgaaagcctcaaaaccatcatcaaacaaacagtgatcaagcccatgaagattatgtctataaacatttttactacgttcgcctacacaactatcagggaccgacaatactataacaaatcatatttaaatggaaaatagtgagtacttgaaaagaaggcaataaagaaaattaactatatgaaaaaaaaagaaagtttaccgcatataaaagctcatgatagttgatgccaagtagcattgaggagcaaggcagtcaaagtccgaataagaaatcacgtcacattctggatcatccctaaaagtatttacatgacaagaaacaaagaacaaaaaaacggataaatcatcaattaatataaatttcaagaatgtcacttgattcattctactaattgtaaaaaaccaacttcatatacctcgatgggtagtataccttcacctctctcatgctgaaagtttataaaaaagacaaatcgttactcacataaacgatcaatgcatattgtaggctgaagcatgtagacaaaaaaaaaggtacaaaaatagttacgattcatcaagtttctctatttcctgcattgtctcctgaggttgaggttcctcttcatcaagaacaatggtctgtccctggttgaataaggttaaggttaattagattaatcaacaaaaaaaagagagcctattatggatcagcactatttgattcttctctcctaccctgtggaaggagtagaagacagctacatttccattaatttggcagaaggattaaaaggaagaaaaaaaaaactccagaagtcaggaagccatttttcaagttagagaaatgtcgggcttcaaaagaaatatacccttctggtccttgtattataagaattcgagactggaaaaccatcattcctgtaaagaataaaacagcaaatggttattcagacaattaaaaaaaagtgcagtcagaattgcttaaagtacaaatcatatgacttagaattctacaaattcttcaatcattgaaagcagatgccttacttttctttcaatcctttatcttgagactggacgaaagaatctctgcttgtttgattaccatttgaaagaccaagattacctccttcagaagaaggattgccataaaaatttcttggcgagactcctgttgatgatcgattatgctcttgtttctgtgagaatgctttattgtttctcattctcctactgttgcatggacccaacaatgaaatctcattttcaaatgcattgcctgtcctagaatccgtctgtttaataaatgtacaacagcattaacaacacatggttgacagaaaatacatgttagatggaaaagaaagttaagcagcatacatggccgtccatcttctgaagaaaacgtgaagcaaatgtcttctcttgagatgttgcactgtcttttttgaagtcttcagaaccacctaaaaaaacgcatttacgaaatcaagatattagaatgcatgagacatgcttcacaatcaactacagacctaatcatagcctccatgttcacaatgttaattgatagaatctaataccctacaaaatgagcagagtactaaagtacttaaacaggtaaatcaaggttggtgatctaatacaattctccaaaaagttccataacagtcataaaacaacacaaaatatcatgaagtggaaattgttcaaaaatcataactgtcaagagattgaaaagttaccgaatgtctcactctcacccgcaacactagagcttaaagaccgtgcagggttctcaagttcattagattcctgttcaatggaaattaaagatactaagaattcaccataaaaaaacaatgcaaattttcaatttgaacattcacaactccagtagccagttaaccttgtaacattaaagtttgcagataaatcaattaaaattttcatatcaacaattctcatttgttctgacaaccaaatatctaaaagagagaaactccctactttccattctctttcaggccaagtttaaaaaatatgattagattgaataggattaaaaaaatatataaaagaaaaaacacatgaaaatgattgagataatcatcaacaatggaaaaatatatattacaagtatatatattaaccatgaaatacatgaagatgggataaaattatctcaacatttcaatgggattaagtccatactagaacatttaagttgttatactactttctccaacatcatcacatgttaaatattattctatatccaatttaattcactctccaaacagaacttcaaggttcatttcggattagtgtaactatggcctaaaagtgcaacttgcaaaagaaacccaaaactcaagcaatcaaacaatcaagttgtaagctttcttagaacatatgaagcaagttcaatcaaacccataatcaaatactcctaataaagctataaacttgttaccattattaattggctgagcccaaaattacttgaaacccctaatatctgaactttttttttttgaaaacccatttctttcatagacaaattattgacatttccagaaaaagtttgcattttttttcctcattccaaaataaagaaatcaaaatcaaaatcaaaatcaaaacctctaagtgaatggtctcaacccgtttccgtttccttcgttccctctcatcctcgagtgccttaagagaatttttcagcctttcccctttgtcgggcaacttgctggcgagtccattcttaatgttgatcgcagtactcctaatcctctcgttaagctcatgatcggtcaactgttcgtttgcttcgtgtcttcgatctgagctcatttccggcgaaggcctctgagccttggcgccggtgagggtttcggacttgaggatgactagaggtggcggttcgtcgtccttggtggagaagagctcattccagtcaaggttcagtggtttcttcttcttcgcttccacctcgtcttccatgcatagagagagaaagagagaacagaacactaaaatgggttcggccacactgaatcgcttccccctcctcctcgttgctctttgtgagctctttttctttggtaaatttgagtttctatcactgtgtgtcacaattaaaaattaatttttgttt

SEQ ID NO: 19285 - DNA, 4486 bp, Cannabis sativa
agagagagagagagacagagagatcagaatgagtttgttttattttctttaatttatgaaaacaatttgcttaaagcatttctagtaaaaggtggtcaaaagaccaatttgctcctagggccaatattccacttatagatcatttaaggaaaatttagaaatttcgttctatatagacattcagatattcctaaataaattatgttataacacaatcacacaatgtattaattttggatcttgaacccaattcgagcccaaaatatccggttgtgactataccgtgccaacttatcaaaaattacttgcattaaaataatataaccatactatataataatatagccattagcacaatatataataaaattgttattttacccctttcgggtcaaaattacaaaactaaccctaacccgtaagtggggtcttataaatgataaatttcaaataatttctatataattaattatataataatataattactcaattatagttaatttattttaattagggttgctaatctattaactaatctcaggatattacaataggtcaggctaaatatgacaacctaagaaagaagagataaaaaaggacacaaaacgagttgatgcatttgctaagtatcctggaaaggttatcctatctgacattaaagagaaataagttgaacaggtggttgatgttgcttcttcttcagtcattgctgttattgaaactagctcagaccagcttaaggaaaagatcattatgccagaaataaaagtccagacaatgatggagtttgggaagtacctaagaggaagagtggtcgtattcaaaagcgagtaaagaaataaattggtaatgaattcaatgttttacagaactatttacaatctattaatggagaaatgcaatctattgtgttggaacattagaggtttcaattaggggtgttcgtggtgcgggcagtgttggttgtgacctatttttcaaactaaatctcatatgcggttttttgtaatttctcaatcgcaaccgctccgcgagatcttaaaactgcaaaaaccacaccgtgaaaaatacagttcagtttgagcagtttacactattattattgtcaaacattataataaaaatttaaaaatcaatctaataaagttttaacaattcataaataaaaaattaaagttttaacatcattacatatataagtgggcctcgacattcagattcaatgttgagcttcaagcgtgcgacatgcccctatagtgttacgaggcacaacctgtttctagaaaattcttgggagctttcaaaagacatgggccgcaacatgctcttgcagtgtcgcggcccgcctgctttatgtgacaaattttagggttttaactctattgaaaagctatacaaaggaccctacacttttcaaagcaacaattattaagcatgaaaattggaagcaagaagtggctcgagagactttcaacaattatttttcgaagagttctttcttcttcttctctggttccttatgttctttattaattgtcatcagttatttacaatgaatatgagtattgttacgaaaaatatgaataatacgcaagtgcacgtaatcaagtagtactcacacaggtgaggtcgatcccacggggaattgaactgaataccattaaattagacttatgtttctatttggcaaaccaataattttgatggcaataaaattaagaaatacaataaaataaatttcagcaataaaagtatttaatcaaggatgaaaaattaggaaaaaaatcctattgacttaattacccaattgttaatgctaattactattctctttcttaatgtgaatgatagattaaagaattgacctaactctttttagattttttaggccctaaatcacatgttatctaatcatctctgaattagcctaacatataattagcattaagcaataatctcaatgtcactaaggctatgcaaatactttcgtttcatatcaaatctagttttccaattttagcattcctaattctcacttttcagattttgaattgagatcataaaacatgcaaaaggtgatcaatcttaaacattaattaaacacacacatggataaattcacacttaagaaaggagaaatagtaattgtcattaacttaagaaataatgtcaatcaacattcatcatctccttaaataggagtttagttcataaaatccataataacatctataatcaaatttaaaacagaaattaacatagaaatcaagagttaaggaaagaactagttggtgattgtgctccaggtcgccacaattgcttcctctgccttcttctttcacttttgggtctaatttctcactcttttccttctaaaatactagcccttaaatagaaattatggttgctacctttgattggtgaaagtccaaaactgcccaaaattttcgtgtttagtccatagtcgcgactacataaagcctagttgcaaccataggcaaaaaccaaaaatcatgcttttctgcatacgccttgtagtcgtgaccatagtcgcgaccgtgaaaaagggtcacgatcatggattgtggtggtcgcgactattgaagcatttttgttagcttcatcatatttttctccagtttacccgtcttttcaacaatttatagaatttaaactctaatgcctcggtgatttgaaacaaagaaatcaagcataaaaccattccaaaagattatattgacaaagaaaataactataaatttgacccggaacttaggctagaaatagcctatcaagtatttagactttcaattagggttgttaatggagattgtttgacactttattttagtttgacgtgattcaattcttttccaattttctttgtgtatctattttattcgtacttaatttcttttaattgtttggccatcaattaactgtttatgatatcaatacgaaatctcagaagtgagtattgattatgctatagtgaaatagacacagattttgatataggacgagagtacttatatggtttgtgtagcatttaagattttcatgcttaatgcttcctatttgttaaattaatcacagagtagaaaattttcatataagttgagatttatttgtcacagcctgaatataagtttctttagtaaattcgctatcacatgaaaattaaaatttaggaattgaattataccaaaccatatgaagtagattcaattgaaattaatcaccctaagctttaatcattgttaaattacacttgaatttatttgttttctttgtcaatagattttaaacatcttttcttatttttatcatcaaatagaattagaaattaaattgtttggtaattaattacagcccttgagggatcgacctcactctggtgggtctattacttataaacgatacgtatacttgcgtactaaaaaatccaataacaatcatatcggtatcctattaataattcatcgataacactgtaaaaaatacaccgactacatcaactgatccaaaagttcaaattatcacgaggaaattcacaaaatctagaaaaatcacgagaacaatgataaatctaattttttttttaaaaaacgtaccttttcactcagttcggtggttgttgtctcgacaatttgactgagaacgacttgtggagcagtggtggtgcacggatgtgtcgacttgctttcgcgggtttcgtggtggtgggttttttgatggagtttggtcgtggtggtgggtttcaactaggtcttgtcggaggttcgttgaaaaatgggtggagatggtggagagaagatggtgctctttgtcgtttgggtggatagcaagagcgagatagagagacagatagacagatagaaagaacaagagagaaaattgaaagcaagagcgagagagattgaatatggttgggtttgtagccgttatggggccgccatttgggtttggtggagagagaaatcacggggaagagaaaaagacagaaggggaaaattaaataaaaataacagtttgggtagtttgaaaaaatagtagtgttattttgtacaaattaatggaaaatttagattttgaaatgattgttcttttaagcatgcaaaataattttcccttttaaattacttttgacattccagatattcaacggaaagatcagccgacattgcccgctgtctgttgatcgaagtatgtcctcaacaaataattgccaaattatataagaattggtttgatatgaactctgtcttgctgcaatcaaattggatagtttgtagttagacaggaaagttgaggtgtactcattgacttgtgtggggtctcatagatctgcctccaatttaacttgcacctaacttcaatatttttttaaggtttgaatttgagttttcaaccactaataatactcatcaaactagtctttgtggccaagcataaatcattaaaacacaaatgattaatatat

SEQ ID NO: 19286 - DNA, 7401 bp, Cannabis sativa
  modified_base (6009)..(6009): a, c, t, g, unknown or other
  modified_base (6060)..(6061): a, c, t, g, unknown or other
  modified_base (6973)..(6977): a, c, t, g, unknown or other
atagaataaaaaatgtaaaggatgccacctaaactatttggtgctttcctttatatatatatattgatattgattaatagtcttcttttttctttgttaaaatttaaattatgtatgttatatatttttttctttttgctaaatatgtatattaaagatttcttcgtttagtataataaaaaaatcaatagagaatggtcaaaatgaacgaaagaagaagaaaaagaaatagaagttccattgatgacaatgacataagtagttaaataacaaattaatttataaattataattaaaaaaatattaaatattgtaaaatgaaaccaaacatagtaaagctcgagtcctgcaagtcaaaataatttttttattatataattaatttattctgttgagggttactattagtatttgtatatgagttgatgttggttagtgacatctcatttatgtaccaaaattacaagaggaaacaaataatcgaaagggactttggtcctctatttatttaaatttttgaatatctcacaaaacggctttgtgttataaatatttaagtttaatttttagttataaataaatatttaattttaatttttaacgataaaaataactaaattataattataaaactttttttgtaagtatctaactctcaaatattaagtaaattggtaatttttaattggttcaagttatgaattttttttattaaaaaaataatttaaatatattaataaaaatatatgtggataattatatataaaaatttagaaatataatttaaatattattattgtcaataattaaactaaagtatttatttgtaatggatagttaaatttaaatatttaaagtgtaaattattttatatttgagagtgagagaggaaaagactcatttgtcccctctcaagtttcattgtcatttggttagcattcacattggttttgattgattttcctccttgttttgttgtggatatcgcttaagtggttatttgtttattgagactttgcgcatagaaattgtcttaagtggccgaactacaccattggccgccattatggactctttgtagaattttggaaagacaatgacacgcaccactatgattgtcattaacatatttagacatacgatgtcaatcttattaaatttatattagattaatgagaaaggctaaaagtgctaccactcttaaaaagctcatatataattacagaaaatttgttaattatttataaaattcttaaaaaaataaatactaaagagcatctataatgcctagattaaaagattaatattacatactctctcaagttctcccaacacacataaatacaattgtatggcattagaaagaaatagtggttgctgccaaaaaaaaaaaaaaaagaagaagaagaaatggtggttacaatatttattatttctaaattaaaaaaattattaatcaaaaaaaaaaatgaaatttgagaactagaagattgacctgtgacagtttaaaaacactctaatttttttttctttttacattaattaaaaacaaatattttttcaaaataatttttttataataaaacagaaatatctataaattaaaatttaatcaccttaccaatattttaaaatttattaattaaataaggagtgagtaagtggcctaaatttaaaatattatgtataattatatttggtacactgtcgtcaagtaaaaaaaatagttacaactaaataaaaaaaaataatattttgtaatattaatttaagggtatagattataatattttaaagatattaagtgtttagcgtcgttatatttaaattattaataatgatgcaccataatatttgtaatttttgtatggattactacagggagtactgaaaatataaaaatgtgaagagttgatattatttttttaatcaaacaattttgggttcagaaatgaaaagagagatatgtgtgtgaatgtgattagttggataatgtgtgatctcgtctcggttttgactaaagtctactctacgcggcggaggaaaagtgattgcaaaccttttttttcttataagaaaagaaaagcaaaggacaaaaatatatggctgtaagggtttgaaaattatattaatctagccataatggtccttaataaaaataattatggctgcatgaattatttgttgaaaagcttaataaaaatatatattatataatattacaagaggtgtaaagtaaacacgatgtgaatgtgattatgtggaacatgtgatttggggtcttgtgttaaattagagtacgatgacccacccaaggaaattcttgaaacccataagaataagataaagttaggcctttacataataaatataaatgattggattggactctattccaaaactctacaaaaacacccacttgatggaaaaagagcataacttccttctcttttttcggattttaatacatatttctaattctatacacgtgtgtgtaaaataaatgtaaaaagagaaatgtttttgtagcggccaacattgggctaagcccaaaaataatggtcattttgaaggcacgcgccgtccaaaagtccgaaatagtattggaccacaacataggtaaggttcaagaaaataaattgggaattttcataaatataagaaaaaatattaaaatttacttttatataacataaaaaataatacaaaagggtgtgagactaaaaaacaaataaaatttaaaatatagaaaactaaacaaaaaaaattataaataaatattatcgaaaaaaatcactgaagcagacatcttcactaaaaaagttgtcgtagaagcattcatcatcgaagaagttactggaattatcattgtcgctaaaaaaattatcagaattgtcatcttcgtagaaaaatccgccagaattttcgtcgtcaccagagttagatattggatttggacattagaatatgagataaagaaaccgattatatttatcaactagttaaaaatttgagataaaaaaattgattccgtaaagcaaccaaaataaaaattaacaaacaaaaaccagttacataaaataaataatcaaaaaccgatttcttgaattaactcaatcaaactcgatttctgaaataactaaattgaaatctaatttattgaattaattaaatcaagaccggtttctaaaataaataacgtaagaactcttttttgaaatgactaaatcaaaaatcaactatgatacaacataaataaaatacaacacaatttttgtaactttctagcaactcatagtttgagtcaattttcaaatatgctcgccgaaaaaaaataatataaaatatgaaccggttaaaattaataaaaaatacaatatacaaacaaaaggagagtagttccaaaaatactaagacatatcatattaaacagttttgattccacaacaaaacaaataaaaataaataatacacaataactcaaaaatcagttataataaaatatatatatatagtaaaagccataccacatcataaaaattaacgtgcttcttaggagattccttgaaataggacatctgccctttaactaaacaaaaaatcaactaagatccaacacaaataaaatacaacacgatctttgcaacctactaacaaacctatagtttcagttaatctttaaatatgttagctgaaaaaataaaatatattaagaataagttaaattattaataaataaaaaaaaaaactatacacaagcaagatgaaatcaattccaaaatattaaaataaaaattaaaatagaaccggttccacaccaaaatgagtaaaaaaaataatacacaataactcaaaaaccagttataactaaaaaataagagtttttggtggctaagccctcccaactatcattttacttacatttaaccatcaaaacttaaatttggtggtgaaaccctttgaactgatgagccgttagcaaatttaaggtgtcttccatttaccatagttgattgccaacatgaattgcttatgtatttgtacacgtggcacatttaggttggcaccacaaaggactcatctccttgagtctgactagaagtgtcattacgtttgcgtcctcacaaagtattttcgtcttagcggctacctctaagaaccgttaaatatagtccttaaggggttcatcttcttgctgttaacatctaccaaatcattggactcgatttggcgctgttgcgaatgagcgaattggttgccaaaagcatcccctagatctttccataagttgattgatctagtgggaagcttgaggtaccaccgctaagctaagcatgtcagtgtagtaggaaaaattctggacttgacatcgtctcttactcttacagatcggtctgcacttttgagtaatagatatgagacgacgggtcttctttaccggcgtattaatgacaggaaggattcttgaacttcaaagggattggtagagctttgattcggtagagagtggtgagcatcgctctttgtcaagttcgatctctgacaactttggggctattattccttttattaaggttgctaggttgtcaaacttcatcttattaacaccatggatggtagcttgcatcccaattaaaacttcaattacctgatcagggttacctctagaagctcccgcttccaccaaccattttttggttatactgtcacacaggtcttttggatttccaagtcgatcatgaactccagaaaacttaggtctgttattgtttcttaaccacgaggtcatgaaggcaatattggtgatgtctttagaataaaattcgagtcatcttgggatgatacactgtgggagcaatcattcagagcatttgtagtggctacttcactcgaagtagtctccggctagatcacaagtatgaagagaattgaattgactgctcatgttcaactcctcttcttgtattcaagggaagtactaatattgctggccatcggggccacaggaaaagtgactgcacaactcacctctttcatctcagaaatactttcgagtatgaagtggctcattggtccttacttgtcggatgttatagccttcaatttcaaagtagagtctttgattttctcctttggtacgaatagcaggcctctttccctttgtatggtcttgaggtcgggcgtcattaattagagcgatgagaagaatctagtggagtagttttattggttctctcagtggtctatggtcgttgcacatcaggtggaggacctattggttgacgccttcgagcttgagccctttcagactcttgcccaaggtttacttgtctcagcacttgttgtttgtttagtacttgtattgtttgttaggatttatgccatgaaaagtctgtaaagacatttttgattataaataaaagttgaatattttcatatatacttgtttgtttaattattaatattcaatattgaataatttatatataaatatcaaaaaattcattttcatatatgagactgtgacttgtattgtacggagaattaagatcactcaaccatgaataaaacaatcagcaacatattaaagttatggaatcttaaatcaacgattactagtgcaattcactaatacccgttattcgttgccagtaatctcaattcggattactgatgtagtatgacatctaagtgaatgtgttatatataatagagattatatttgatatggattgatatgtaattaagttatctttatcaaatatgttgtttaccataaagacctaattcatatcataaagatgatcaatagtagatcggtctaaatcctgagtatttatgaactcgtgtttgtgttcattgagttctttgattcacttatcaaagtttctcagagaagatgattcttacaacttttgttttgagaatttaataatgtagatggctgagaacatgatttaattatgaaatcctcactttcctaatagattgaatgttggttccctttangtgttaattctagaactgaaaagttgtgcacaaatttagattggatctaannttatactttcactagtgaattaaatggtactaaaggataaagaagtaattataagggtaaaacaataatttaaccaaaactaattgtgaactaacacaagtagggctaatctctggaattggtcattgtagtaaaattcagtaaatataattctataattattaagagttcaattctatatttatagtggactagtaatgaaattaataaacaagattatttggttgatgagatttaataaataatctagtttattagagcttagaattataggtccatggtcctcaaatcgccaccttgaaacactatcaaggagtgagataaaagttgtatatggaagttagaaaaaatctattttgaattgtcaaaatagtaattattttattttataataaataatttattttaaaattaattaaataggaaaatgacaaaagttgctaggactaaaggcacattctctctcttaactaagacagaggagacacgacctacactatgtccagatatagtgtatgcgcattgtaaccctattagttttgtctttttgggtttattaattaattcaatagataaatatttaaatttaaaaataattgagatattctctcaactggttgataggtttcctcaatcagttataagatataaatatctataactgaatttcattatattatttattcaaataattaattaagatttaacgaaaattttgaatttaaataattaattaaatcaaacttttactgggtttatttaatatgccacataaaaaaattctatatagtttttgaaacagaagaatttgtacgtaacgtttctaaaagcctaaaaatgattaaccattagggtaaatggcgacaaaactcccaaaactttcattgtggtttcacttaacccccaaaaccnnnnnttgggcggtaaaacccccaatactcgtattatgttagcaatttaacacttccgtccattttaggtgttaagtgccatgttggactagacacgtgtacatctatgtggacataatgtatacatgacacaattttattggtccatgttaaaaattatttaaaaaattaaaaataaaattaatttaaaattataaattataaataaaagaaatcaatttttttcttttaaaaaattaaaacaaaaaatctgtttcttttttctttttctttctttcccttttcctctcgcctgttcctctagtctttttttttttctttcctttgctttcttcttcttcttcattcctttcttctctctttcttttttccagattattttctcttcttcttcatttatcaccacaccactatccaccaccacccacc

SEQ ID NO: 19287 - DNA, 3105 bp, Cannabis sativa
gcaccctcaagtggttatgtggattagcattatatctctttctatttgtatttcactcatataataacaatgtgtcaatgtcacatctcatcattcaaatacttgaaatctaatagaagtccccaaagttaataacgtgcatattttaggaaaacttttaacatcgagaatcattcagaaaactcgatttgaatcaatcatagttcagaggcaaaaaatactatttattctttatggaaaaactaaaaacaataacataaaagcagaaatattataatattttataaataatgtgtcatttgagattagaagagaagagccccatctcacaaaagaagtttgctttcaaaaaatgaaagttcaaacccaaaaattacaatcttttatggccaaaaaagcccccacaaacaacctcaattatacacaactttttttcttttgttttttttatacaaattacaaatcaaaagggggccattgccacatgaaactcacctaatagaggggccaatagtccttgagaataacaaatcaaagaattgtataattgacctgtatatattataccagttcaaacaaatacaaagtgactcaactataaatatatatttatatatttatatatatataataaataaatattatgtcttgaaatctatatcttcatttgcccattatgcatatacagcataatttgatcctaaactaaccttttttcgccgattcttagggcaccgagtgtgtgtgtttgtgtgtgtgtctcgctgtacaaggtttctcaaacacgaataggaagcccgtaattaaggaatgtcctaatccgtccgtcccatccagccgttacaatcacattaccccacatgtgtggagagcccgacatactctgcaaggcgctcctcaagaacttgaacttagacgaacgcattgatggagaagaaaccgccattggatttgagttgacaagtttttcttcgggccaagttgctgttccttttggcaaggactctaaaaacccgcttaaggagaaacaatcaggcgacgagagagacagtttctgtccccccgaatgatcgtcaaaccttggggttgggattatttcttggatacctttcgaaccacaccacggtattgcaattactgcattgtgagataggaaactctcagaagaccaattgcttttcgtgtgtgaagaagtcttgtcttggctagtgtaattccatatgtaaacatttgaatcctcggttgctgcaactatgtgtttcccgtctggggtgaaagaagccgacatatggcttgctccatttcgaatacctaatgattcgaaaaacaaaaaaggtttcacctttacatacataaagattgcatttttacataaaacttagaatcccgaataggcgaatttggcaacatacctttaaatttgcagattacattgttcttgcagagtattcggactaatgaatcagcagttgtgaccatgactttggttggatcactaggagtgaactgatcaaaaaggcaaaaaaatttactataatatgaacaaaaattaatagcttgttacttagcataacaaaaggttatataaatatgttcaacttaccttaaagccagttattctctttcctggagacttctttttcccttgtaaacaaatttgagtatcgaattcgagacgattatctacaaataaagttaatttgatcttaaaaaaggcaagaaacatcatagtcatgtcacgtcctatgatattcagaattacacaatttagtatgtttatctgaccgtgtaattacactctccaatactcataaccccatgcaaatcgagtgtaattaattactaacgatatgttttcacaaaccatatgcaactacacaaaatttgtaatatttacagatttcgggtttgggactgtatattcatacctatgatattgtagaaaagacaggttccagacatggagccaacaattccaccctgcgaaaatttcggtgacagtgttagatgatcaaaatccgtgaaaattgcagcttaaattgttactatttactacaaaccgacctttccatcaggtgaataagacactgcagtgactatttctcgaatatcaatgtaatcaacaaccctacagcgacgaacttcccatattcgaactttcccatctatcgaaccactgatgaaatagttatcatctatcgggttgaaatcaacacaagtgactgcatcaaaaacagtaggtttaaatttaataaataatcaacgagaaaccaaagcagtattgagcaaccgaaatctctaaggcagcaaaaagctcaccgaaattattatgacaaaagactctaagacatgtttcatatcccaattgccataatcgaacggtcttatcagtagacgatgatagcagaaactgcagggcaaaacagattaaaatcacatcagtatcgaaatgaaaacaattttcacataaaaccgagctgagaacaagatactaacccctttactcgaccacgaaagatccaagatgtcaccactatgtcctcgaaattcatgaagaggcttgtccaataaattgaatattttcggagggaaaatagcacaagctgaatcggacgatttcctcaattcgtttactttactatgtttcccattatcaacaacatccaaaggacataactttaaaacattatcaatagtgaaacattgtgaagaagaacaatcgccaacaatgtcaaatttgttcgatctctcatcttcgctaaccttccacactcgcacaataccatcttcacccgcacttgccaaataatgtccatcaagactgaacttcattgtcaaaatcgaaccttcatgagcttgaaactcttgtccagcaaacagcgaagaaagttccttgcttcgctttctatacagctgaacttgtaccttttgcaaccccatttccattgtagttgttgttgttccaataggacggggattcaaaaccccgagtccatttttatcaacaacacacattccaacaccaaattttcttaaccaacctctcttaatcgtcttcttaacatgaaaaaagtatctagcatcctcaacctctctctgcctcaa

SEQ ID NO: 19288 - DNA, 2891 bp, Cannabis sativa
attccatcataatggtattccaatggttttaaatgtaaccaaacaaagtaatggaatgaaaattattttttttccattctattccatttcattacctgcaaccaaacaccaattaaggtctatgagatgtttgacttgttcatggaatattgttggaggagaaatattgttcccatttgcaacaacacaacttctacatcgagccaaatgtgacttgtcacttaatgaaatttcatttccccatttaatttttatgggttccaaaagcaaaaaataaagtaataacaagggaggagggaagatgtgatgctggttgtgtttgtattcaatagaaattgtggttttggtggataaagaaaatgttataatacaaaagaatttatccacaccaatcactaccttgcattggagtgaagcagaagcaaaagcctaccactacattagaatctaaactgaggaagaaaaaaaaaacacagtctaacttcattggacaaaatccactctcccctaatttatcaccatcatcataactggtctactttcacaaactttccaaaagggagagagagaggatcttatcctgaaacttactcagtttgttactagaaaaactttcatttcttctatatttattcttccaggtacactgattcatctgggggtcattctactttgtgttgaatttatctggtgctgccatttatcaaaagaaaaaagctcaccattaaacactatggttgaatttcatcaagtaataaagtgcacggctttatgtcttttggttttgaatggcatcaaattgtcttggaaaataagagttaatagcgagaggaaaaagaatatgagttacctgagacgcgtatgatgaactttcagcgaggaacttaagaaactcttgcttctttctatcgaatttgagctttgaattgtctagtaaagtctgttctctcttaatatcttctgccatcttttccttctgccatttcaactccttgatttgcctctcggctccaagatagctatcgggtaggctcaaggccaccgatgacttagggaatctcacatttacatcttgcctgcatcaaaatgggttatgaagcaaaccatggctataaaatcatgataatgatagcaacatgcaaattggttatggaaaatgaggaggcagcaaaggctgtttttatttataaaacaaagactaacattcactcaggaagtgaaacttgaaattttatcaagtacaggtttgaagagatccagtcatactgagattcaacaaaacacgcgcatgattatttcatttcagtgccattgacagaagttcttaccggtttccaagagagaagacaccagtggctttgattattcctccatctaaagaaagggctccatcacttatacaggggagtgcatttagcatgtccaccctggttttatatacttgcaaacgagagaaaagactataaaatagagtctcccgaaggccatgaccactggctgtaatataatataagtttgtggtatccacatttatcatatttacagcaaatccaaggaagccaggtggacactctccattaggcaatcttggctttagaaggtcaagcctcctttgagggtcatcaagtataaactcaccagcatatggtctgtggaaatagaaaacaaagaaatgtttgaataagaagcaaaaatgataaaagaaataattaatactagtcaagatttcctcatcaaaggcaatgcttaagactcgtgccttaaattttcaagacaaataacaacaaatcgtccttccaaagccctcccaatagaagcaccgagcccatgaagaccagaatttttatcgatgcagccttcattattatatacttctagagctttgacaccttcagttgtcttacagacaattgccaacatagtctccattcccaggtactctgagaaaagcctacatttaaagtagaacaaaaaattgtcaaacatggtgacacctcaatgctgttcctctatcatttttccacttacaaagttttttttttagatatcccatccaaatttcatttcaatctagttagtaaagttacataaccataacaatagtttgaagtaaaccattaatgtatgactctcaactgggaaggaagatgcagatagaaatttgcaaagtcactttacctactaaggttatcatcatccactttgcccagtgtagcaacaatacccactacatccttggtcattgtaagattagagacctgagtgccatgacgagctttcagcaggcataaaatgcctgcagcagatctttcatgctgtagaatctgcccacatatctcctcctcattttgaaggtgggaatggtcctcgttttcaatctttgttgcagaagaatggtacttgcctaaagtaactgaggaacggagatttaagacgacgacaaaagcaaacaaaataaagaatagacgtgttttccaatggaccaccaagtgaagaaaaaaaaaaggttgctaagcgtattcttaaaagggtatatgtaacttttcaagaaaaagaaaacatcagttgatgtatacaccagttatgaaattatttctttaagcttccaaaattcaagaacttcattaaaaattatctaccaggctaacccttccttcatagttgagaaactatatacagtttacgcacatgatgcagaaacagaccctacaaacagaatataaaatgggtagcagattacagccaatttcataccttgcagatcaagaattgagtcatcaaatttgcttttctgggatttcagaaactttatgctgtcctcatgctgcttgattttcattccaatgatatgaagatcatcttgaagtttctgcagagatgagtgattattg

SEQ ID NO: 19289 - DNA, 5083 bp, Cannabis sativa
ctatctttatgttgcacttttggtctttctggggctttttctctgtgcttttctcaaatattttatcttggctgaacccttcctcagattcaaccaatctaataatcaactgggcaagagggttttttctacagttgttcaccgtttttacgtggattacattttgtttcttgggatctcatttgcattcacattttctctgcagatctcattgaattcaagaaaactcagaaatggtaatagggattttttatcaattattctttagttaatttgaataatgtgttttgtttaattgcttatttgaatttgcttgtacttggtgtttcagtctgcgcttttcaattttcattcatttttgacggtggtgctcttggtaatctgcacttgcactttcttgaagatgcagtttcctgccattctcgagcaaaaaactgggtttgttcttaactcgttctttcgtatgatgggcttctcattattctttgtatcatgttttcgcttttgggtatgattgcttgtgattttgtttagccagttcccaccagtaatatggtgcttatggaaagtttcataacgtttagaaaatgcagttcagagatgagcagggtgttaacatttacatatttacatatttattgattacattgcaaggaattggtgaagttcatgcatattataaagaaaaaaattgtactaattaacaacataatgtccaattcaatatattgtgtattgttgcccaatgtatgcttcgagttcgagaccagctctgagcaagacaattctccccatatataatatcgtagtttgcattaatcatgatatgtgtaaggtttggagtttggaatgtagggatgagatgtgtagtattgatttgtgttttcaccatgtaaaagtttatatgggctgagaatttctcctttgccattataaatcacaataagtacattatatagggtactacggattattttatgttaggctctcctatatataatatataattttttttgtgattggggaaataggagatgaggaagcgatgattatatgcttaatttcattgtgaaaaaaagaagtgaataattaggcttgtgctttgtttgcttcattgaatatttgattcaattattcagagttagtttcctaatcctacctagttaactacaaatatgccgggagccgggggccctaggccaattatattttgcactacaagtgtttgcttgcattattagatctgtggtttgacctagctaattttctgatttatgtctttatgtctttttggcaggtttcggggattcttttggaaggcagcaagaataggttggtaataaagtattttgtttcaaaattttcttcatattgcatatcacacctaatacttgaactcaaaataatgcttggaagaacggggaagcttttgtgagtagaaagatagaaagctttattttctaggttataacttatgttcgcaaaatgctgtcaaataagcttggcctaacaaactctgtgtggaggctgcttgataaagttctgtagtttgaaagttggtttcttttcggttttccaaatgcagtactaatggctgagattatttagaaaatgagcttagaatattaagagctagttaatgacacctggttagtatgtgatcagatcaaactagcaaaaaacttcataacttcaagtgttcgagttttgcatcattcagtcttcttttttcctgatacaggtgaacggttgagcccttgggttgctgttggatgtttctcaatgggtgtttcaatcatatttttctaggtagagatcgccttacgccttgtgttttaaccattcaagtcactgattgaaccctctgtctgtaagactttttatattgtagtaatgaaaagttgttgtcatttttttttaattattggtatttcatcttcattatttttcattccttccactccatgaggtggaaagaaatagagctattataatcaagtttcagagtagtttgaatatattcatttgggtttttcatctttttgaagatttaggagaacttttacacttataaatgtaaattgtgttgcatgaaatgttgaaaatagagctaaacattcaaactacacataaataattccagagtagttgaattgaatgtattcattgattcatttggttttgcaagggtgtgtctcttaaattgaatggcatgtaattaactcataagatcataaaatcattctacttaatgtcaattattttctagatccaacccccataaatgttaccaataccatactaaaattttatactatttaactatcttctattcttatgaacattttacatccaacaagtataagaatatcaacacttcactttctatctgctataacccacttacaatactttaaagactaattagaatttttcctctcgaattattattactaccaaatcgtgtcttctaattttcttcatccattaaatttttttctcaaatcattaacattgttgatttaccacttcaagtcttaattgggtccttatacccacataatgattttatacgcgagtacgtccctttggctgcttcatggaatgacgacagatcctacaaaccaatacgagtgttttcagcatactttgtcttcacacagacacaatctgagaaaatttcttaggaggtcacctattttgaaattatcccaagtgaagcatgtttaatcgtggagttcttttgtaatgagctatcaaaaaataagatgtactttgttgatataggtaatactaatcaatccattcaagtcctcttcaactgtgtagtcctatacatacaccgtttcagaatcatcacatgaccttcctctcgatctccctttcaaattacgggactctgactgtcacagttaaaatataatattattctgtttattaccaattgttttaaattagataccaatattttacgctataataatatttagcaacaaagcgcgaacaattcaatacatgcacacaaccatccattcatgtcggccttagtagtagtagtagtagtatttgagactaacactactaaacattaaaatgtacaaatttggctatgtgtgtaaaacataatcttaattaaaccccagccacaaatttgtgtgggtgtagggaaatgttaatggttggcagtaagggtgggtagcaaagctcaacacgactccctctagctatttgtgtagtttgtcttatataataatataatgggtccaattccatatccatatttcatatttccatacctgcatttctctccttgtgtttttaacgtcaccatatacgtattggcacacaccctttttcaatcaagacaaaaaaatataagaaagaaaaaaactttgtccataaccacaacaatggtatttgaaaaatgaatatgttttttaaaagtaatttccggcgtaaatatctaagtttaactttcagttgcagataaatatttaagtttgttttagataaatagtagcataagtactcaaaattttatgtttgacagcggtataagctcaatgtttatttttagtagcataagtatctaatatttgcaaaattgtaatttattcttagtttcgtcagtatagatttcgatttgaatttattaaaagaacatttgaaagaaactgatactacaagtttttgtctaaatctaatgatctagaatttggaccttatacatgcaatgtttgagataataacaaactttgtactcacgaaattatagaaaaactaaagtacaaacattaggtatttatgccgataaaagtaaatattagatttatgtcatttacaaaattaaaattttgagtatttatgccactaaataaaattaaaatataatgatcttgaccaattagagacttacacgtgattattgacttgacacttactagtcaagtatctacaaaagttttaaaaatataacttaaatattattaccatataaaattaaacttaaaagtttatctacagttaaaaattaaaattaagtatttattctgtaattttttttattaatccttttattagaagatgaaactataaatatatgttgtccattgtgtctttttcagttgttatatatatcatctcatcaactttactttgacaagtctattattgttgttgttttcttcttcttctctttaatgttttagtgttttttttttttttttccgatttcattctaaatttattttaagtattactttcacattaagcaacaacactagtatacaataatactagatatggagaaaatattttgtcccattttatattaggcattaggaaaaataaataaatttgagcacttattcaaaaaataaataatattttaaaaatcactaaaaaaataaataatttattggagctcttaaattgggtgagtcttaaactcaaacataatctattttaatttacgttcgaccctgatatataatatatttatttttaaaatcgttaaattaataattaaattgatccaacaactttaattattagaaattaaaattcataataaaacttgtaatgtataacaaaaatacattaggtttggtttttggaagacaaaatctattacctattaatattaaaagtcaactaacacaaacttcaatgtgtagtagtactattcatctaaaaccaaactttcttctttagttcattacaaaataaaaattaaggaagaaaaaaaaaagtcagaagtcatcatattgtaatcattaccatatcttctaaaacaaaaaggtctcttttaagctttaattacacgaaaaagaagaatattagtaagaagagaattcttaaaaaatattattgctactaagtatttttttcggtgttatattattattagtgtaattaaatatgtatttcatataatttaataaaataatttttagaaaatatggtcaataaattatgagacatcacttataaaaagtgttgagaatcactgatacctaataacaattctcttgtaagaatcttaattattaatttttaaatatattatatcaaattattatat

SEQ ID NO: 19290 - DNA, 3333 bp, Cannabis sativa
  modified_base (1248)..(1264): a, c, t, g, unknown or other
attgtaagaatttgattgctgattttgttgatgtttcttttaattttgttaagcggtctgctaataaggttgcgaatgctttggcgcgatcttctctttgtagggctgaccgtatttttagtgaggataccctactttttgtagttgcatcttagttttggatgatttgagataatgaatttaagcattattcaaaaaaaaaaatattcaaagtgatgtaaagtattatattattattggtgtaataaagtattgttaaattaaatatagttggacttgttaggcaaataaatctttagaaatatatgcgatgagactattattcttatcaacaatattttttcaacaatacttccaacaaattaatatttttttatagtatttaacaattaaatttaaatccattccataagaaaaaaaatggttataattttgataccatgaaaaaaagtcaattaattttacacttttatcacttttttatttgtattatttggaattgattatccaattttaaataattaaattagattgattcatgtaattgaatttatttaaatctagctcactcattactaatcatctttaattttcaaatatgtccaacaaaaccaaataacattaatgacatgtttacttaaagagaatggaagagaaaaagtagtaaaacccacacaaatttatataattattcctataaatttgatacaatattaatgtttttataaaaaatataaaacaattataattttattactaaaaaaagtagaattaatcgaggaatacctcttttttgtatctattaatcaaaaatactcttatataatattttattaaaatatgcatacttttatgagtgagttgcacaatataaccccactctctacttaaatttaacatataatttacattaacttaaggggtgtaatgaagacattatctacaaaagtgggtatatcttaaataatataaaaatgaaggtgaaaattgaaataagtaaaataaaatgggtatacaatgtaatttcctcaagaaaagtcaaccctacgagtaatttggcctttagttaaggcttatattattatgggtgttcatcaaactcctcaaactgccccaccgtaaaaaaaatacggtttaaaattctttggtcacggtttgaatttttcttaaaccgcgcggtgcggttttgaattgttaatatgcgattcaaatcgcacctcactacacattataaaaatactaattttnnnnnnnnnnnnnnnnnaatatgtgaatgtccaacccaaaacccattaattattgcattcttgaaactttttttttatatatatttattttcaagctttatggtattttttataagtgttgcttaagttttgttgtatttgtgatagtttaattattggtgatagtccaaactaaaaactacatcgcatcatttttgcggtacgatttttgctgttttttagttttgtggtgcggatgaggtttgggaaattagaaaaatcgaatgtgcaattggtttgaaaaaaggtcgaaagccgtaccactcgcaccgcccgcactgcaaacatctctacatagtacatactatattattgtgtttcaaatttagtaccatttttgttaagtgttaaatttaatataatttttagaactatattttatctatatatcactaatttgtagattatcttaccataatacacttcattctatatccgtaattaagagaaatatttcaagagcttaacatgaaaaaaagaattaaaggagataaaatcttataagataatctaataatattttaaatatatataattaatttaaaaatattacatcacatagtacaatttatagaaaataataaatacataatcaaaataaatattctataaccaaaataaaaaatattaccgtggtaaaaataaaaccatagtaaaagttaatctaagtagattttggatcctcattggttaaagtatatatataaggattaaatttctgttgttctaaataaatattaacaactgtaaattttaaaaaaatacaatttagtagtgatataagttcaataaacaaaaaaatattaattattctaatatttatttgtttgaaaagtctgtcctaagagtaaatggaccttaagaaaaaaaattaattcttaagcaccaaaaactaattataaggcacttttttggaccttaggtaggtggatcctagcgtgacctactttaagacatatttacttaaagtgaatggaaattaatagtatgatattaattctcgtacaattgtttactaaaatctcgaaatgaagaaagtagtagggcccacacaaattaggagaaataaagagaaaggttctctcccgtttttatcggaaatacctttttcttttcctaatttattttattttaattttattaattaaaaataaaaaaataaaaatataccctttaaaaatctataaacaaaaaatagttacatattctaacaatgacaattttgtcaaattaaagtattttaattactttttttagctatgtaaataaaataatatgattttagttttcttttcggataccttagtaaacagcataataaaatattattttcaattatttaataatttttaaccgtttcatttctcctattgattattctcattccaattataatttagtaaacgcgccattagtccagagtcaatcgtagtcatgttgtattgtgtactaaatttagtacaacttttattacttgttaaatttgacatattttttgatacactattggaactaattttttaccaaatggactatattttaacagcatatcactaatttgtatctccatcctagggatgcacatttcttccacggggatggggccccgcctaaatagggaatggggcggggacggggattacactccctgtaccgacagggactcgtttagtattttatcttatatttctagtaatattttataatttatgtttgtattttttagtatattagtatattttttttatggattttaagttgtattttggataataattagtttattgaataataattaatgtgtaatattttaatttttttgtagtttaatatttttgtatattcaaatttttattataaactttatttttctattaggggattcctcgcctcgtcccagcccccattagaggattccccgtcccatccccaatgaagaatatgcggggataaggactaaaatccttaacggggatggggacagggggagtactccttgccaattccccgcccatttacatctctactccatcctctcagtatacac

SEQ ID NO: 19291 - DNA, 3067 bp, Cannabis sativa
tactaccctagtaattaccctacttattaattacacagttacttccaaacatacctaaaagttttatattggctaaaagagaaatactacagatagtaccaaacaacatctaaaatatcatattgttattaatataatttattattaaatcttacatattttaataataatatattaggtatcaagttatactaaattgcaattttgtagagaatttttttaataattttaattttctccttatttttgtccctatgaatttatactttttaatttttattttttatgtttatcctcataaaatatacattttcagttatatatatttttatctctataaatttataaatttttatctctatgaaatttataaaatttttatccaacaaaattaatatttttcatacatatccgatttcaaaaaagaaaaatgttttgcccctcctaagataagctattatttaagtacatatattttgtgtacacgtattaccaatctattatcaattatattaaatcattagtctactttggcttctccatgcacaattgagtccaataattcaaataaaataaaaaatagagttgggctaggctagcttgaccttctccaaagtgaggtgtttgccatgtgtattacatgtgaaaaataattcagtgaacaatttcataacaaaatagacacccccaccttattatgaattgctaaaagatactattggtactaacactctcctcagcgttatattgttattgatgtatttaagtatcagatctcatatataaaataaattttaaaaaaaaatatcgctaaccaattctaagacgctaccttttaaaaaagcaatgctttcttattatgtctcgtgaccacttttacttataacccaaaaaagtttcaatctttacacaaaagaacgtgtgagttgtgaattccatatataccatcatcaaaccaagtaataaatctccaattaactgtcaaaacaaaataaaaatccaatctttatctcaattccataaaagggtatatactatatactcatgtttttttgtatttatcttgtctttcttcaaaagtcaattccctcataaaaaaatatgaacttgattacaaaaccaacatgggttttgtccttcttcttcttgttcttcttctccaccatggtttcaattactatctcatattgtgttagtgaagataataataatttatgttgtaataataatgtgtatgaagggagttgggttttggatgattcatatcctctttatgactctaaaacttgtcctttcattagaaaagaatttgattgtcaaaagtatggtcgaccagatcatatttatctcaaatacagatggcaacccaatgattgtgacttgccaaggtcagtcatttattctcatcatcatcatcatcattatttctcaccaaaccaaaattcactatctgggtttttctcaggtttgatggtggagattttttgaagatattaaaagggaaaaagattatgttcattggtgattcaattagtttagaccattttgaatcttttctgtgtttgattcattctgcaataccatttgattctgaaatcattcgtgaaactaatggttctgtttcttccatcatatttaaggtaagtgtttggggagttttatgttttgagtttctttgagtttcaatgataatgttttgactatgcaaaaggaaaatatttttgcaggattatgaagtttctgtgatgttatacagttctcattacttagttgatattgtagaggaggcgatcggtcgggttttgaaactcgattccttgaacggtggagatgtgtggaaagaaatggatgttttgatcttcaacacttggctttggtggtatagaagtggagaaactcaaccgtatgaatgaactctatgaactcgaaaaatataagcataagtatgttgtttttttctttgttatgaacttttttcggttgcagatgggattatgttcaagacggtgacatgatactcaaagatatggatcgaatggaggcatttcagaagggtttaacaacatgggcgaagtgggttaatacgagtgtcgatatagaaaagactagagtcatttttcaaggaattagtccttcacattacaagtaaagttttcttcacttcacttttttgtgttctgttttttttaaggtaaaaatctgttcttgattagattttttacctctttgtttgattagagggagtgaatggggtgagcctaaagtaacaaactgtgggaatgagacagaaccggtgagcggttcgatctacaatggccctttaccgaaagcattgtttgttcttacagatgtgttaaaccagatacaaaaaccagttcatttgcttaacataacaacattgtcacagcttagaaaagatgggcatcctagcaaatataatgcctttaagggtatggattgcacacattggtgtattgctggtgttcaagacacttggaatcaacttctatatgtagctatcaataattacaatattactatatcataaaagggttctctttttttctaattgaccactttttcaatacaagtactcttcaataagattatacattgtaatctcaattttgtttttacctattgctgattttaactaccgtccatgtacaatccatactaaatttaaccaactgccaatcctactttctctatgttcttgacagctcatttttgtttctgtaaagtttttcaatagcatgtttcagtcattttctctattaattacaatattactacattataaaagattgcaatgtataatattagttaatagagaattttttggtttgtctttccctactgctaactccaacaaccacccatatacaatttaggctaattagcaattttttatacttacatttggttacaaatttttttctaaacaaataataactaatatttgtacgatatatgacaacttttatgatattcctaaaatacctccatttacatcacccccatttataccatcggaccacccatcgggctacccatcggaccaccc

SEQ ID NO: 19292 - DNA, 2663 bp, Cannabis sativa
aaaaacaaacctaaattcatcactccaccttcatagacttattttcaacctccccagctcgtccaccccatctaacccacaatttcctgttcaccagcaccatggctcaccaatccctgcctcaccctcctcctctcgcccatctttcaaaccaaaatgtcagatttgatttcgtcttgctcatactgccaatgtgtgatatcgctgactaaatctccaataccaaccccaccccaccaactagaccttttagtgcatatctcactcatcagagtgctccactgctgttacccgctcctcctcattctagcagcataactaatcctactacccttaaatctcaaaaaatttggatctttgctcctctgtcgccttttgccaagatcattgggtgcaagtaggtctatcatatcaagctccatgcagatagatccgtgaatcggtataaagctcgtcttgtttccaaagggtgtcatcaaacttctggccttaattttcatgaaactttcaacccgattatcaagtctaacactattcgtttggttctcgcatttactgtctcctttcattggcctatccaacaacttgatatacaaaatatattcctccatggcatcttaaccgaaaacttttatatgtcgcagctttaaggattcgttgatccatcagcacctcatcatgtttgtaagttatctaagtcactttatattgtcttaagcaatctcctcaagcttggtttcttaagctcaccactgctttacttgattagggttttgtcgcatttaaagctgatagttcaatgttcatctaccaatctacctctactattatcattttgttggtttatgttgatgacattatccttaccaggtgttgctctcccactatggataatcttctcaagtaagggtggacatccgattcaatccaatctttttttctcatctgatctaatccaattagtaattgatttgaaaaatcatcatccaattcaatccaattggacctcaaaatctaatccaatccgatccaattactaattggatcggttttttaattggatatccaattacacacctaatttttaatattgacttaaaaaatatgaagataaatacataaaaactaattatcaccattaatttttaagtttagtactccataaaaatatcatttttacaagcgtaatgtaactaagcgtttgaaataactaaaacaataatatttctaagtaaaatataataaaatatcatgaaaataaatacatagaacaaccaagtgttacaaatttcacaaaaagaaatcactcaaaatataattattatatatattttcatttttttattagtttttattatataaaccaatataaataattttttaatatatataaatgtaattagattggatcagtttttaattaaattaattttgagattggcatccaataattgatctaatccaattaaaatccaacttttaacatccaatccaatccaattataattggatttccaattttttataattagattggattggatcagttcggttcggttcaattagattagattggatgttgcccatccctaatctcaagtagtatcttcgaactcattttgcggtttgggctttcctcatttttttttctaggtattcaagtcactcgcacctctgttggtctttatctttcccaaaccaaatacattcatgatttacttatcaagacatgtctattggactctaaaccagtcaatacacctctcacactcatcccaatttcaatattgtacttttactcaaattgatctcttttctagtcaacaaattataccaatttatgcatgctcatgcttccattaatcttcaggcagctaagtacgctcttcgatatctcaatagtatggcaaaccttcgtcttttcattcaacgggattcttctcttcatttacattgttttactaatgtcgattaggcatcttgtctcgatgatcgtcgtagtacgagtgcgtataccatcttttcttggcttgaatctcatctcctgatcctcctctaagcaaaggattatgtctcgatctagtacgaatattgtgctattgccaacgatgcttctgaaatttcttggcttgaatctcttattggtaaatttggcatcgcattacaggcttcccctaggcattgtgataacatcagtactctctatttggcatctaatcctgttcttcatgctcgcactaaacgcgttgaactcgattaccattttgttcgtgaacaagtgaaccatcgcttatctctctttcacgccctttgctgatcaagttgtcgactatcttacaaagcctcttccaacctctcagttttaagagttatgcactaaactcaccgtgctttcttactcgttgagtttgagggaggatgttaaacagtgatttatcaatgatcgttttagtatttacttttcttaatttgttgcttttctctagtatgttggatagctgtcctctcttccttttcggcccctttccctattcatgctagatacctttgtactgtgtgttttagtacatttttgcaattcaataatatattttgacccgaagatgtcactacaaaaatcagttacttttagtggcaacttttcaatcacaacataatttttt

SEQ ID NO: 19293 - DNA, 2179 bp, Cannabis sativa
aaaacgatcccacttgaaaaagctagctttacatatacaaagctataaccagaaaaatgtccttcctagttaaatcagacaggaaaaaaacaagaccaaaaacaaaaagcagttctagtcatatgtggtatatatatcctactactttttaatatatcctcggaaattgaaacaccccaactatgtttttttttttcttttttaacagtctcaggctgtctttttgtcgggtgatcagatcccgaggaagagagaaaaaggataataacccaagaaagggaagaaataacaaaagctgatcagaggaatggaagaaacgagaccaagtaggtttaaatataggatcaactaaaaaaccctaatgacacaaaaatacaaatcagacaaaaataataataataaagaatattaataatggattatatattgattaggaaaaagacaaaaggggggttatctaattaagtaactcatatataagctctcgttttcagagtaagctagattggtggcaaagatttggcgccaaaaaattataggtggcggattatttggtttaagggaagagaatattaaggatcaaaggaaagccaccgtctactgccacctccacccgccaccgatagagaccctaaatagtaataaaaatattatagctatatgatattattgacaacagtactatattgagagagagagagagagagagagagagaaagtttgataacggtggagtcagaatgaactaacggaacagaccaatcacagatcttaaaagcctccagaagaccccaaaaagaaactatatatattatattaacatttgggataataatattggtgtgggtgacgtaatggaacagccaacagagcccaaaaagctacacaaaaacactcatttcgatcgagctttaattttatattggtgggacctaacccttatatagctccttcgagccctcaaactccatctctctattaccctacccagttgcattgcaccatatgtcattccataaccttaactgtaataaaactaaagcgattgatgttattgctctaatatcttttaatgtgtgtgagtgaatgttctgtatggttattctgttggttcttgacacgtgtcattctgggtcatgctctttcttaattatggctaattagtagttattaattatatattaattattattgtacccacagagcaggttgttcagtgtacattttatgattactcctaaattatgtcttataactgaatttggtatggccccccttaaaagagtagtggttccatttcgttaattataacttgtttaatttcaattttttttttctatttttcatacacttatttcagtaataatgttgtaaaataacaaaattaagtaacgtaataaattctgatcatggttgaaagctagccctaacaccatgcatgtgagctatgttataatatcagatacatttaatttagtcagtacttgttgactttgttcaccttggtcgtattacggtattagaactaaaaattcatcaaagttgggttatgttatcaattaactctatatataaaataaataaaaaattataatattaaactttaccccaactcttaatcatataaatccctatgtctcattttcgttagtgcttcggttttgctcgtgacctatacgtttccattctcataatgattcactgtttatatatttatatacatacgtgagctgagtcgataccgttacggggctcaagccccgttttaacagctccttgttttttcgcaccccgttccgtcatggcttaaaggactttcgtaattgtaaccctaactgaaggggcaatattgagagataaaaacttcacaatgcttgtctcgttttacacgtggcattttaaggttggtccgttattttcatttgctgttacggtgttactcacgagggattacatgacgcggggcccacgtaactgaccaataagcctccagatagagacgatcctccaaatggtttggggctaaagctacaaacttgacaagccaagccgatgagccgagccgtaatagtagaaatgttttatggtttagtggaatgtgggacccagtacgcaagggaatgatggctctggggcatttgtctgtacgtggcggcttgcggtccggcgtgggctagcc

SEQ ID NO: 19294 - DNA, 5012 bp, Cannabis sativa
ttgtttttcaaaaataaattttttaaaaacaaaaattttacttttattttataattaaaaaattaaaaaacaaaagtattactaaacggcaccttaatttttttaactcaaactcaacaaataaattaacatataattttatttttacattctctaataattttaattataaaattataatatgtattcaatataattatgtttaaattttattatgattatattaacgtatttatatttttttggtatctaatcgtgtttgtaccacccaaactcgtgcagtgtccaaaaaacataactcctacctgtatttacaactttacttgaatctaataacaatatactatctcaataaatatatatatatatatatatattctttataaaatctccccttataaatatggtgggccgtactagcctctctgtactcatgtcctacctgagatggcgcatttgtttcctccctcccctcttttgtcctcccagctcttaaataatatctctttttcttaaagaaaatatcttttatatttataataaaaagaagtggagaaattggaaccttaaatttatttttaatatagaatattgcagcccacgacaaaactctcttgaatttcaagttgtgaacttgtgagcgagttatatacattattggccagttctgttttaagaataccatcaatgtccatcatatataattgattttctttttcttttttttttctttttggtgtgatttctttgatacaatactgttgtaatggtattatttatattttaagcatttttatttgttagatattctcacctcgtcaatctatcgaaagataatagaataatagaatatatgagatgaattggttattctctttattaatttttgaaataaaataaaactcatttactttatctatgagagtcagtcatcttaattggtaccttattccaaattctacaaggcaaaataaataaaataaaaccgctactactcccaaattctaacattattaagcactactcgtgcccaattctaaataccaataataacttgatggtgttgatcaaacacgaggactttgaacattttactgtattatatttcttactataaatattatgatatgtttgaagattagggttagtatacagtacataatcctatctttgtcacgtgacaacattgattcattactcaatatgtatgttccgtcacggtgtcaccaccaccaatggtaattgaaactttatatgttaaaatatattaattagaaaacgtagttaaattaattgaataagatatataatatgagagaagtgtactgctggtttgttgtgactcaggcttatttattttatactggtatctaagactaaagtcaacaaaatataggcattttaataataaaatttgaagcaaaaaggaaagaaagagggattgtaagttgtgatgaagagagactcatacgaacgacagactaccttcctctcaaattagctgagtcaggtcaccgaagctgacgagtgagattaatgtatggatttaattaaaaaagatattaatgtgtggatcgatcaaatgggccccagcccaatacgcatactttgattttgggcctatactgcgacgcgtgtcgtttaaacaaaataaataaataaaaaataatggaaagcgaaaaaagatcaaaaataaacaaagaaatggggaccacatctcgtgtgtggagacaaaaggtatctcttatctctgagtctttttgctttttgggtggggaccagtccattggctcgtgcaaccacgtgggggctacacaacttagaaaatccacgtgtcgattccttattcattcacaatcgttgcttactcctgaaaaattgagaagaaggtgacgatttttggagagtaaccatcttgtgctgcactggcacacactattatcgtggacgttgaaaaccccatgacctggtagaccccgccacgtgacatatctgaagctcacccaccacttgattttacctttctttatctcaaccaataaattaaaaatggaccaatgagggctaagatatttaaggtccaaatccaaaataaatataaatgaattaatgaaggtgaaatagaatataaatatagtggagaagaaaagggaagggcaggggaaaagggtgtgacacctgtccggggtccatccgaggaaggtcattttgtcgagtcgggaaaatccggaccatgtatttaggtaaatttgtccaaaactgtttttaatttaattacttaattttatattgccaaagtagaaaaaaaacttgtggttaatcatagacccacgtctaattaggtatcgttaacgactaaaaatagtacttaaaacaattttttaattgcaatcttggattaagactaggatctaattgtacatgtgataactgtgatgggaattggtcatatcttatatcaatcgactcagtcaaattttaagatttgatataatatatattaataatactaagtacttactttttaacagcacttcatgttttctaaagattttggccaattaaccctgttctgtaccttttatttgttagaatgtgaatgaatgctgctatctaaggtagagatttcaaaaaatggcgtttgagtcctttgaatggcttagccttaattggtcttttagggctcgtttggaatgccgtattaggtcgtaactatatgtggtattaaatttgatggacacttaaatatataatattttagtataaattaaagtttaacatagtattatataaaaatatgatatataatccaattcaatataatacaatacaagacaatacgacctaatacggcattccaaacgagctcttaatggacaaatataacataatttttttatacaaatgtactagtcaatgaaaacaaatatgagataagtggttatatactagcctggtgtaatttcaccttagggttctaagtttgaatttttctcaactcaatttttatttttgtcttttgaaaaaatattttatttttacatggaattttagaaaagtattaatatttaatttatattttttttctttatctcctcttttagttagtctatggtttgcaagaagatgatgatattctagcaaataatgtaggggaatttatatgagtactgttttttattatagtatcattttttttttttttttgatacgcttacaatttcttttttattatttatttttatacaccatgtatgctaaaaggagtataaaagtttttaaatccctctttttgctattttgtctgcttaggatgtgtttaatttttgtttctttgttttaaatatatttatttatttaaataattttattatgtatatttttaactaaaaaaaatacttttattattattttttttttaaaaaaatacagtaggatggaaaacttattaccacatatttttttttaattcctattaaattaataaaaaaaactatatcattataataaactataaaataacgataaacaacttgataacaactataaataaattataaaataataaaaaaaacaatttattgttttttctaaagaaatatttttataaataaaaaaagttcaaaaagtaaaaatgaaaatgtttttgttattgtaatttttttttttcaaattttgatctattatgtaaattttcaaatacatcaaataaattagtcataattaaaatttatcgatgcactcaattggatcaatattgacaataaattacataaataaacatactcttgttatttattctaagtcatatcatataattaatttattataagtcaattcaatctcaattttaaatggtataagctctaattgattgtattatttgagttatttttttttttttacttattcaccagtttaccttacatattagctcgtatttacatcttgaaaactaattggtacaactgaatgagagtgttaatcataaatataaatatctatagtttgagttaaaaaagtgaaacaataattttcttttaacttggttaaatatgcaaattaatagagtatttatttcaataattatatattagtttgttgaaatattatttataaagaactataaatatattttaataagataaaacataatgaagagtaaaatgatatttttagtctcaactcattgtaaagtactgcctatagagaatggattgataattatggttaaaaaatagaataactaattataacgtatatatattgctttactgggtgttctgtgaatttaagaatgccattttaatagttagtaattaatttatttgttatgtttacgataatttattgaaacttgattttatagacttatagtccccagagtattttggagaaaattatctggatagtctcaattaattagtttaagtatcaattagaattgtcaaaattaactcgtttgacaatttttattaagatgtgtaaattagagaaaaaaaaaaagaaaaatagaacaaatttattaattataataaattggagtcaaatatttaaataaaattacaatttataatgagttattattacaattgatttaagtatttaaatataacttattaattaattatggtaaaattaaaatagaattcttttcagatgtttatggagatctcattcatatttttttctctatatatttgtttgtatgatctgagatctcttattattattattatttaagaatatttgtgtttcaaatttcactttaaaaattttatttttgagtttaaaataattaaacttttatattttgagttggtttataattgacattactgttcatatgtgtcctttgagaatcgacgcaaaatattctattatacgttggttcgctaaattaacactaatattataagtgtcaatccaaaagggaaacttacaaaaatactggaattttggttaacttttacaaaaatactgtcatacggaaattttttcaaaaatactgt

SEQ ID NO: 19295 - DNA, 5025 bp, Cannabis sativa
  modified_base (4934)..(4936): a, c, t, g, unknown or other
  modified_base (4976)..(4982): a, c, t, g, unknown or other
ctttataccatggaatagatttgcaaaacatgtaatctatttaacctagaaaaatattaaattctatggagataacttaatttaagtaccaaatcaacaaaacatataattcatttagtctaagttttatctttcattataattaaaaatacttttgacattactattcattgtaaattatcacttgtttacccgcaaagtagtgaccgttaacttttagcgaaaagaagaccgttaaactaataatttacgttagacagccatatttaatataagaaatataaaaataaagaaaatagtcattttgcaaatttcaatatttgaggtggttatttccataattctcattctatggtacggctatcaccttataattttctagttatacataaaattacaaccttacccactagtactatttaaaacattatgaactctcttctatgtatcattgtctttgtcctcttcttatattacaacacaacaaagtactgtatcccataaactatctataatacacaaaatcaaatagtgaagaattattcttctgcatccaagcgatccaactccttctcccatttgaacccaaacatttgccgtccgaaaggaacaattaagttataccggaaaacctgcataattaattcaatcctcacatgaaaaatgattcatggcttaaacttatttctcatctaaaatagtaactagtcacaatatttctagtttcattacaagaatcttgtactttcaactttgtatgtgagccttataatatttatattctcatttttttttaatggaggaaggttaatcatctgttgttgtctctataaatcttctaacagaaactcaatgtagtatttcattaaatcttacacattaagagaaggatccaaacttcttaaattaattttacacttgaaaggcaactaaataatggcattgtatgagatgagaaaggctgaccttgttattgatgtcttttaattgcatctttaaagcctcagaagcttgaatccaattagagttatctgaataatctccaccagcatcaccattgttgcattttctagaagctttcttcaaagatgatctccactcacatatctgattcctgatctctttgttgagttcaacccattcaggagcacaattatttttggaaaggattctatacaaggtgtcctcagctgggtcagcatgaggattactactatcaagcttgagaggcttccctttccctgctaaattctcgaacccaccttcttccatcgaatgccatattctttgctccacaacatttattatgtcagtctctgacctgcccaatttcacaattacaacaaaataggactaaatcaaagaactagggtttctttatttacatctttgaaatccctaaatcgaatgaaaaagtgggtacagaactgaaagcagggcacggcacctgacggcgtttcgttgtccacgtagctcgggtgggagcttccgatcgttgacggcgtcaatcacgccggataatcggtccacaagtttcttctccggcttcgttgaattacttgatggaggtgatgatgatgatgatgaagaagatgaagctcgcctgaatgaggaaccgccgccatgggccgccgccgccgtaactgatgaagaggaatcgttagccgttgctctaagaagcagtgaggatgagaataatattcttggctttctggctatgaaggccgccatggctgagaagctgtaaatctaagtgttgaggttttccaaggatgaaggagcttagttgtatcatacaatccaggctaggcttttcccacgtgttctttttctactctatacgtggctattaggcttccacgtcattcatcaataaaattgattttttttacaaattttgagggttttttttttttttttttttgagtaatttatgttttttagatgaatttatctttaaaaaacaaacatatgatttggagattacaaataataatggaaaaaaagaaaatcattgataattatttttttttcaaatttttgttttttaattttctattcacatgctataatataggattaagaaaaataataagctgaaaaaataaagataaaattaaaactaaatggattctaattaataatatttattgataatgtttattgagatttttggaaacgagattaaataatagcttaaaaaattaaatagtgattatgtaaatgagatgaagatttttatgtagttcggacgttaattcttagtccaagagtcagtgtattgacctttttaagctttgaagcgtattacaagtgagttttacaataaggaaccctaacccttgctataaggtagtttctctaggtttttcttagagaagtagaaagcttagaataaaaccagcagagctttggctaaaaattcatcccgcttgcatgaaggagtagtagggtttatataggctagagttcgagtctaggcatacccgtgacctattcgggtttttgtaaaagcaagcccactaatgggataaaatacacaaatacatgactaagaggcccactgaggatattcagctcgtggggcaaaggtttcgtactaatgaggggaccgtttggtgcaggataagtgttgcgcggagagcatgcctggtagacaaagttgccaagggagtaggtggacaaaagggatatggtggtgcgcgcactagcatggtctgacacaggggatactatttgatcttgtgtcagagaggtggacacatcattctagggtagacatatggtactcacccagctgtagacatccggtactcgtcgtgtggtagacatccagatcctgatccgtgataggcttctgaggtcatcatgtggtaggcctccaggagcacctcgcgtggtctacctctggttgtgcccttatcattgttcggcggtcttaattcctcctgtgtcctagaagactagaagccttccgggacttggaagaatgttttgtctctaaagcggtgtccttagcctttgttgggcgtcggcccagcccaagtttgccttgggcttccacaaacaggaaggcttaggcccaattttatatggtgattaccttctaattatgccacttgtctaccttctagaaacacggataacatttaccccaagcttccgggacttaagagtggcggaagcttacatccttctttccagtcgaccttgaaagttttagacatgtggacacttctgaaaagaaaggaagcattcttctctttctgacacttgacagttgaagagtgaaaaactagcatggagaacaagtggaaccacctacgtgtcttcactttattgggttcacgattgccacacactttgggaaggtgcgatttgtgcgaaatgatgggatgacgactatttaatgtcagcatgtacccctaggcgagtattaatgatacaaaaattcctagattcccataaaggcatttaatttcgtcccctcgattccctattcgttggatcacaatttgtgtttttctagggagatcttggcccttgatctcaaagcacatggatcaccatctttgcttatatatagacgcgagggaaccattttcaacacttttgcattgttgaacctttgagagtggggaaggtttcatcttccctaagagagctactcaatcgttgaagcggccttaccccccgtccgacaccgagagaaaggccaaaaaggccaagctggcggaagcaaggaaaaggcctcctagaggtgagagagatttgaggtgggctggaacttcagctggagaggtctaagcgaggcccccaagcatccataactcttagccaaccaaagcaacaacaaaactaacatcaacaacatcatcaataacaacaagaataacaatagtcacaacaccaccaacaataacaacaaccacctcaataactttctaccgtccttctagccataccctcttttgaattcaattggcctctacatccctaggcaattgagactgaggtctttaaaaaggtggtgaaggctaaactctaccttaagaagtgccatgaccgagaaatggttactacccaaaagaaaaccatcatcttataggccaaaaggaaggcagagataacagatagtttcaaaaggaagagccctaacccagttgtggaccgctcgactctggctaagtttttttgcacccagggctggggaaatgtggcaccctttgcttctaacatgatagatcttaccaccaccagcgtgtgtgagtcaacaacagagaagtgagaagttgcatgcagcactatccccgttatgctggcacacgcttttgaacaacaagctgtcgcaataagtcttgcacacttaacttgttattttcctttggtggtttattttatgctaactttttatctcaatgtaccagctggccatgttctctgagaggacttgccaagaggttaattacatggctattaaactgaaccaatttaaggcaaaaaataggacactagcttccagagtggaagagatcaagattcaagctgaagacttctggaggagggctatcgaggaggttgaccagaaagtcaaggttaagagcaaccactttgttggtcgcatcactaaattccgtaggcaagaaatccaaaagctacaaactatgttgttcgctgctaaaaccaaaatggaaactcttgctaaggaaacctaagatgccaaaacacataatgacattttagaggctcgggtcttgcagaggagcaacgaggttagggatatatagatcaagatcaatggtttaaacatcgagctaagggatgcagatgcaaagctcaaagaagtcaaggctgaacctgagagccggagggaaaaagtggtcaagttagagatggatctgttggcagataagtgttgaaaatattttaccagnnnctagatttactaacaagtaagtttcattaacatcctaatnnnnnnntctaaaacaatgaaataaactcatataaagtttaagaaacctt

SEQ ID NO: 19296 - DNA, 4311 bp, Cannabis sativa
tcttgggtgttccacacgctctcaggcctagtcagttgaagattggtctctgggttactcgccctcatatgcctcaagaagggagttcacctccctggccagccagaggtgtaccactaaggggctggcgaaccgagggttaatcaatgggggcagttgttgagcctgagatccctagctaaccctccaaactgctggttgctaagatctggctgttctcgccatcagaccttcttggcaaggcttgttctccttcgcgtaggggaaggtctatcttggttcctgaagaacttggttggatagtctgtcggtataccctccctaatttgtcaactagtctcccttagagaggatctctaattaaatcctaagttgctagcttctctattgtggcgatccagctctgcctagtgagattggaggatatactcttggtcatccatccatcttagaaattcacgtctttattgagtgaatgcatcgcaatcaacagtgcatggttcttcagtttggctgacttagaagacgacctctctcagtttggctaactcgagatcttctcccaagtctacatggggctcgccaatggctggcttgctgattgctagccttgtctctccaacataatactagggatgaggtctagttattatgcatgggagctgctccatgtgggtccttccttcactgcgaagtgacagtggaggtcttcccttggaggcaggggccgattattcaaatcctctggattggttgtgttgaccttacaagctatggtggcctgattcttggtgtctaccgagatggcaagagtttctacatatgttgtgttcatggggattctagttatgactggaacctgaacattaagatctgtggccattgggtcctgaggaagacctgatgatgctaacgttgtagatggagtttttctcgtgttaaccaaattgtttgattagattacttgagttcgactcggtctcaataaaagacctaaaatgtggataagagatttggccaaccgacagcaaatgtaatactgatgcttaccaggtgttacacaattataacaataaagtaaatgaacacaatattttataaaggttcaacctcctaagttagcgagtaatgacctactccccttttagttgtattgataccgagagataatactactcagatcactatagtgattggctctgaagtagctctctaaaggttacaatgtaggaattagagttggtagatctcatgtatgagtgtagaagtgggcgtgtgagggagagagagatgagttatcagacttaataactttaaacttagaacttagagcttacggttttaggatttgactaaggctctttatatatgagatcttactccctctaaatcccttataaataggtaaaataagctattatttacatattaaattaataaaattcaaataactaaaatacctctcaaaaatagatatttttcctccatttttgcgggttattaaggcccaatctatagtttgtctagctatccatgtctgaagttgtggaccaaaatcctgttaggcctaaggctggctggccatgcacctgtaggatgcatgctggccagccataggatgttcaaaagctggccaacctatgctggtcatagagccagccaggggtggccggccagcccccttgaggtggctcattcatgattcgtcatcctgcttgagtactcagactcctcattggttgaattgttgagtagataatttgatcttcttgttggcaagctgtactcccacgtggcactgatgttggccacttagacttgtcatgttaggtgcacaaaaatcgggataacattaattattcagagatcataaaaaagggatgaataaatataattatttttgagtggtgcattatcaaaatactcattaatttatgtaaacgaccaaaatatttgaatataaaagtctgaattttaaacattatagaatacaattttattaggatctattaatgatagaataattagtaattttattatcctaactaacgacactatgaaattatgcccctttaatatatggattattaaaaaaaaaattattacataatcatagcttttttgttaggttctatttatttttagtaaaaagtgctaaataattattttttatcttgaccttcaccaatatcatattatgcccatttttattatttttttaaataaattttgaattattttttttatgtttatgaaaaatcaaatattttttttttgaaagatttaatttctttttcctaaaattttttgtttaagttaaggaaatcaaattcaactaatcttcttcatatttataaactcatatttatgttttgcttaccgaaatttcttcggttaaacataaaaaatgaagatgcaagtttctcatctaaattgatcaacaataatatattaattgaccaataatacacctaaggttataaaaaaatacacctaagattataaaaaaaattatttaatttttaatttcttttttaagaggatacatgatttagaagtatataatatcttcagaagaataaaaatactaattaacaatatcaactttaaatgataaaaaaaatccgaaagctaacgaaagtattatacctctattaatagaagagttcaagaaatttattcaatatggtgaacattttagaggatacaatttggtaatattataagttcagaacataaaaatactaattattttttgaagtaattatttttaaatattttaaggagctactcacgtgtgaatcacgtgcaatctcactagttctaataaataattatacatcatagttggctgatatattatatgcaataagggaaaaggggtttagaaacaattatgtttcttagttaggaaattaattaaaaaatcaatatacaaaacaataaattatttgtatgtatagcttattaaattagcaataaacatagtagtaagttatattctaataatatattaaaccattatcttattgctgttgttatttttattattataactaactaaacgtacatacatatataaattatatctatatatttatattaattatatatatatattagggtatacatgacttaattagtattgtctttaatgcatacttgatcattaattaaatcctacatggttaatatatgtttaaaacaggaagcaataaaaaggtaaatattattcatttgtttaagcaaatcatagctttttccccttctttttgcaatttaataagtggtggtctcttcttactttttatttttgaaggttattatatcaagccaataatcactaattaatgtttaggaatttttatatgtgtaataatatattatgagacctttcaacaattttataaaagtggcgaaatgatctctactctagctagtaggtgtaatagatattataatatttattttattactagggtctaatatcaaatagatacatatagcccaaaaatttagttgattgcggctttatataaatatatagatatagatataaatttatataatattatataatacggaatcaatttaaaaattcataatctccacgaatgtattgcctccactttgatcattttagttgctgcttaattaaggacccaccgagttcgctttttcgactacacattcatgcattgccatgattctctctctgtcactatttgttattggaagaatttagacaacatcaaataaaatcttaaaaaattattatgaataaaaaatatagaataacaagtattcaaataataggtactcaaacgtactggaaaatataaataacacaagggaagtatatagtggttcactcccactgttgcaaggatttctgtctcgtccatttgatattggatcacttctttatatacaaagcaagtgtcctttcattatacaaaagcctgacttaattatcaaactgtttttacatagaatatcaacattaaatcaataagaacgtaaatgtaataaatgaagaacagtttcacctcaactcactaactacagcaacgtatgcgacctaagtggtgcgagttttctgttcatatcctcacataatctcgcgggcttaagatgcgtacaagtttaatcgagtctgtgtgtttaagatatttgtgtcctatctgagtcgcgtatacagatatcctgcaacagttgataacttagaatgtgtgagtccttatcgggttatcaagtactttaggtcatccaaacaacctcgctgagtaaagaatcgatctttactaactc

SEQ ID NO: 19297 - DNA, 4872 bp, Cannabis sativa
gctcttcaaatgaatgaaaaatacttctgtgtctttattgatattgaataatccggattacgttgaaatgaagttttatttagggcataaaacccaacattggtttcttctgccacttggtaattcttgtaatagaatatgctgagacacatgtcggaatcagaatgtaggagcagggaattctctgtgtggaattagaaggaatgaatgagcagtagaattgatgagtttgtggatttgtttttgttacccatattctctattcagctcatgtttaaagtaagctagatgcaattaagattggtgttgaggcaagtgaatgagattgagaccaaagtgactgaattcatttttcatactctctgcttgtattccttttttagtgttgagggagagtaaaaattgatgtatacattaatgtttaatggttggcctatataaattcatatataatacatatcactgtatagttataatgttagatataaaaagatgcactatgagaatgtatgttataagctatatatagaaagaaagtaattctctaaaaaaataaagtaaatgttctgatttccaataatgaaacaaataaaattttattttttctgaaaaagaaaaaaatatactattatgtgtgcttacaatgtgctctattttacatataaattcaacttaatataatatttctatatttatgccccaacttacaatttaatccctagtgttttcatcatgaatttcatacatacctcactgccctttacatattagttcacgtgaggtggaggtctaacagcagctgtatcatcaacgacgggattagtaaaatcaaacaagtaaaacaatacacattagttcccgacatgacctttcggtccttcttctagcataagtttactcgatcgaacctggttgtaggaggtggagatctaacaacttctacttcggtatcatcaacggtaggagacaacctgaactaaaacaagtaaaacaatacatattagtttcacacatgacattttggcccttcttctagcataagtttactcgatcgaacctagttgtaggaggtggagatctaacaacttatacttctctatcatcaacggcaggagacttcctgaactaaaacaagtaaaacaatacatattagttccccacatgactttttggcccttcttcaagcataagtttacttgatcgaatgtggttgtaggaggtggaggtctaacaacttctacttctatatcatcaacgggaggagacttcttgaaatgaaacaagtaaaataatacatactgtattagttccccacatgactttttggtcattcttctagcacaagtttactcgattgaatctggttgtaggaggtggaaatctaacagcttctacttcggtatcatcaatggtaggagacttcctgaaataaaacaagtaaaacaatacatattagttccacacatgatattttggcccttcttctagcataagtttactcgatcgaacctggttgtaggaggtggagatctaaaaacttctacttctgtatcatctacggcaggagacttcctgaaatcaaacaagtaaaacaataaatattagttccccacatgactttttggtccttcttcttcgattgaatctggttgtaggacgtggaaatctaacaacttctacttcggtatcatcaacggtaggagacttcctgaaataaaacaagtaaaacaatacatattagttccacacatgacattttggcccttcttctagcataagtttactcgatcgaacgtggttgtaggaggtggagatctaacaacttctacttatgtatcatagatgacaggagacaacctgaaattatacaagtaaaacaatacatattagttccccatatgactttttggcccttcttctagtataagtttactcgatcgaacttggttgtaggaggtggagatctaacaacttctacttctgtatcatcaacggaaggagacttctagaaatcaaataactaaaataatacatattagttccccacatgactttttggcccttcttctagcataagtttaatcgattaaaccttgttgtaggaggtagagatctaacaacttcaacaactgtatcatcaatggtaggaggcttcttgaaattaaacaagtaaaataatacatattagttccccacatgactttttggccccccttctagcataagtttactccatcgaacttggttgtaggaggtggagatctaacaacttctacttatgtatcatcaaaggtgggagacttcctgaaattaaacaagtaaaacaatgacttcctgtccaagtgccacacaaaaattacaatgtactgattgaacaggataagaaaaatctaaccaattacaattaaagaaaaattcaaactctaaaaatgaacaaattaacaaaaaatcataaataacaaattacataaacctataatttacttacaatatttgactcatcacaagttgtccccattcgtcccgtaataagtttatctcatcgttactgtaaggatcgtcattatgatactgtaaaacaaaaagaaaaacatcaattacttaggttaatttatttgtaataaaaacttatcaaatgaaatctatgcaagtttacccgagtacttaagaaatttatgggatctcgcttgttcattaagctttggataaacttcatcacggagtaaccgaattgatagtcaccaggttgccttgtgctcgatgattgttggttcacccatgctctctctatttatcaagagattgtatcgcttcagagccctgcaccaaaatgaagctggttattagtgaatgaattagtaacataatactaagttaaaatttataacacttacttttccacacaatccctaacaagttcacgagtatgtccattctttgagtctagatatacaaccttatgagttgcggactggatgagcaccaacatctagtgattactacacataatgaaaaatgattggtcaaattcactaatcgatttgtagttatatattaaattataaacctacttacatatcttaccacgcgcaaatcaacaactgggtgggttgtatctccatcaactgctcacacaaattcttaacacgagcatggggctgtgcactttgtgtagctattgaagcaggattaataaatgcatatatttcatccattcgaacctgcaaatgactgataaacaatagattattgataataaatattaaataacataattattaaattaattattaactattataccttcaccaaatgaagatagcatcgactccgacccaatccaggttgcaaaaatctttgacattcttcttatcgatctaagtcttagtcctatggtgtccgaacacatttgtcttaaattcacatgtgttttcgtaatgaggaatcgcatcccatggctccacaatttgttcaatcctctccagtaattatgttttaacaggtagagtgtaacaatcaagtgatgaagaaagcttcttctacttcttttgcctctttgagtgtatgggagactgattcacatcccatggctccacaatctgttcaagtgctctctagtattggtgttttagcatgcagagtgtaacaatcaagtgatgaagaaagcttcttctgcttctttgcctcttcgagtgtatgggaggctgagtggatggaactaacggatcttcccgatatccattctttgatttcttctagagtaaaaataacattaattaaaagttagaagtttcaatattaattaatgactatgtttgcttgaagctacaaccttatacaagaagcaactcaaatatacaagcctacatcaagaataaaagttcgtctacaataaaagtccaaaacaaatagaactcctacatcaagaattagctcaaagttgtttaacaaaaaaaaaaaaaaatcagctcaaattcttgtaatacaacttttactgttaatgcagttagagcatgaaattttctcaactcttgaaaatgatgaatcctaaaagtgagttttgtttatacaagatattttataaatttgcagaaatggctatagagaggaataagaacaggaaaaattatattaggctagtgatggtcattgatatgattaaattactcagagtagtttctacaaatatacactttatttttacttagttaattatgtaaggtgtatagattatgtataattgtgtgtcaatttttttatgtgcatgtaaaaatctatcaaagtagcactaaaaaagaaaaaaaaaatcatttcagttatagagagagaaagatttatatgatagacattacctgtgacaacttgtccttgtctatccattcaactctccattcttctttcagtagcttattacccaaaaaacaactcgagatataccttggagatttcatcataagagattctaaagggtagcttatccattcctccaccatggtgtccaactctttactccatatttcatcatccttaataaaataattatccttgatgaattctagaattttgtctaattgagcttgcttcaaaataattttgacattatcatccatatcttccaaatctattgaccttagacccaactagatgggattagaaatacttaaattataactgtcgtaagaagatcaatgtgaacctattttatagtccaaatatatcttaaatccataaatatcataataaaaaagtcctaagatagggatgtcgatcctctctaacaatttgtttagaaaccgttttgtgtttagatcaccatatccagaagtcgttacaacgatactgtaacgccctaatgctaaggcacgctacagt

SEQ ID NO: 19298 - DNA, 4935 bp, Cannabis sativa
aatcaacaatttataatttatattttaattataaagtattcagaaagaaaaaataatacaaatttaaaataatgaaattaattgctacaatttacttccatttttagaatatttagtcaattttttttactacaaatttactgatacttacctaatgactaaaatttaaaacaaaaaacattctaggacttaattgataaatgaaacagacaagaaggggcaatatggtaaaaacaaaaattaagattagtgttgggattgtgttagtcgtgccttttgtactgtgttttgtgttgtgtaccaaagaaaagaaaaagtcaattcttctcaattgtcagaatagaacaaagacacccctcctaaagcttatgcctttaatatcttcaattagtaaccaaagaccccatttcctcaaagatcagatttttattatcatcacttgagagagttcatcacatcacaattcattcacatattcctctcataaaaattccaactttcatgaataccttcaattagaagaccaagaagaggaagacccagttctcagtattattccccctttcttcccctttgaaaaggtcagaattttactagtattgactttgattatgaaatgatcacatgaaaatttgaaaaaatcccaactttaaatatggtttggttttaaactatttcaacaacagaacaaaccatcatcatgagttgctttagctgttgtagagaagaggatgttcatagtagaggcatcgataatggacaattcatgcccaattctgcaccaggtgatttcattattctttcttctcttcttttcattttttggctctttgatttgtttgggttaatagttttaaccctttatatataggcaatagtggtggtcattatgctagagaagctgcaccaagggagatcaggactgttcctgttcaacccattgctgtgcctaacatttcaattgatgacttgaaagaaatgactgatagttttgggaccaaatccttgattggagagggctcttatggaagagtctatcgtggtgttttgaaaactggtcaagctgcagctattaagaaattagattcaagtaaacaaccagaacaagagtttttagctcaggttgttacttttattgatttgttatgatatgtaaacaaacccctttattctctctattcattaactgtttattatatgctttaattatttttcagatctccatggtgtcaagactgaaacatgaaaatgtagtccaattgcttggttattgtgtggatggtccacttagagtccttgcatatgagtatgcttctaatggatcacttcatgatcttcttcatggttggtattattgccaagtacttgtttgattttttccattatatggtctgtttgtttgcattttgatcaatttgatgagatgatttcgaaacaggaaagaaaggtgtcaaaggatcacaaccaggtctagttctctcatggtctcaaagagttaaaattgctgtaggagcagctagaggtcttgagtatttacacgaaaaggctcaaccccatatcattcatcgcgatattaagtccagcaatatactactttttgagtctgatgttgcgaaaatcgctgattttgatctctcgaatcaagcccctgatgcagcagcgcggcttcattctactcgtgttcttgggactttcggttatcatgctccagagtatgttctcttaaatcacaatactattaagctactaacaataataaagatattagaattgttagattttgtgccattgatctcttgaatcacattggagcctaaaatttatgttttggatggcagatatgcaatgactggacagctgagttcaaagagtgatgtttacagttttggtgttgtgttgctggaacttttgactggccgtaaacctgtcgatcacacgttgccacggggacaacagagccttgtgacatgggtaatgatttcaacttaagtcctcatctactctaccagtagctcttataatcgagttttgtttgtctggtctaataatttcgatttttctgtttaggctacaccgaaactcagtgaagacaaggtgaagcagtgtgttgatgcaagactcaatggagaattccctccaaaggcagttgcaaaggtaacaaacacaattttccttaactaacaacatatgaatcacatgactttgaatcaatctaaccactttttgtttaaatttaccttccaaacagttggctgcagttgctgccttgtgtgttcagtatgaagctgatttccgtccaaacatgagcattgtagtcaaagctctacagcctttgttgaatcctcggccagcgccaagtccaggtcccccacagtgaatcgccacgaatgtgaattccctgaatctccgaccgctttatagtggaatataatgctaaagatttgttttgtacacatgatggttcttctattcaatgttttattagttttccttcatcatttggcctcttatggttcttaaattatcattgaactggagctttgtaattgacatgagcattctatagattgaattatacaaagtattgatgttatttgaaacttagtcttgaggatcataaccataacataaaaatgataactttgatattaaaaacagaacaagtggttccacagataatagatttcagttcacaaaaattcaaattccttaatagttatgatcacaaaaatcagttctttttctcttgaatagattttcctttgcaatgaggggattcctagtaattctcacaagctaaaatgacctaaagaggggaaggaataaccccagaactgtacacacaaccagctgtgagggtgcccccatcccccacaaccccacaagatctacaagcaaagtaactcaaaagttcaataaaaaaagaaaaaaaatcatcttcactcatttccgttcgctttgctgtacttcgtctcaaatgaaggcggaaccaagtatttcaaatacttaagaaaaatgcaacctttgccaattggcttatgttcatcaaattctatacatggagatgagctaaacatcatcagtcttatctccccttgttccttctgataggccttgtatctgggttgtcgctcttatctgtatcggaagtctctgtctgggactcggccaatgttgcattactcttacggtgtctacgagcctgtcaaatccaatcagatcatgttaagagtgttttgaaaagcatgtctaggacaacccaacatagaaaaatgactatatatcagttgatactctttcaaattgtttaagaaacaaacctctcgcggtatgggatattcctctgattcaagcattcgaacaacttgacccattttaggccttctgtcagcatcaggatctaaacacctcaaagcagtcaaaagggctcttttaaggtcacttgttgatggtctattatcgattttaggatccaccacctcttccgaacgcctatttgcaaccatcatcttcagccagtccactagattcacctacaagaagaaccatcctagcagatgttatattaaagaagaagtgaatgtagaacttaacttactatctatagaaaaacatttatgcatacctcttgtgatggtcgaccataatcaacggggtctcttccagtaattgcctctaagagcacaacaccgaaactataaacatcactcttctcatttaaaaggccagaattggcatactctggagccacatacctgaaagttaattaaaataacaaaataaaaatgaagttctttccattcctcatgtttgaagtcaatcctaatcttaatttagaactcttaaaagaagaatgactaacccaaaggtacccatgaccctagttgtaatgtgactctttccagcacccagcaatttggccaaaccgaaatctgatatcttagcattgaactcgtcgtcgatcaagatattgctagacttgatgtctcggtgaaccactttcggttcaatggcttcatgcagataagcaagcctgcaatatggaaatgtaaagccaacatgagatgatataatcaaggaaaagccactcaaatcaaggtgtgtagaaagacatacgccttagcagtgcctaggagaactttcattcgtgcctcccaagtaagatatccatgatggctcatagctccatggagccattgctccaagttgccattgtttacatactcatataccagcatcctgaaatttaatgtcaagttataggctaccaaaaattgatgacaaacatataaaatcacaaagcaatgtacttcttggatgatgacccttaatcctagctgttaactgttagtgtcttgagctacagttagttagagttaggttacttaatgtccaactatagctataaatagcagcttgtaaaggtcttagattcattaaccaacttgtgcagaatacaatacattcttactcaatacagatttcttttctctctgtttattgtttatggttcttgaactcggattaaagctgtgaattgaataaagcttagggagaacagtattaaatcgtactcctaaaattttatgtcaaaatttagtcaataccaattagaactaacaagaatacacatcaatgttcagccaacaagcagctccaatcaattcaaaaagaagagaaagaaaggttattagtacctgtgagtgccttcaatacaatatcccaaaagtcgaaccaagttcttgtgccgaacatgcccaatagcctcaacttccactctgaattccttctcagcttgtcctctaaacgatgattaaaaaacagcattgcacaagcttacaagttataagcattacacatacgaaaatgaggtgtaggggaaaatgtagtagtagagctacttttattatgcaagattacaacttacagattgtt

SEQ ID NO: 19299 - DNA, 7435 bp, Cannabis sativa
taaaaatttaataaaaatagtaaatattaagtttagttaaaaaaacttaaattatatttaaaatttattttatttataaacggttaaaaaatcaaataaaaaatattaaaaatctaataaataatttaaataaacaaaaaaaaaattgagaaaaaaattaagtttctatatatttataaactcacatcttaaaaaataaaaaaaaaattataaaaacttaacaaaaatattatattattttgaaaaaaaaaattataaattaaactaaaaaaatattatattaactaaacaaatttaaattttggagaaaaaaatatatactcaaacttgttccgataaaatttaatttttacaaatattgaattttaatatatttttttttatatctaaatagatatttttaataaaagataaataaattttaaataacttagttaattttaattttaaattttttttttaaattttcttaatcattcaaaatatttgaatattttttttaagatataaattaatttgttaagatctactaaaaaaaatattaaattttttttatttttattttatgtacaatttgatagttgtcaaaatttaggaaatttatctcatattctacctttcttaattttaataaagtaaacaaatgtaaaaaaaaaaaataacaaccttataaataattcctattacttattagtaaatatactattagataaaggaaaaaaaaaattgacaatacaatacaaaactttacttgtattgaaagattgtaacaaaaaatgaaatagtctaaggtttttgcttggacattgaagcttatatacacaatgggaaaattcaatcccatgatcaccaaaaaaaaaaaaagagaaaaccctttcaaagttacatgaacaatgcttttgttctattaattataaaatgtactctgtatgtgtcttcaaacacagtattttcttcaagttttgttcagctcttttatgcatttaactttaataacttctgcttataacaaaaactgaattgattatttcatcagttactgcataaaaataaaaatacgatctaacattttcaatcttttatgtatagattctatctaccaagaagaaaattcccaaatatcattcaaaactagagggcgcagccacttcgttttcaaccgttatcaaagttttgtataagccatacaagcgcgattgctcaagcatttcgtgagaaggaaatcctcgaatatcaaacagacttttgaaccagagggtgaaaccactgccttttccactgatattatgaatgataacttatcaatgcatgatgtttagatactaaactatggatatatgtctgtatgtgtcttcaaacacagtattatgaactagtccctccctctaactaaagctctatcaataccaagaggatagctttaccaaacaatccaagggagggagatgatgaggttgattattatttgggcaagaaatcataactagaagaaatgcacttcctgtttgtcatgtcatctaatatgtcgaaatcaaaagatttacagattatcaaggaaatctgcagtgcattcataacaacacaaattattttcttgatactggggagggagtgagacggggaaatatatcgtgttactaagaggaacacttgcaaggcagaatagttcggctcggagggaggggaaatgaccattgaacaactatctaaactaggttactttatgtataaaatctaaatatcaaacagtacataatttacaaaccatcctgatttcagttgaatcagcagaaaaaactgaagtaatgaacaaaagagtcaagtaacacgcttagaaaaaacaatatagccaatatgtcaaggtaaattatgggtgcactgaaaaataacagtaaatatgctaagtatcagaccagttcctaacaatagtgtaaatgaatgaacaagttcacaagaacaagaggataaaaagttacccggtataaaatggtatccttacaatgttctactgcatgatctttaagagagaagcgaaaaaatctacaacatagaagagctagtcgctagtgtttttccgctgcactctcttccttcccaagggcaaccactactttcttcaaaattgcttcaactggttggtgggagttctccactgcttttgatattgcttgccatttctcaccatgctttggttcagcagcaacacatcttttcaaaacatccttttggttttcatcgcttccatgctgaagctcaaacttataatataaagcccaaaaatcaccaagatcaggagctaaagtgacagccctgttgagccaagtcctagctttatccaccttcctatcgtgccagaacaatttagccacagcagcaataacatggggatcgtgatcacatttcttgagggcatccgaactcttggttttacgttggggacgaggtaccatctcaattgaggctgcccacagtataccactgttaggacactcctgtagtgcttttgccatcaaaatgtcagcttctttcttgttgccatgcttgagctcagaacgaactgcagcaagccagagttcagggttgtgagcattctttttcctggccatggtaagaactgcacgggctttactcagtccattcattttctcttcaagattagcaagtgaaagccaaagaggtatgcaatgtgcgcagtgcttcaaacccaactcataaacctccttggctttttccaagcgaccaagccgctcctctagctgtcccagcataagccacaacttatagaatgatgggaactgcttcagaccttcattaagcaaccttttctcctcatccaccttccccaattctctttcaactattgctgatttcatccatactctctctgtgcctcccctttctcgagctttagcaagaagcattctagctctctcaatttcttggttctcaaattcaagcttgaatgcagcaagccaaatttcctcagaatttggaatagcagcataagcttcctgaaggattgcacgagcagcaggcacatccccagcaagccacttctccttggctcccataagccataaaacttcagcctgtggccggtacgtaacagctttacgaagtaaagcatcaagagattccctagtcccatgactcttttcaagttgtgctgccttgagccatatgctcttcttggttaagaagacagtgagtgcatgagcataaatagctctcgcagtttcgatggaaccccttttcttgcactcctctgcatcagcaacccaagttcgcttcctatcttcatcctccacaccaattccaattgtattatgaatgatagcttggcaagtggcaacagaccctgcacgttcagcagcctcagcctccttcatccaggcttctctatcaatctctagcccttctctttgcaaagcccttatacccctttcaataatttttcccaccatagaagtgtttccattagcttcttccaactttgctgctgtaatccatatagcgggctcctttggaagcttctctcttgccttattaagaaccttcttagcgctatcataagtttccaacctcgcaagagcaagccacagctccacatgtaaaggacagcactccacagccctatgaagcaaaagtctagcatcctcctcattagctagctctaccaccgccttccacaatctaacagaatctggaatgttttccaagcctttcctcaaaaccctactcttatttacatcatcgtgctccaaatccttggcctgcatccacaacttcaccgaatttggtatggctttcactccctttgctatcacagctttggcttcatcagggcttgaaagcctacatgcctccaaccagacatcctcgttcttagggcacgcctcacaccctttctgaatcagctgtcttgctgcctgaatcttccctgccacttcttctaatcttgcagccgcaatccaccctggagggtgtgttggatttgtttgagtaacactctttagcaacaatctagctttcttgatatccgaaatctcagcatcactagtaatcttcatactcttaagatcagtaagatacccctttgggtccacaacagttaaccctgaaacagaatctgaaagcctatctaatttcaaagacaagacagtacctctcccttcaccaacagcagtcaaatcggtaactggggtttggccccatggcgtctccgcgccacctgcagccctactctttgggtccaatgcagtgacatgttccttttcttgtcttgctttctcaagaagtgtgtctggaactggcacaaaactctcaaacctcttcttcttattcctcaacgaataatctccaatttcaggtatactatcccaatcattggaagacatagtatacaatttcctcttcaaatcggcaaactgctctgtgatcttcgggttcaaagctcggtacttctcaatctcctctttcaacctagcttccctccgatccttcctcctcgaatccattctcttatcaatggcctcccaaaccgcatcagcctctttatcatcttcatcatactctgcggaggcaaacagccccacatcattaccttcaaactcatcaaatttctgattctcatcgtaacctttgtcctcgccatcatcctcttcctcctcctcaccaggcttcccgcgccctcgaccgacagcaggagccccagcaccgccaattgtggtagccgacttgtccggaaggtcaggagcagctcgggccggaccaatatcagaccgagtggtgaacccagtagctccacgaccgagaccagcgacataattggacggtggctttgagttcaggaaatcaaggcgcggtttagggatagtaggggcttgcatcccgccaaacaaagggatatggagagttagggttgaataaggtctaacaccgagctcagagaggagtgtgaaatcggtgcttgagaacaatttggggctttgagagaagaaaaggcgttgtagagaaatgggtatgccagatatttcattgatagcgagctttaggtcccgaagagtggtggagttagggtttaagtttaatgctaatgttttctggtttagggatgtaatgagcaccatggttaacgagcgtcaatgcctcctgaacatgaaaaattgggttaaggaaagcttaaataaactaaaaaatctgctcatatcaaactaataataagaagaacaagttgtaactgcagaacctttcagttttaacaataagaccattcatttctcatgtgttagacgcagtttcatcagtagaagaagaagatgaagattttgaattctctggaccacttcacatacttcagtaagaaaaaattttgtttcaagatgctacaaaatccaaaaaaaaaaacaaggaaagatgattatatattaaaagaaaagtgcataccaaaaagaacagatgaagaaaaatgaggcaactactagaaccattggtcccagaaaactataacaaagtaactaataataccagatggagggaaaagcatacaataaaatcacataacaaatttagagaatgagcacaagtacaaatcaaaataaccaggcaaaaccccaagtaaagtacctgctttgagcgaagcaattgtttaatccagcggcgaatgagtgaaacggaattcgtactctccaatctccgatctaagttcgataaaatttctagggtagcgctgattgaattcagtgacagaaccgaagaaagccaaaatggccaagagagaaagagagagagagagagagagaagaagatgtgcctttggtttatgattgggcttgggcttaacatattgggccagctcaaaaataccaacatacccgcttttcatcaaaactacccacgttttttctttattatatgtttttctaagggatttttatacaaactgactaaatagcatattttgtaattttttttcactaacagataattttaaagaataaatactattttgaacctaaaaaaaaattaagaactgatgtcactaaccacatctttaacaaataaaaataaaattaaataataattaaaaaatgatacataaatgtcacaaattatgcgtcaataaacagccattcgacagccgatcccataccagtccaccccgcgccgtccttgtccaacgaattcataagatagaaagaaagcatgaggatatggattagaatcccctcctctaacgttgatcggcagtggctgtatctcccggtcaccgcagttattttttactgtctcttaaattttcatcaacattagactttctttagtaaaattagattaaagtctttaaattcaacaattttaataattcgaaaagaatttttaacgagcaaaaaaaaattcaaaaaacataatttagcaaatgtcaaattgaatattaaaaatccaaaatgaaccttaattttttatttcataaatcatttaatatgttgcattgcattaaatacgagtcattaatgaagatataatatgatattcttctagtttcccattaggtcaataatagtcaactttttgtttctttttaccgtttattatttcctttccttttttcgcatatttcaattgttttatataactcttcttcctcgtttgaattcttcgcttgaattctttattgcttttgaaaattcttctgttcttgtgttctgccatggattgtactagtgaatactcagagaagcaaaagaagaagtggaaagaagagttaatggaagatgtgaagaaggcgcgtagtgagaggcagaagcagagacagaaaaaggtagttgaagagattcagatgaagtggaaagaagaggtcgatgaagagcttgagaaggcacgatcagcccaaacccaaagcaacacccatcactttcttctctgtcaatgatttctctcattatttttttaaatttttctttgaaatttgatgaggaaagggtctttgaatttgtttgttatctttcaatttcattaattactctttgaaaccattttaggttatttgcagcaaatttttttatgttttaattttttacatttatcttctatttttttagtgaaaatattgtttatgtttatttttttttttttgcaaatttaatatattagatattatgaattattattgtattaattttgaaattttatcaccaattattctcaattttataagaaattgatggttgtttatgtaatttatggtaatttttgcgattatataaaattattttgctagtaaaaaaatttatttttactaaacactcaaatttacaaaattaaactcaaaagttcaacaaagggatatttaggtagtatttttttttattaattagtctttggaattgttagtagtttatataaagtttaaaccatcaattttataagaaaacta

SEQ ID NO: 19300 - DNA, 3873 bp, Cannabis sativa
  modified_base (3705)..(3722): a, c, t, g, unknown or other
  modified_base (3809)..(3826): a, c, t, g, unknown or other
tatctcacctataaatatagggtctcggtccctgagctccccactcattttctgattattcagcaaattttatcaaaagagagttgagagagcgaagatgcccgaactccaatactgaaactatcacagtgattgaagctcaaagatcaatgactggaggtatttcgatctttcattgtatatatattgtcgatatatttatagtatttttcgcattacatatcgtatatatatgctatatttcatatactatataatatattctaacaaaatatacttttaaaaaatatatatttttaataaataaaattattattgtgtagaagtaatttgataatataattttaatattattatatattagaaaaaaattaaattgttatttattataaactactcaaaaagttataatatctgtgtcaatagccacgcgaagacatgagctagtgctagctaaatttgttgtcaatgaaagaataaggtcacataccatgttgaatcttttagcgtttgtaaagatagtcgaagcataaaaaatgagagaaagaatgaaaactgaaacaaattatatcaatgaatccaaagcagctaagtacaatatataggtatagaactaagttggttattaaactaacagaaaacaactgataataacaacctctcacaactaacttgttgccgatgctaacagtgcatctaactaactcatcaaggctagagttaattactaactctatatttttatgagggggagacaattcactgttcaatttttgccattgtcaaacaaaaaagatcattattccattaccggttatttttttttttaaaagaataactttaatttaactataaatcatttggttgaatagaaaccctataattagaattagtgaatccgatgtaggaaaataatgtatataaatgattaaagcacagaggtgctagcaatattctagaatatatgatataaaggattaatataacacaaaataatcattaactttaagtatgaccatctttttcataaactaaagttcataatcttctctctctttacctgaacaaaataacgcattagctctattacaggccctttgaataaaaattaaaaaaataaaaaataaaaattcaaagctctgaggggtcactaatacgtaagctatatactatattaataatagtgatagccattagcaaaaaataaaaaaggaaatagaaaattagtgatgggcaatgttgcgcatgtgccacctttcatacacgtgcaaagggaatgcataattctgtctaggctaggcttggaagtataatgatgatgacacacgtgcacaacattttatagttccattccatctctgttctctagggcaaaaagggaagaacctaagagacagggagagagaaggatagtattatcaagttaagggatgtttctaaagagtttcttttgggaccatttcttataaggaatgtcaagcaaaagtgggacattactccttcatttgtgatgaatgagatgccgtggagtgtcccttcttatgaccaacaaatgtgtatattatatgggcatttcttctattgctctattatttatttattgtttacaaatactttgtgtatctaaacattttttttttggtcattgtacaaaaacccactttaggggcattaaattttcctaaaagcactagtagtgggatctcactaatgcacacttgggtctctatcaaagatgaggcaaaatgagtgtgagtgcttcaacatgaaaagagagccttccaattttttttttttctattttcaattgcccctttgaaacttttatcttttttttttaaaaaaaaataaataaataagaaaagaaagaagaaattttctctacttcaagggtcttactccttgggaatagtcacactgaatcaactcgtcctttccaagttcaattcaacctggcaaattcctttgtcgcttttttcaacatttagggcaatttatattttttagtgaaaatttaattaaaatagctaaaaattaaaatatagacatttttattattcttgttttaattatgcttcctactttagttaatgagcatttgattattttgaatattttataatttcaatttattaaatataattaattaaataatataataaaaaaagtaatagtacttttgaaaaattttagcataacaataaagaactccctatagctaaatatcatttctctattatagagagtcaatttttctatacttggagctcattttcgtaactcgcgtcttattttagctgaaaaatatatttagagagcatttttcctaatatagtaaagtcaaaatttcaaaattcatctacatattttattaaactattctattttgcatcttgtcttatgtgactaacaaaataaataaataaggtggtgttggtcacacttttataaaagttttattcacaaaagtaaaagtaaaatttttatttttaaaaaataaaatgtgttcaataactatttttgtttttaaattttaaaacaaaaaataaaagagtgtttgataactattttttatttttcaattttaaaagaaaaattaaaaatattttttatgggtctagctaggtttaggtctgcggtgagggtcttgggtttggatcggggtccgaatttgggttagggttcgagttcaagtatggggttcaaggatcggggtacaggttcaagtttaggtcttgggtcctagtttgggacttggtctaggtccaggtccagggcaaggtctagggtttgggtcttgggtctatagttagggtccgggtttggctctggggttcaggtttggggcctggtccagggctgggtctgcgcccagggctgaggtgcgagtttggggtttgggtccgagtctgagttcgttgtgcaggtttgggttgtggtgtgggattaagtccgggtccgaggtttagggtccaaggcttagggttgggttcgagtcgggttcatggtttgattccaaaatattaatgatagaaaatacaaataaattaaaattaagaaaaaaaatttaaaaatgatttttgttttctatttttaaaattttaattcctaatttttaaattaaaaaagaacaagaaatttgcagaatatgtttttttaaaaaaatatttttactttactaattaaaaaaactaaaaactaattaaaaattgatacaaaacacatcttaaataaatactgataacacaaatcttatctcccaacagtacgtaatattgaagagtacaattcaagtattattggagatgttagtcacagtgacatcactgacttaattaatatctttggatgatcagtcacctacttaattatcaagcttggtattctgattggtcaaattgtacgtctctagtttgagcctttgaagtttgacccaaaaaatttatgatctttcaatggatttgtattgttatccaaaatatatgatctttagaaagtagtggccctgtagtgttgccatgtagtggagctgccacttcccatattaccaataagttaaataactagtctattatcatatcatatttttaccggctgcagaaattaaatatatgtctcgtaattatttgtctacatgattttggttactccatacatatatatattctatataaagtgtgtttattgttgggttttatgtcctannnnnnnnnnnnnnnnnnataatcagatttacttattaaaaatatcagaaataacatttaatgttacacggttcacatacataatttatgaattctatttaagtnnnnnnnnnnnnnnnnnnttaatgattatagtgttgtcagctcagtggaatataatcttaattat

SEQ ID NO: 19301 - DNA, 3430 bp, Cannabis sativa
gtagtttcaatcaacataccagcaactgtatctttgtacttgaatgtggatccgagtgacaacccaaatgagctttcggatactcatttcgcgggtcgctccgaatccatctccagcaagtccagagcatgtgacatggttaagagctgtctcctgcataattttgctattatttaacacttaataatttgactaataagtgtcaaaaaatgaaaaaataaaaaagataccaacctgaagtaaattcatgagtgtttccatagtggcagttttatcaggaccagtttcatatgatcggataatgaaagtttgtctataaacaaacctgtcctcaacaaatttaccaagtaaataagcatgaagaggagaattatctacacttacatctgtcaaaatctcactttttttatctacaacatatgtcccatttagattttttccattaattgcatccaaacttttaggacttttactagcacttgctatagccctaaaacgccgtcgtttcaacttgattaatgcaccatttcttgagtggtaataacaatttgatatggccaagcctacattgttgttcttcttctctgctttgtacaaattccctggaatttgtaatctaacactgattgatgttgttgttgttgttgaagccattggtcttattattattattattattattattggtaagtgaaagaaactaagaaagtgttacattggtttatacttagatattaaagataacccaaataaatttaagatgaaaaaatatggttaatgaaacttctagctcatgttgctttgttgaatgaaaaataattataataattacaaaaaaaaaacaataatgtcatacattagtggttgtaactacaagataaaactatacattaattttattttggttagagatggtggcttatgtagttgaaccactttaaagggtgagaaaaaaaagaaagagagatttcttctattgttttttgcttacttacacgaaaatggagaacaattaattaagttccatgttagaaacttaatataattttaattagtttggatgattgtatttacaacattttttttttttgaatggtgatggctaatgtaatgacattccaaacatagttgtttagattttgaggaaaatgataggatttacttacctactctaacttcttttgttttggtaatctgtaatggaaactctagtcaaattaacccaaatgtagtaaataaaataaaagaagtcaagtccatataaattaggaagttaattatgtttgacttgtatgttttgacatacataatacactgttggaattattaaatatagagaaaattactatattagatattgagttgcttcttaaacacattttaggtactttctataacttcttttgttttcattatattcatttaaaacaaatattcctaacaaacatgctgaaattttgaaataaacaaaaataaagcaacatagctaggcttaaaaaaaataaattgaaaaaggtagtttacttggagttgattagatgtagccttttaatattggctatgtatttttgtaattgatttatatcagttttatatgatttactagtaaatggtttgtgggtttaccaattaatcacttcatatatgtggtataaatctttaattctaaatgatattttgtgaagtaagcccctttagtcgaaaatgattgtgggctttgtataattttctttctttcatggattatttacaccacataaagtttttaattttttttaattgtggggtagaatttttttttttaaaaatactgtgtaagttttatattgtgtacaatattaagttttcactgttgttctacggttattttttagttgttcgactaatttttttagttgttctgttttgaattccactgttattttataaaaatacaatatttttgaaagaaaaaaaatcgtgtggcagtatttttataaaaactaatcgaaattctagtatttttgtaagttttctctctttcatggagtggacttacttggtagcatttatggaaccattgggttctttatccaaacttaactagaaaaggatgggctttgaaaaatattgatgaggcccaaatatagggaacgagttatgattaagtggacaaaatgtatgcgtttgagtaaccaaaaaagaaatagaacaatgtggtgtaaatataatttttggtatatctaggtatagttttagattagatatcaaaatattttattttaagtgattacttctctttcttgacattttctaaccaaaaggggatcacttgtagattagtgtcattagatacttgattattaaagatttttttatttttatattttaaaacagtttttttttctttatgcatttttacagaaattcacatagaaactttcatagcaaccaacagaacaacttaaatctcaatcaaaatctataacaaattatcgaaataatccaaaccgcaaagataaatcatactatatgctattagaaaatggaccctatgattatttgtgagaggcaatcttggcgaaccaagcgatccaaaaacacaccgtttcaatcactaagataaacataattaattattttatgcataatttgattgtataaacataattatagttgtaacaattgtattcatcaaatcacaaaaactttttcccacatttcattcaacaatatttttgtttaaaacaaataatatattaaattacaaagtagcccatattttagttacaattggattgaataggttcaataggcccaaatgtaaatctaatttgctaaaataagggtctttgagaggaaattacactctatattttttttttatattgttcttttttatttttaccctttttttaaaatctatcatttttacctcattttttaaacattgtactaattttgcccctgtcatttcaagatactctccatgtgattctcttatgtcagggtattttgggtacaatacatataaaaataagtatgttttaattaaatataaaattaaaagtaaatttaattaattaattaataaaagtggtatttttcaatttaccctcatatttgatctctatctcttttttgttgccatttttttgtagtttaaaattaaatgattggtgttttgtcttttagtattgttttcgttgtataggtaataagtaataaaagacaaaaggcaggaaagaagagtaaatggaatagaactaacttgtgtgtcttttttcccataagtactcttttgcacgtaacttcttcaatctccaatccatacataagatccaacttattacgtcatttttttttaactcaggtgtttggttttggaatataattaatttccatccaactatcaatgatgtcttctataaattttagactgacaatccca

SEQ ID NO: 19302 - DNA, 2584 bp, Cannabis sativa
tgctattgagattaattgtgataagaaaagtaaatcctttagaagtttatggcacttgaaagagaaatttaaaatcaagagcatgtattcctaaacttaaagttaaccaagaacacggtgaaacagtatccaactaacttggtaaacgtaacttctccacaaattaagaacaatgatgtgtcatgaaacttccaaaacaaggttcacgcaagttaaaaaagaaaaacacccaccttccgacttgagactttaaatccaacatctgatgctgtaattccaattcgcttgaaaaatgtgacaattgaagaaataagttctgcctcagcctaaagacaaacaggtaaacttaagctcaacaatgcataaggtacattaaatcaaataattgagttgctaatgtttgtaattcccagtaacagcacacaccatgacctctggtacacctatgatgtccatattccattggtagtgctctcgacgacggcctctggtcattcgctcataccgccagcattgccctattgcaaaccatttcactggaagggacaaagattttctgaacagaaaaaaacatcgacatcaaaatcgatctgtacctgaatccaaaaatcatatgtaaataaatacatttttaaactacaagtttcataccgtttaacaatgcgattaacaaagcaacaacaacaacaacaacaaacactttgccttgttttcaacaaaacagaagagccaaattacagaatcagaaatacattaccctttctgaatcaccaatcttgctaaagaaggagtaagctcaggcctcagcgcaactcgacgatttcccctatcttcaaaacaatacagctgcatttcgattgaggagagatcagaaactcattcaaattatcaaattttcctatgatttaatgataagaacgctgtttcaatgcataattaaaaacaacataaaaaggctccaatttcgtcgatgaaaacatgaagaatgtatgcacactattcatatataaacacacacgtgcatgcatatatatgatatcatagtggatgtcaaatgcctataatttgaaaatattatacgaacctgatctttaatctcttctcctgcttttctaacaaacaaagcctccgactcaagcaccggaaaatcaacttcttcgaacccaaacagccgtgaaacctggaaagatatatacatacatatgtcggaaaccaaaaaaaaaaaaaaaccataacctatgaaattattgcacacaaattgaaacaaacctctctgaaattatggaatagccagttgcgaaggcgcatttcgtcaggcgagaaatccctggttcccttgggaggattaacgtcgatcttctgtatgacttccgcaaccggagccggaccaagagctcccgacctacctccggcgccgcctccattgtcgcgtgcgaaggccacggaagagtgatgtctggggttcgaagagaggagcggctttaggattgggagcacgcaagctcggttgaatggaaaggaagaagacgaagacgaaaacgaagatggattggcaagagagacgcacaagggcttcaaataatggttaagtcgtggacggaggataaggaagctcgagggctttgcagctgttgcagcagcagcagcagccatggtgggcgtgagtggaacacacgcgctcccaaaccttattgggacaattctcggccgatctatcttcgaggtcctttttaaattaacactatgtttggtaggagggaaagatggatggatgaagaagtgtggagagagagtgataggagtgactaaattacttatttggtaagagggagagaaggagggaaaggagagattgagggtgacatactgccttcaaaccttcaaaatttaggctatgtttggtagaaatgagagagagtaggatagatggagaatgtagaaaagatggggagtaggaagaatggagaggatatttgtttttctttgtattgtttgatgttgatccttccccatatactcctaacaccaaacaacacaaaggaaaacaaatatcctcttcctttcttctactcctttttctttctactctctctatctatcctactctctctccttcccaccaaatatagttactattttattatttttaatacaattatatatattattttttaaagggtaaaaaagatattttgtataaatttgttgtctttttcttgaattctctcatgttaagaggattaaaaataatgtgtttggagggagaccctctccttccatctctcctctcccttcttttctccctcttgtcaaacaaaaggatttaccaatccctccatccctctccttccacccctctccctccttccttctctcccctctactaaacatagtgttaatttctctaaatttaagaggattgtagaaaaagaaaaaatataatttgtaaaatacaataattactcttaaaaaaataataatttttcatattcaaaaagacaattttataattttacattatcatttccaccttttacttaatactaaataacataaaggagattaccaatcctctccatctctc

SEQ ID NO: 19303 - DNA, 2971 bp, Cannabis sativa
gcaaattggtcaatttgcatgagggagttttgtcttttatgggatgttttaatctgaattttaaagtgataataccagattttattttaataaaaacattttctttattcatttttacaaaaataaaaaaaggtaaaaattacacaactctctctcgaaaatccctagagcagctagggtttggtattttcttcttcatttcaagaaaaactcagcaaggttttgtgatataaggctgtaggtaagcttccatcacctctttttatggtttcttgaactttaagaaattgaatgatgcaagttttgtggttttatttgctattgttgtcgcttgtgtcgagaaacaagctggagtatgaaaaatggtgctaggcactatagcacaagtctgaaaaaaaaaaaaaaagaagaagataatttcagcatttgggttattcaggaaatatctcatggacgccatagcgcaagtctcaggtgctatagcgccgtacttatctcttttttttaaaaaaaaatcctaattttaaggggattcatctatcttttcaagcactataaatagaaccttttacgctatgaatttcagattcctagagctaccaaatttagataaaaacttagagagagagagcaaggaagagacggagatcgcggcttcgaagtgttcttcatcataattcttttcttctccttaaactcttactatttattataattatcgttactaattctgagtagtttccttttagttaaatgttatttcaaaacctaagacatgaattcttaattccattattgaatgttaatttccagttttttattatatcaaattgtttatactcttctaattcaatgtcatgattattgttttaatcttgtttagatgaccactaaattaggttttactttaatataccgttattttaggtactattcacctaatagtctaggattctaagtgtttgtgataaattataatttttaatattgtcaaaggtattttaattgtgatgaagaatagaatctaggttaaataaattaaattatatgcttcattcatttattttatttcctagattaatctatctccataaatcttatctaagttaaagaaattatatgcttcatagatttactgcttaggtaaaagagtttattattgagcacttcgccttgattacatctaataaggagattgggataattaactgcttcaattttatcagcgagattaatagtttgattggaaattgaagttatattcattaactgcaatccccgctagcacggaggcttcccttgaaggctctggacaaccctccgaaagtgtgcctagaacgtctgcctggaacctaagcgggcaagtaatgtctctaatctttgttcagtttctagataaatctttcgtacccatctttgccaatccggctggggtaatggtggtgttgcacgacaggctccaaagactctgatgagtcacgtgtgacttcccactcgtcgaaccttgaagttgacgaactctcactcgacgatggtgaagttgcatggagactagactggtatttgaagagcagttggagaagatcattatctatttggtgctaacctccctaaatcatccaggtccatctacaaaaggaggagagagaaaggtaagaaccagacacacgagtatgattttaacaagggtaaaacatttctaatgcttcgaccaaatagatttcaagattaagtcaaaggttaaagaacacatgaagaacactaaaaatgtctagaaacactgaataagcatttttaagtaattttttcaacaaaaacagtttgagatcaattaaaaattaaacgtcgtgaactgcacatgtgtattcaaacctaaaattaaaaattccaatttctaatttcgaagaacagttttatatatacctagaattcgtagagcaaatttaaagtaaaaaataaagtgcaaaaaattaaaagaaaataaaaaaacttactcactaggaagaccaccctaaaataagggagaataataaaaaaattcagaagaaagaaaatagtagggtcaaaaagtgacaagttaccaaacaagaagggattttttacgccacatactgaaattttttacttttttttttcttttaactgtggggcagaattttttaaaaaaatattgttactgtgttaagtttcctttgttattctactgttgttttttagttgtttcactgttattttttagttgttttgttttgtgttttactgttatttataaaaaaaaaacagtatttttgaaaaaaattctgtgtggtaatatttttgtaaaagttaatataaatttcagtatttttgtaagtttcacttaggaagaccaccctaaaatacttatagggcttgtttggaacgccgtattaagtcgtattgtattgcattgtatattgtattgtattttataaatatttttctgtaaaactatatgtggtattaactttatggacacataaatatatgatattttagtataaattaaagtttaatataatattatataaaaatatgatatataatccaatctatatatatagaggagaagtataagacggtgacgtggcgctctaaaatggcttaaaactattttatctattttctcattttttctaattatttataacctatttatctattttctattttttttctaattatttaaaacatatttatctatttctcatttttttaattatatttttttatttttctaattttttaaataaaaaacatagtattttttttttaattttataaatatctaacaactaagttttaaaaaaattaaaaaaaatatatctatctatatatctatatacaattaaaaatcatttaacataatcttatctaattctcttaattaaaattaataataaaataattatatacattaattttttaaaaaaaaattataaatatctaacaa

SEQ ID NO: 19304 - DNA, 3051 bp, Cannabis sativa
aggttattacttttaaaaattaaataaaaataaatatttgattttttgtcctgaattataagctctcgttgaattcaaaaattcttgttaaaccatataaatcataataaatatcccacttcagttataatacagtacttataacttattacaacaatatgagggtctatttaataactttaaaatacctgaaacttaatgtattaatactaaatatataaatattagttttaagaatgcatataatattcttataattaattattatatatattactacttatgtatataatttttttatagactctttaattcaccgtattaacgttatgttaatactacatcaaaaaattatttaaaaaaattaagagaatgtaattgcatgaatttctttactataatttttataaattactagggatttttacaaaagaaaaaggtttaataacaaaactctagtgagaatccaattaactgaaattttaaaacaaactctagtgagacaacactcctattctaaatttaatgccaaaataagcttaccctatactaaaagaaaaagtatactccttttgtcgaccaaatggtagaaaaaaatgtattctcttctaacttattttcctaataatatatatatattttgaaagcaataatgaacaaattcattgaatcctattaatataaactatttataaatatttttttttgtgtttctttgtcagtttctttccggcaccataatatttttttggctagtggtagaaactttagagaaatgcaaaatatattagtagcgtctagtattattttaaatgttatatcgttattaatgtgattaaatattatatcatatataatttactttaataatttttaaaaaatatcgtgaaccaatcctacaataggtataactagttttcaatgattaattaattattaatttattatactactaagattagaacataataaggtatatttcaatatatgtgtcagtatcgctattggttcaactgagtatcgggtctcacataatttaatataatagtttttaagaagtatcactagtcaatcgcaatgtgacatgtcgagtaggtgctatgcaccacgggtgcctaatagcgatgttcttcatatatatatgcgcttctagctggtatctagtattttttgaaatttcccagaaaaagtcataaatacactacactgcacaaaacaaaagaaagcattaataattgatggaatattgattattacttgatcatagatggaacttgttaattctgagaggacactactgtcactgtgaagcatgatcatatatgtacacgtgagaaatgcttagacgcataggtgccaattatcattatatgtaagaaatactattattggtctaatttaatattaaattttacacattttaatttagggtacatttaagtaattgtgtaattactgtatgcagtttaactacatagtaattatattgtacaaagtatatttatatataaagtgataattacatgtgaatttataaaaaaaaattacttttagtgacaatcttttagtcataacatcgattttttgtgactaaatagtcacaacaaaaacaaaaaattacttgtgactaaaatatagtattttaatacaatataacgcgttttagatcgtggcctatactacaagccacaatctaataaaacgcgttatattagagtaagggaaaacacgttatttgaaaatttttaaatttgaactaattgcgacagttaaaacttgtggcctatactataggctaccatttaaaatcgtggcctgtagtataggctataggccactgtttttaactgtcagtatttctcctttaaaaaaattgcaattgttaaggcacgcttaaaaatcattaaaaataacactataggcgatagttttaaatcgtggcctatactttaggccacggtttaaaaacgttgcccatagtttttaactgtcagcaattctcctttaaaaaattgcaattttgaagccacacttaaaaactatcggcaatacagcacgagttttttaaaatcatcgggaatacccaattttcctaatggttttaaacactcacttaatttttttagcagcggtccccaaaaaaagtattttaagaccgtcgagaatagtaatttttgtagtagtgttcgtatattagtttctttttcttaatttacaactaatacaagaaaagcaacactaaaataatttaaatagcatcatacataggacaaaaaataaattatatatatgaaaaaaaaatcaaatgaaggactaaatcatcttaaataattattatattaattaaataattaaaaatattttaggtatgtaattacactcaattctcatggggtatgagaattggagagagtaattgaggcctcccaattatctctatgtaattgtgtggccacacaaacaggtcaaactgtgtaattacctcaagaatagggtatggcaaaaagttaaaagatagaagagatctatattttcagttgcaggtaaagaggtaatcattaaagctattcttcaggccatacctacatatactatgagttgtttttgattatcaaagaatactgtaaagagtctccatcgaatggctgcaagattttggtggagatcatcggagcagaagaagaaaattcattggtgcaaatggtcttacgtatgtaaactgaaggataaaggagagttggaatttagagatttgagcatgttcaatcaagctcttcttgcaaaacaaatatggaggtgtatctgttttccttattctctatgcattaaggttttaaaggcatactattaccccaataaaaatattttggctgccaagtgtggcagtaatgatctttttatgtggtagagcttggtttggggcaaaaatattatcttgagaggttatcaatagagaattggtagtggtaatgtagtgaggtgtaacgtccccgcttcaagccttcattgggcccttacacccacggactaatgactcttatacacgggtac

SEQ ID NO: 19305 - DNA, 5390 bp, Cannabis sativa
  modified_base (74)..(83): a, c, t, g, unknown or other
tcaattttagttttagttaaaacattgttagcttttcttttcttttctttctttcctttctctctctctctctnnnnnnnnnnctctctctctctctctccttttttcgaaagttttaaaaaaatttcccgctacacccataattatttagtcttaagagttgcacgattgccatttacattttaagatgatcattttgatattcctattaaggatttaaatctaagcgttgttatagggcatcaaggtgcctaacactattatgatgcgttgtcttataattggctagcgattttctatactatttattaaaataaaataagtaggacctgtaaaatccttttgtggcaatttattgtcaaaatattatttaatttattatgaatatttaatgtgaattaaataatgtgtttcttttgtgtatatttggttttaatcaagaaggaaaatcttcgttgatcgacaaggacaaatacaaacaaaatacccagggaagccaacccgggacaactagctaacaacaaaaactaaacaaatctacttattacataatctagctagatagtctttttctagtgtagtcattcttctattatttatttttttttgaaagagaactatagtttaattaaaccaagaaaaggttcatgggatccacagggggaaatccctccccttgacaattcagaggctctttagaggaacatctagcctctttagccaaaacatcaacaaaagaaattacatctcgggtaataaaagaaaacttgcaattaactaaattttttttcaactcaaagaaccttagaaaacagagcccagcatctccaattaggaatcgattcattcataaatgatttaacaataacctgggagtcagtaaagaaattcacattctcccagttcttctctctcgcccacagcaaagcaagaagaacaacttcaagttcagctgctaacggacttccctgcttccccgaagtagttttgataaaccattggctagtatctccgtctatagccaccattgcaccaccgaaagtgccatccttgaaggaaccatctgtgactattactttaagaccagtagtaggaccgccaggactattaaacttggagcatatcactgtgaggagattggatatcgctcatctcagaaaaccacttcctgacttccacaataagagtatcaaaggaaatctgagctttggaaccatgacgcagtctatttctccataaccaaacaatttccattatagaggcaaaccagactaatagatcgtgtctcaaagaagcgataagactatcagtggcagcacagatgaaatcaaatagagaattacccgaaataaactctgatctgagtggaatagggcctccgaaccataatgctctagccattgaacatctcacaaagagatggaggggattttcgggttcagaaccacagatcagacaaacgccagagttggagcctccaaatttatcagcagtggggaggactccagcagctgctctccataacatcatactctgacgaggatgtattttactgtcccaaagccacttccagacgacctgaatatcgtcaaaacgacttcgctggctatttaaataagcccctttaaccgaaaagaccccagtatcaaaattcttccaaataagaagatccttctctgctaacttgttgatctgaatagaacttatcaatcccccccaattcacttccgaaaagaaaatcaaggaatccatgattccaagttttgctccgtctgaacataagattagcaacacagctcaaggaaggagctttggatcgaacaacttccatcgtttccctgaattcttcgtaggccatccacgggatccatggctgccaccaaagattcgtgtcctctccattcgcaatcacagtacaagagccgtcacaaattaatttttgagctcccaaaattccacgccaacccgggctatccgaaggcctttcttgaacactccaaaacgattccagaggaaaatactttgctttcagggagacagcccaaggcctgtcacaattagcagctagagaccatgccaatttagccaaaagggcattattcacttcattgaatcttctaaaccccaagccaccacaaattttcggttgacaaagagaattccaggttttagtagcaagaaatctcgaacaatccacacgacctttccaccagaatttcctgactaaagcatctaactcattgcaagaggatgtaggaattttgttggtactcatagagtacataggcatcgccatggctacagagttaattgtcaccatccttccaacagtcgacaaggatttcattcgccagccttctaaccgtttgcacagattagttttaagaaaattgaagtccttcttcctgcttcgagagaactgaaagggattgcctaagtgtttttcttctcccttgaccaaaccaatattcagtttatccgagatagaattctgaagagaaagggagcagtttctagagaacagaatcccagacttgtgtttactacattgttgcccagaccagccttcatagatcttcatacagttttccaatgccactgcctcttggatattcgccctacagaatagaatggtgtcatctgcgaacatcaaatgagatatggcaggggcatcacgagcaatccgaataccattaatcttgccgctagcttgctccttggaaagtaatctggaaaagacttcattacagaggataaatataaaaggtgacattgggtctccctggcgaatacccctgtgtggcacaaacttcttctggggacgaccattcaaaagaatggaataggacactgaggttatacatttcattaccaaagagatgaagtgagaatgaaacccaaaagtctcgagaataatcttaatgaacttccactcgagcctatcatacgccttgttcacatcaatcttaattgccattagaccacccttaccccttttagatttgattgcatgaactaattcttgagtaagtaaggaagattcagcaatccatgtaccgagaataaaagctgattgtagaggagaaataagacgatccataagaggccgcagccggtgtgatatgattccagtcaccactttgtatacaaagttgcagagagcaatagggcggaacttgttaaccgactcaggattatcacatttcggaattaggcaaataaatgtatgattaagtagaggaggaagggaccccgtcctgaaaatcgattgaatacaagccgaagtttcttggccaatagaattccaacactttctaaagaaacaaccagagaagccgtctggcccaggggatttcaatagatgcatctgaaacacatgctgagagatttcttcaaaagaaggaatagagatgagtccctcattctcacagggagaaacactcttctcaattaagcccagaagatcagcaggaagaaggtactatttacaatttacaatctatactttaaggtactctttacatcatttacaatacctttgattgatctagaatatctattaaagatacatctgttcctgttaagccatatgttgtaaatatcagcagccaagatggtgatgttgatcctttgaatccaagagcgacctaccaagacaatccagttatacgagcctttatagttaattggccagccattgtagctcatccaagtaaacatctcatctaagatttttctataaacaacacatgagaaaaaaaggtgttcatgagactcaacaacctcttcacacataggacaattcatcgactccaattcaatgtgaaatcgaagtaaattatccttagtgagaaggtgagagtttaagacttgcgagagtataaacctatgtttagggacagtaagtgaactccaaactgccttataatatttgacaggatcttgagtcaacttactgttgtacaaacaggtggtcttgaaccgtgtggacgttcctgctttatgaatttcccgtttctcaaatttcttcctcatgtggcagagttttcgccaatcccagctgacattaggtttgagatcatactcccagaagcacttggattttaagtagattatccacccatttatcccaaagaaggtcttgcttagtggatattgcctatatgtacttagcaaggatagcctgattccatttaatcctatctttgaagccaaggccatcataagacttcgggagacaaaccttctctcaagaagttatgcaaatcttactcctgtttccatttattccccaaagaaatcctctgtacaacttttctatctcttttgtgatactatgaggaagaataaaaatactcatccaatagttacggagaccaagtgagttaatttacttattattattattattattattatatcatgttttttgtgtttaattattagtgagagtcaatgttattattattattatatcatgtttttttgaccaaagttcttgtgttgcgtaccaacaaatttcatggtccaatatgggattcaaagaagtatatgggctttaagaaattataaattgttgatctctctttcaatcattttaatggaacactctcatcagattacttcaccaattggagtgccattaatacaatcaccccaagcggagataagtcaaggtcaatgtacatggatgaagatgaagttagttactaccaagagtcggtaactgtgactaataagggattcgaaatggaatttgtgaggatcttaaccatcttctcctgtatcgatctttcaaacaacaattttgaaggagaaattccaaaatctgttggggatcttcggtcattgattgttttaaatctatcaagtaacaattttgaaggccacattccactatcagttgagaatttgaaacaacttgaatcattggacctctccaacaacaagctctctagaagaattcctcaagaattggcaactctatcatttctcgcgtatctcaaccttagtaaaaaccaacttagtgggatgataccacatgacacacaaatgagtacatttctaaaatcttcatttatggaaatgttgaattatgtggtttgccattgttaaaggaatgtgaagacagtaatgatgtcacaccaagtacgactcttgatgatcatgaatctcaatttgagagtagtggttttggttggaaagcagtggctatgggatatgcatggatttcttggtggaatgtttggtggatatctcttcatttccaaaagagtaatttgcggcaaaaccccctcaactatcaatttacttgcaaaaaaccatccaacctcatattttggtgtgaaaaccctccaaagtactgttttgtttacatttttaaggtgtcg

SEQ ID NO: 19306 - DNA, 4801 bp, Cannabis sativa
ccaattccaaatttcttgcaataatcattaaactattctgcacaaaactccaatccattatctattctcagcttctttatcttcttttcaatttgagtttcaagcatggttttcagttctttaaacttattgaaggcatcattcttgttcttttaaatataaacccacactaacctagaaaagtcatcaataaatgtgagaaaatacgctccacacctcttgaaagtgtgttctagatggaccccataaatctgagtgtagatagtccacaatggatttggatttgtgtatacctaccccaaatttcaccttggttgctttgccaagaacacattgctcacaaagtcttatagggttgacttgaatctgtcaaagaacatctttcttgcctagtatcttcaagccaccatagctgacatgaccaagccttctgtgctaggctaaggtgaaataccattagcttgatttttcatagtggtcccttgtaagacataaataccattaacaatcttgcctttcataatatataaagaatctttcatagccttcaaaatgtcattttcaatcttgacattaaaaccatcttgatctaacatggacatagtaattaaagttctcttaatatctggtacatgcttgacctgtttcaactcaacaaccttgccatcttccaattctagcttgactatcccaatgcatgcatttgcacaatctctattgtcacccaaattgatagttccactttgtagaaattatgtattgaatgaaatgttctttaactatacaagtgcggaatgaacatccataatcaaaatgatccaatctatttttgtcttgtactttgagatggctaacacactgacactatcataaccatcactgtcttctacatttgagacaatgtcagcatttccagcttttttgaatttgtaatctttcaagagtagacaatggagaatgcgaaatttgataagcacatatggtaacaggttagctttactcaccatggagcaacccaagaaaaagtccatcctcttctagatcatgcaactcattgtcggcaataacaacaccaaattgaaaacctaaaatcaaccaagatccactttccattttgtgtgttgatatttagctggtccctaaactaaaagcttataatcatttgataatatcatcacctatgtgtatgataattaattggctatttaggatttttaccaccaaaactatcacaactaccaagtcgtgctcctgaactaattaattcaatagattgagttgtacctgagataaggatggagaggtagcattctttgcatcaccaagacaggaaactatcttcagggtgccgattagacccatcttcttatacttaagatctgtatgaccaacctgcatgattggaccataaaataaaatcacttttctacttttaagaccaatgttgtgaagagaactgaacttctgcatcaattataatattaaacataacactttgatactaactacacatttagagataaatttacaagccacaatacctgtttcctgactatcatcaaaagttcattagcaaaagaggatctatatgaatctgcactagaccgggcaaatagtgccagttggctgaaaacctcatagacctgcacttcagtaataccaatgaaaatggaagaatgaggaccttcttagaatcacaaacaaagatattgcataccttgtgcagattttcaacattaaatccctccaagtagtccagtatacctgattgtagagcaaaaaacacatcaagaagataggagaaaaaaacttccaactaatatagtacacatggatcacgaacaaatatagtaccactaatatgaggagaaaaaggaatcaattcctgtgcgtttttggaggccaggaaacccaaggtttccaaagcagaactcactacatagctaacaccagatcccacaagagtaactagtgaaccaagaacctgtacgcggacacagtcacaaagaagagttcctaaagttcaccctttagtcatcaacataagaagaaaaagaaatttatgaggtcacttacttcttgcctcgaatacgaatcaacaaattctttgaacatactagtatagacagagatgccaaactctcttgcttttttctctttacacgccaggagatactcagtcagagaaataaatgatggaagatactcctaataaattggaagaaagaatataaaacataattcaattttatttatttatttacttttgatagaaatgcaacttatgtagcatgattttgtctacagtacctttaccaaatccttgagtccaccaatacattgatcaaacatagcttgatgaatgcaatcttcaacgattttcttcttgaatatcttttctactctcttttgcagcaactcaccattcatgtatatgagcataagcagccaaatatcaatgactttgtgatctcgaggtttgtgaagggaattcagttctttcaaaatctcctggcaaagcatctatggtaggagcaaattaaaaaaaaacacttttaaaagaaacaacaaccacaagacaagaaaaaatatctacattcttgaatcgaagacttgatctcaaggcatcaagaatcaaagcctccgaactgtccttgtgtgactttcctttcaactttttctgttgcattgcacaagcatttgacagcccaacaaacttcaactgttctcgaatctgagaaattattcttcctacatttgctgctgttgctgacagcaacagaaatctgagtagaaacggcatgtgttccacatcaatagttctgatgcaagataatgctatggtgatcacctttaatttcaagaaaattccactcattgacaaccataataagaaaatacgcagctttaaccaaataatattaaaagagacatatcaaatacaatacaattaatcatacggacacatatcgagtaaacaatgatataattcacaatttgaatactttgcaataatatccaaaacagtacatatctctatctgagactttacgacaatatactaaccattctaaaaaattattcacataataaagtaagtgaagtaaacctgttcctgtaactcttcatctaaattaaggtttgaaaatgagtcgagcacagcgacaactatagaggagtcctcttgaagtattagctcaagcgattcaaccacagttttattgctctgatcaccgataatctccggcaacgacccgataatctctttcttcaaatgcagagggcaaatcgaaagaacttgcattaacttctcggtgaaggcgttaggatcaacaatgaagtcaagccaccggaagtggttaacgataagcctggccacgtcattttcaagcgacaacgatgacgattcagaatgttccgaatacacatgaaagtactccggaagtttctcaagaagcatgttctgaaggtctaactgaatggatggaaccagcaacaaatgcctgactaagctctccccagttggacctaatccatcacttctcgaaggcttaagaatcctgaacaaagaaatttcagaatctctccttgcttacttctcccctaattttctttaaaaaaaaatgtgcaaggaaactgacctgtggagatttttcggggattgaatgtaggacgaaaggcctgcgagaaaatcggaacgaagagcagaggcattatcagaaaatgagaaggcatgatgaaggtggcgacggagcttgttgtggtcggttggaagacatggggggccggaggggttgatgagagtacaaccagcctcggcgagaattgagaccatcttgtcggtgacggggacttcagcggcgttgtttggtgggggagcatcggcagtggcggtggatttggggattttgggaggagggaaaggggagacgaaggaggaggaggagggtcttttgcgaggagtagtttgttttttgaggaataccatcaggtctggtgagatggatgaagttagaggttttcttgtatggagatttatgaaggcttggttttcgtttagttcttctgtttggtggttctacactacttttctttcctttttacttacttttgatagctttatggttctacttgctaggctactatgaattgatacagggcgagaaggaacaatgcacacagcacaatggtcggaaatggaagaaagggcgccaaagttagggtgggagaactggaattttgaaatgtataattagcagcagccctcacaaaaatataattattatgtttatttattttatatagctgactattcaataattacatttctattgtaaccatgcgattacatttttttttgacctataataaaagataaccaataggtaaattttttatttttagaattaattaactattttttaagtaattaaataaatatttaaaaaaaccttttttagcaattaaaatttatataaaaaaaattattatttatatataaatcccttagattaattattttaacaattaagctatttaatgataatatttacaattttattttttacaaaaattaaaattatttttatataaattaaaattttgtccttataatgaatttttttttacaaaaacacaccctgtttcttttttgcaggatgtgtccttataaattaaaaaaatatgatgatattagattgacacttaattaaaacctaattaatctttaaagtcttgatttttatttttttaattataaattctaattaactaaagtcttactcgcaattatcttctttca

SEQ ID NO: 19307 - DNA, 5150 bp, Cannabis sativa
tatacatcattccaaacagcattccctagttgccgatgaagtcacacaatgcaacctgctgcaaatcctctccaaataacgtgatcaaggtacgcagtgctatgaatccttggggtacaggaattgtgattatatcacgtttatctttgaggttcagaaattcaacaatcatccattttagcgatttagggatcctgtccatgaccttttacgagaattattcatcttctcgttcacgaccgccttgtggaggaagcatgggagctttcccctttgacgcatcacgtcttgaaggcggttgagagagtggaccttaaacaaaacagaacataatatatcaaatttgatcaaaattctactaaaatttcggtagcataacggctgtaattgaatgcctccaaaaattttaaacatgcctgtataatgacaaataacacatatttaacagtagtttattcatccatcccaccgcagcacatatatttgcagaacctacttcactatggttgaatattgaagatattcaaactccactaatcattaataattaatttataagagaagttacctcagatgttacaattaagtgtttaggccaaggatggaacttgtttggtactttcctaacatatttgcacccttcaattgagattgggatttcaggatcctcttgcagcatttctaaaatcaaaacctgggcatatgaatcattgtatagtgtgtagtaaacattgatttcaccctcatgctcgtacagatatgcttgggccacaatgttgtcgatgttgtcagagcaaagatatacttgctgatcaagggcctaatggtcatcaaaattgtataagagagctggctcgttgagggaaacaaactccttagcataggtttgtggtgcaccctcatcctcacgagcgtatggttgtggaacatatgcttcaccagccacctctccttcttcctcttgttcgatagtatttttcttctatttaagggattggagtttggcttttaatatttcaatctccttctgttgtcgagccacaacatcagatacttcccttttcttcctaccgaacaatttcgatgccctggttaggaacctacaaatcataaaatgcaaattagctatgattttttttttgtataactaaagaaacaacatttcaagtactagcatacctagctgccgtggcacgtccaggatgctctggtgtcccgagtgcctgcattaagatatcgttttggccctagacttgaatttgtcccagagtaagatgctcctctaattgagcctaatgcacgcatatattcaagcaataagtgtatgaattatatatactaactcgttagtagaactcaattatggattaatatatacttactatcttaaaaatgggataaaatggttaagaaatgagggagaatgaggttgttttagtggtggtttgtgagggttttttcgtggatttagggctgttatgtggtggctgttctttgtgttcagcaagcaggtgtgaaatgagcaagacgatacaggggtctgataaataaccctatgtcgtcggttatttggtattaaccgacgccataggtgccacgtgtcgactaaaggcggcacctatagcgtcagttaatccgcaataaccgacaccatagggttattaaaaaaaccctcatttttccccaaaccccaaccgatggtataaatatatataaattttatacctacggtttttaccaaaaaattgcctctaaatgtcaatacggatattttcacaccctttagcttccctttttgtaaaataggtttaataaagggaagcttaattaaggtccaaattgtagtagtgcatatttgttgaacaccttgagtacttaaaaggaataatactcataattttgtatgtgtagtacttgatataaaaactttcatacattatacaatatgaatgtgatatcacaaaaatgtgaatcatactaattcaattgtatgtaatttctttttagtgctacatataagactttctttagacgaaaattgccatgttctggctgtttagactttttagtgatgttatgattaaccaactaacttttaaaagaaacttttgaaatgaatagtaaggcaaaataatttatggtacaaaccaattagtacggtacacaacatttgatgtatacatgctgcaacattatttgtgatactcactattgaaaaattggttttttcccgacgattttaaacaattaggtaaagtatttccgtcaatttttataaccgttgcctattcgatcgtcgtaaaatggggagaatagtactatatctattattactttcatcaagcaaaataagcatatttagatcatatgtggggcatactcattattcttacataagacctacaagtccttaacaaatttcaaagcaaacctatccttttgagatagtttattttcattaacaaattagttaatcgagctacgtttattttgagtttttatatctgactagaattacaaggtaattagctaaggaaaatatctcagattctagaaagagatgctagagagatgctctgaccttatgggacttagaaaaatgtgaaaaataaacttatggagctctccttttatatgcacggaagcccattaaaataataataaaatattacaaaacatataaaatatattatctatggtgatcatgaccattgatagtgatccaatggctgagatgctcatttatgactttagatgatgattgtcaattttcggagatcgaattgcatctcatggatcgatttagtggtcacctacgaaaaaaattacactttaacttgagaacaatcttttggcatcaaatctttaaaattaaggtataaatgtgagatctaggtagaaatatcttttcaagatatttctaatgaacttgaaatcacgtccattggagtaatattgaacgagttatgactgttttactgaaggttgttaacaactctactaggttgacattcctgcgatttaggagttgtccaatgtcaacttagacactgtataattgagaaatcatgctagaactgtattttcttgaagtctatgtgatatgttcacatcacttaacaaaatttttggttttggtgaactcatttacaagtttttggagactttgtattttcgcgaaattgagagactctaaactgcccgatttacaactacttgatcgatatttcactttgctgaaaatgtgaagcatcaaagtgtgaatttgacttgttacaagtcatagatctcatttactatagaaaaataggtaaacgctcgaagctgatctagaatctgatatgtagaacccagcgcaccaggccatatgtcaacctgagcattagggttttatttccaagtctttaggacatcatttttgtacttccatcatacttgatatacaaattagagcgcttcccctgttatagaccaagataagaagaatgcctaaagcaaaatttgcgtctgagtagcaaaaccacgcgcaccaagttgaatgtgaacctgggcactgggaccagccctagtgtcaacctggatgccggtcaggtctttttcccccaaatcctcttgtttactccctgatacacaatttttttctgcaagtgtacaacattattctagcaaacttttaattctaaaaaggttgtctaactcacagggattgattcttaaatttcaatatttgattttttattttatgctttatttagaaagttcaaagtaaataatgattaagatcgaaatactgaaataactgaaaagtaaacaattaaataatggtttaatgacaaagtaaagatttagagcattgaattccccatttcaaactatgaatctcaatttattctataatttacagtttcaagaatcttcacgtactctattaacatctctcgaattatgatagaattaacttaattaataagaaaatatctctattctatattaatcaatcaagtaataataaagcaatatgattctcatagaattagtagaatctcttcgtcttgctctttttctatgtcttgcaattttaagtctttttttagattacctttctcaaatgtaaaatataaaatcttaatactaattaatagtaatcaaccattaacaagatggtatttaacacaaaattgtatcaacaagtagcaggaataaatatggaaattatcaaagaactttaattcataatctaaaatacttccatcaatactcacaaaaaagtatttagttcgtaattacaaatataataaccacattgttaatttaattttttgcatatttaattgacaaaaatattttattatttattttatatttcagctggtgtgtttaatttggtgtccatattttgtgtaattgaatttggaaggaaagttgtctagttttgctatttatagaaattgaggtaaaaatagtaagtttggttacacaatttattagctggtatattctgatctatttgtgagttttctattttgttagatcagatttcttgaagagaaaaccagagctaaactatccttttctataaaaggaaagtgcacttactgcccacgattctgtagatatagaaatggaaattcttgggctgattgaaaatttattttagggaattttctagtgggctggggtcttgttcagaccgtgtgtaagctgtcaataaggtatatactgattataaatactccttatagcaactaggtttagtacctatcttggatctttgaatttcactcatatctttagaaaagaaagtctttgttttgtagagaagagcttcttcaactcttactctatttatttgtattttgtattgtcttgagtctgtattcaagtctacaaagaagaagaacatcattgaaaccttcagaaaaaggttttacaaagctttcgggagattacttttcaagtcttgcatcgggaggaagcaagcactcttcaaggtgatcgaagggatttcgagctcttagagttttatcaagattcggttacaaggtggaatacatcaagattgtggcatataataagagggagtctatgttgggttttatgccctaaataaaactctttacaatctaattagtaatcaatataagaaattt

SEQ ID NO: 19308 - DNA, 4157 bp, Cannabis sativa
  modified_base (4128)..(4130): a, c, t, g, unknown or other
gaaagcaagagacaaataaacccttttgcgaagtatctaaaagagatctaaaacaccagagtaattaatgactagcagctgactggaagagtaataaatgaacaaacagagcaaagaaaagtcaaacgcaaagcaatgaaagggaagtaaaaggacacggcttgaaacatcaaaacgacatcatcaagatgagaaaacactggattggaaccagatttgtgagaaaacaggagaaccagagatgcgggatttcgccccactagagagttccaaagctttctttgttatgagtattaactcactttgggaatcataactgtaaaaatattaatggtatactaaatattcttaatttgttgttatgtgaattaaagttaatcctccttgtgcatgtaattttctgaacagatttcaaaaaagaaaaaaaaaaaaaaactatgtagctgctaaattggaaaagaaattaaagattgttataatttaacacgttttttttaaataaatattttaatagtatttatattactatttaaactataatgatagattctttaaaaaaaaaaaaaaaaaactataatgatagattaataatttaatgtttatcattttatataaatataatagtatagagtgaactataacataattattattaatttgtgtgtattgattttacatacgcggtagtattatatcctaactaaattatcatttttttttttttcatttttttctgaaagggaacgaaaaaaaaaataatctttttaaaaaatataaaatcctaactgcactggaattataatagatgaaactataaataaacaatccacttaaccatttcccataatagagtcagagagagatagagatccatagttaaaccttaaacctcgaaaagccataccttaacgatgcagcaacaacgagattacacttcagctccctatcatccttattaccatctatttccaaaccctaatcccaaccccaaccccaattccgatcatgttcccacttcattcccttccgccccacctttcaactccggttacgttcccaacgattactcttcttattctcaaaatcccgatcctgttactgttcatgtttctccctctgctcctccttacacccctcctgtaaaccctaatttgcagtccttcaattccgcttctcaggccactccttatcaacctctgacccagcagcaatcgtactttcccacgtacagtcagcatcagacggctcctaattatgctcctcctgcaccttcactgccttcaaatcctagccccaccctgaattctcaatattcgtctgtatattctccttcatatggtcaatcgggagctttggtaccgcctgtctacgataatccatatgagaattctgtgaaatacgatcagggtagtggttatttggataacagatacggagattacagacagaggccatggtccgatgtggaatcggatctgtatgggaagcgatatgattcgggtcgggacgatgaatttgtgggtggagtttatgcttaccaagggaacaaggttgagccgtatgggtctaggggcactgcgcctaataagtcatcgactttgttcgacgattatggtagagcgattagtttctcttctagtaaggactcaagttgtagttcgagcaaaattgtgagggaggtccccaaggcggagatacagcaagatgtgaaaagtgggcttcagaagtttcgcgttaagctcttggctgaaagtggaggacagagtaccacggacgttctttgccaggttagtttgccagaaaatgcaccaattctcttcctttttttatttgttcttataaatcattcatagctgctcttagttctagatagcaacaatagaatacgtattgcaatcttcttcatcatgtgaattcccccttaatgcattgctgttctgtgtctatgtagtgtttacaaatacattgctacacatcttgaaactattatatatttttaatgccataagatgattacaattattaggtcatcttcatatgattagagttaccgtgagtgtagaatcttgaacaaactatctattcttttcatgtcaattacttttttaactgatgttgatttcatattcttcttgaaatttttggcgcttcagattggtttggatgggattcgcatgcttgatcctaataccagtcggacattgagaatatatccccttgaaaccattagtagatgtgaagtaagtttgtgttaatatttatatatatttaatatgtatttgttataattctgcagtatgtttcttcttattattattttggtttgtgcttctatatataaaatggtttttttttcgaatgtcatacaggtgatggattcatctaccttggcattttggtcaaagagctctgtagacattgagacaaagcgtactagactccagtcaaatagttatacaaccagcattcttttagacattgtcactgctgctactgtccaggtaaaagtctttactaactaatgaacaaatatgatccttttcatagtagtgttattatattttttgattgactagtttggtaatcaaatcattgacataggtaagagtctgttttgaatccttttcttttttctgaagtagtcacttgactggttttgtaatcattgacatagataatatttttttaattgttttttacctgaatgtaagggctgtactggttatacaagtctatttgaggtctttgttcttttttgcatctttcattatgtaatcatttgatgaacaaggtctcaaatgaatcatgtttcggtttttcttcttattttttttttttaaatagcgttttttttttatttttatttttttataggcgggtagataatagaacaattgtgtttgggtgatgtgatattcgtagaaattagtactcataactattattggacaattcccaaatttgagacttcctttttattggacatatgaagcacatgtatttcctgtctccctattttgatatgcatgcaatttttattggtgatcactttttaaagacttttatattgcccaggggaaggaaatgggtggaagtattatgccttcaaagtctttcaagttgaatgaacagtccacagagaaaaagaaagggtttactgattggatcaacttagtgaagcctgtcaatgaggagaaggatcattgggtaatttgttttctgaaagcattgtagtataggttccccccttcttttattgtcatccaacatcttttggaattttgtttttgttaattgctgtgttgttttatttaggtccctgatgaagcagttacaaagtgtacatcatgtagaacagatttcggggctttcgtgcggaaggttgcctttcatttcaagttttttgtgctttttttgaacaatttaagttgaggtctgacttttttcctatatcagcatcactgtcggaactgtggagacattttctgtgataagtgtacccaaggtagaactgctcttactgctgatgagaatgcccaatctgttcgtgtttgtgatcaatgcatggtaagtaacattaatgccttttgctttttggtcaaggatggggggttatcctttgtgttggtggatttggggacaagtaaaaagtttatgttagataaggtttaattgtttagcaataataaatcattatgttgccgttaacaataatatcacttacacgaattttttataccaataaagagcacaagtcatgaaaatatgaaaagagtcaattagatatctaatctgatttgctgagttatttagacatattttgatattgttggcgtgcccttcggagttcttagattttgttgcaatgtactcttgtaggctgaagttattcagaggctgaataatgcctaaggatgtcgcaagtaaacacgaggatcttgctaagaagcttcaggtacttatgactactattatcataatactaacatggttctttttataacctaattataaatgagagtactttgtttttttttttctttttgaaaaaaacttaatttgtagtttattattttataatgttagggttcatttggtacgtcttattacaccgtattgtattgtatnnnattatattgaattgtattttatgcaat

SEQ ID NO: 19309 - DNA, 5435 bp, Cannabis sativa
ttctttttttttttttttggtaattaagtgtttttcttttttctttttagatttgctttttttaccatatgttatatgcttcttttattattatttattttaagaatatgcctttttaaagcatattattaatatccatatagtttgcaatgagaatattcttctctctcatgatctactgtaattttgatattacaaagttaaaaaaatattattttagaaggattatattccaaaaaaggagtggcaagatatgtacaaattgatatataaaacaccattcacattttaattaaatgcatttaaaatttctacaataactcttataaaaaagattctaactttaatttgaattttctctttgtgagaaaatatataaatgtggatacaggcccgactttaagcataagcgagcttatggcccatctcgcttagaagtttcaaaaagatttcccttttcaaatatacacatatttttttttattgattttgaaattatataccacattttacagtttttttcttatatttttaaggattaatgtttctttataaaataacattgtttttatattactgtaacattatactatatatccataatgtgaaaacaatatataaacaatatctttgtagaacaacctaaaaataatagtccgtaaaaaagtaaaaaaaaaaaaactataatccataaaaatgttttgttgttttcaaatattatgaaataatccatgtaaaatttcagagtgttcatcctttcttttattgcattaattaatttttgattactaacctttcattaccactatgtaacaaaaaaaaagtgtactttcacaaaattaaaccaagaaaatgtcaatatataacaagaactacccttattagaaccccctctcaccaaaaaataaaaaatgtaaaagttggctgcaaattaaagcaaacttttaacataatgtagagaaaagaaaagtagaatttattctccactacatacatttttctcattagctcaaataaaagtttgaaattcataacactaattaattagtgtgctagtacaacaaatagaagtcattgcatataaaattggtatatatatatatgtataaataaatgtatactagctattatataattaatggtaacatgttttgtttactaccatattagttacaatatcattatttggttcacgttgtatggtaaccaattacctgtgaatgtatagaataatattagtaatcagttacctatattggccataatatgcatatataattaactagttacccaaacattaaacccttatctcaagagtatctatttatgattttcttagttttagattatatatgaatgataatcggtacttatatatgcatatctatataaatataagtagcgagttacccttatgaaggtaataagttaccctaatatggtagcatgctatttaacaatatcataaacaaaaagaattagaattataatatataggtaatcaatgaaagaagtttacatatttgcttaacaattgacctaaattaatatgaacaaaacaagaaaaaattgatgagaaaaaaatatattttttcctccccatcatccttacaaataagtatttaaaaatagtagtaaaaaaaaacaatctcttcggaaaaaaatattttcaaaaaattgaatttgtttagtcgacagagaaatatatatttttttatccattaattaaaaatattcttatattatattttattaaaatatacatacttttataagtgagttgtcccatatacacttactctctacataagtctagcatataatttacattaattaacttaaaaaatctaatgagaacatcatagttagtatattttaaaaatataaaaataaagataaaaattaaaataaataagataaaataaatatttaatataatttcctccatataagtcatactactcaggcccgtcacaaactaattggggccttggtccgaaacatttatttaagcttttttgaatgaagaaatttatgttattttaacactatatttatatctttcattagaaataatactctaagaaacttccctttcttaataaaactgaacaaaatttcattgattatatatagaatgatcatgaaatacatattggttacacaatagtgtgaaatttcttccaatcaagaattaatcacaaattttttatctaattaaatcatacattgataataagattctaacctctaagaatatatgaaaattttgtttaattgttcatcctactaattcccatggtgtctatcaaaaggcttaagcaaaccataagtaacagccatagccaaccaccctccaaccacaactctaaccgccgaaaccttaggccgcgacgacccaccaaaccgagcaccgccccagccaaacatggccagggccaaagtagccacagccacaatcactacaacacttgtcacatgatcaccaatcaacgcagccggtatcaaaggaacaaccgagccactcaaaaacgccaaagccgaagccgcggccgccttgtgcggattcggcaacacaattgacacaccactttcttctccaccaccactcacaattaacttctcttcgatgtcccgttgcgtagaaacagaaacaaactcccctacggccatactacaagaccccgctaaagctccagcaaggccagctagagacattgaccaacggtcggtcttagctgcaccaacgccgagtaatagcgaggttgttgagagcaacccgtcattggctccgagcactgctgctcggagccactgagcgcgttctaccaccacctctacttcgtcattagtggaggtggcttgagtagatttgggatcattagttttgaggttgtttgggaccatgtttggttgctcacaacatatttgttgtaatgtctgagaagccatttggaagtgaaattaaggaaagttttttctcttgtttttgtcaaatatgtgcatattttattggaattggagtttatatatttatatatgtatttgtatataaaatttcaccaaagagattgtattattttatgttattatgatcctaaaaaatgactcatatatatgtaagtaaaaacataatattagtacgtatagaccaaaataaaagtctaacgaggatatcccactacaaatgcttatctgcctaaaacgacaacgttcgtacatgtaatttttgaaaaatggcacctcgtggccccctttcttcatcattgcctttatacttattttagaattatatatagtaatgattctctgaactttagtgtgtactgaattgtatatttaaaattattaaattattaaaaatcctttcaaagtattaaagttatttgattcaaggattttagttcaattttactaacagtttccaaacataaacgaaagttcaaaagacataattcgatacatgtcaaaattcacgagtcacaatttgatacatgctaatgtttaaatgacacaatttaatacataaataattactacgttaacttaaactctgttggtaaaactaaacatataattgtattaaaatccttgaatctctaaaagttttaatagttttaatttttttttaactgatgttagaaaagtttagtaggcgcaattacatcttaaggtttgggagaaataaatcctagctaattaattatatgaaaagttgactcaatggaaatattagggaatttcataacttaattactttttatggatatcgttatctctcttattatcataaaggtacatggttattcttaacttattcatttttcttcaatttttccatcaaacaattgttttgaaaaaaaggctatatttttacacaaaaaaatataaaaagtataaaagcctggtattgtacttgtttggtttccttggatgtgtggtggcaaccgtggattccttggatggaatatgaggaattccgagccttgatggagagtgttagaccgaaagcgcccaatttgcgttgtgtagcggatcttatgtttagaagaacgagaaaatggaatttgggttacttgtgttttctatttggctcggaattaggccatagaatcagtaccattcaaattgataggaatggggatagtgacattctcatttggaaagattcggatgttgggcggttcagtgttaaaggggcttattggcttgatcagaagtctagattcggtgtgtctagtaaactttggaagtggatttggtattcgaaggtgcatccgcgcttgagtctcatgatttggagagcaatttctggctccttgcccactggagacagaattatggcgatggagaacaacacatgtccgatatgtcatttggcacctgaaactccagtgcacttattctgcagatgctcttttgctgttgctttatggttctctttccctctgccgttgagaatggatgatatccctggcaattctttgtctgaggttatctttaatctcattgatcacttggactctgagggtagaaatcgactgctatgctgcactggaatcgtgatggattgtatttggaaattcaggaattcgctgatgcatcctcctagtgttgttccgagtctagataacattaggagggatatcaattgtagattcgctgaaatgtcgaatcaggagccgggggactcaactctaattcattctggtttgtctaatccctcatttcctgccttgcgtttggacaaacgccttttggtggatggttccttccttgaaggcaagtatggttgtgcaatggtggctctcgaacaaaagtcgacgcactggtggtatgggcaatcgtcgggtacctgtgatttgagcttggaagctgagctgaaagctgtccttttcgggttgcagtgggcaacttcgatcggttgggataacttcactattctgtctgattcaaaaattctggttgaggctatcaacttaaggaagtcgcctcattggaaactcactgctctgttctcctctcttatgcatttgttgtcctctttctcttgttgttatgttattttcattagtagggacttttttttacttatgttgatgttttggccaaggttgcctgtttgaacttttcttcagcgcagacctctgttggggagggatttccttcggtgaatcccacttctatttggcctttaatctaatttgaactgaggttctttcaaaaaaaaaaaaaaacttatccctaaaattttcccttagttcaatatatatacataaaaattcataaaatttataatttttttcatataaaatacttctcaatgggtaatcaaaatataattataaatattaattttaaaattaaatcatcaaatttaatccaatgacaaaaatttatgtttttatactaaattaattacttaattaaaagta

SEQ ID NO: 19310 - DNA, 3987 bp, Cannabis sativa
aatatgaccctcttttaaccaaattagatttgattttgaattacattaaacttgctctaccatttgtgcaagcctaaatatttttataaatatatttttcaattgaataatttatgagcatattattggaggtggggtgggttagtacatcatttttctttgttcttatggttactccaattttcatatctatatgagattttcttttctaaagtatttatttgaggcaaacacattcctatctatgcatacaataatgataattcctttttgtccttttttttaaatgtgaaagagagaccccattagtaaaattcacatatatataaaagaaagaataaaaaaattctataagtgtaataattacaacctcttaatacaatctatggttaatgtttatgctcgaaattacatgtcagaatatttttttttcataatccttatagttacaatattattcctgtaaattttttaaaaatttcaaataatttacaataacgaaaaatcgaattcttgatattccatctactatatgtatttaactaatttcaaacttattttcgtcacggtaaattattcaaaatttttgaaaaatttaaaaaaaaaaatattgtaactataatgaatatttctttaaaaaaatatttaaacatatattttcaagcacaaaaattaactaaaaaattgactataacactctttaaaattctaatttgataaatgtttttctcttttttcttttttgagtttttcttggttacaaagaaaacttttttaatttttcttttttccatttattacagctttatttattatctctctcccaaaaaaagaaaatacaaactctgttcacacgtgccagttctaacacgtgcagtatctcttccatttttaaagcagttcaagtatagttggacacttctcagtcgttaatttatattctctttttttattattattattttttttaaaaaaaaattaatttctcctaaaaatatataataattaataaataaataaataaaaacccaataatatcatcaagcttagctttttccttcacaatcgtccactttctcataatccaatttcctctcctttcccggagtaacctcttcccctctctctcaatttttcttctcttctctctcatacccagaaattttttccgagaaaaattcaacctttatttagtttcatccgagaaaaatcaatccctgttcttaacccagatccaaagatcgaacctttaaagcgtttttcatgtttataatttcttagccttcataatcgcaggcgatagattttcattgttggatttgaaaatcctgttttgtactgtgtctattctttgcccaaacagaaattttttctctgaataattttcctttcagaaaaaataatccttttttctttctcttgccttttttgatagtcagaaaccttttttagggttcgattgttaatgggtttcgtttagattatcaatatagcgtgccatatttttattcttaggaattacatacctttaagcatttttatttttagctttgattcagaggatataggttttgaatcattgggtttgtggtgaaaatttgatggatctgagattgtattgctaacttaaatattagcttaaagattaggaataatatccagatggggaatgatctttttggttgaagggaagctagttttggatcatagttttggttgttctgaattgggattgtgttgaaattgaaactcaagaaaaggtgaagtgggattttgagtttatttttgtatatacatatatattttcatttggggatttagatcatggagcatgttattgggggaaagtttaagctgggaaggaagatcgggagtggatcttttggtgaactttatttgggtatgtgattattaatatgagtatttctttgatttgttgtattagcaatttggaaagtttacatttttatttaaatgctttcatgggtctttttagtgtgttttgtgttcatgttgctttgtctttgatttttcttcttacagggattaatgtacaaaccggagaagaagtggctgtcaagcttgtatgtgatcacctactttttttttattattattttcttactaattgttgacaagtccttttagttttttttttttattattattgtattagctgagtggtgattgtcattgtgaatatttaaagttctcttgggtactatttacttaattatacatgtatggatatgatataatattgttaacatttgaagtagctgttcagcaattagcattaaaaaatcagcttagattttagttgagcagctatgtgtgttgtaaaccccttatttgtgcatgtgcatgttgctgtcttaaaacacatttgctaagatcaatttcaaagtactctaggacttgtgcatgtatatctcttttgagctttattaatagactagttggtttattattatatcatcatcatcatcatcatcctgcctcttgtattttactgtgatataatgtcttaaagttcatctgtacttgattttctttgtctcagtttccaatacaatcattccatttttaccaacttaaattttcttggtttccaggaatcagtgaagactaagcatcctcaattgcactatgagtcaaagttgtacatgcttcttcaaggaggaagtgagttttcctttcaaacatatcagtatcttttctgttagcatttcggttttgactttgagaattaaagttgattattgtagttcattcgtattgatttattatcttatatcatgtagcgggtatcccccatctcaaatggtttggagttgagggtgaatacaatgtcatggttattgatcttcttgggccaagccttgaagaccttttcaattattgcaaccggaaattcacgttgaagactgtgttaatgcttgcagatcagttagtaagttaactattgccttgataaatggtttctaatgtgattgaaatggtttccattctcattttttcaccctgcattggttttcgtagataaacagggttgagtacatgcactcacgtggttttcttcaccgtgatattaagcctgacaactttttaatgggtttggggcgcaaagctaaccaggtatatttccttagcggctctgctttgacatgcatttcatttttctcaatgcaagttctcaatttagtagaacataattccatccttgtattgccgttggaggacattttatccaaaacaagttttgcttttctatctcacttcatgtcaatggggactgtacaatgttaaacaccatggtgattgtactcttgtaaagtatgtagggagcatattgagattaagatagaaacaattggtaaaacatgattatcaatgtttttcattgttcaatacagtatggaggatggcattggttttggaatacctgagtaaactaaggtttgatctttctattttttggaaatggaggattatttaaaagtagaagggagttttatgtaaaaataaactaggatggttggaaccttggttattgtgttacggaaccttaattttgaatctatattttcattgattgtgatattggacactaaacttagtgaacctgtatgaattggagtatggacagtttatccttttatgaatcactttcattaaatccacctgaccttgattatgctatctatcgaatcgaggatatttaacggttttatccttttatgaatcactttgctaaattcacttgaccttgattatgccatctatcaaatcgaggataattaatgcacacagcttaacactctgatttttaattttttaatctttattacaggtatatatcatagattatggtcttgcaaaaaagtatagggatcttcagacgcacaagcacattccatacaggtaacagatatttcagaaatattaagaccttaagcaaagtggaatgtgtttatatcgttacta

SEQ ID NO: 19311 - DNA, 4465 bp, Cannabis sativa
atatatatttatataaatataagagggcaggcaggccttgatcttaccaaaaagtcctttaccgcttcataggggtaatggggttttattatcatcttcttggactgcatccattttggatttgattgactcgtggcctcattcaaaactgtagtgtctgtttttcccttttgagatatcttttaaatctttaagatcttatctgtaacctcttcatttgattgggtggtccttttttgaccttttggctattccagtgcttgagtggtgaaagtgagtaagtgagtggtgagggtagtggggacacaaggtggtgttgactggaaaaagccagagagagatatataaaacacttctgcattttggttcattgtcattaagaaagaaagtctttaactttgtttggttttagatggggccctttgccttgttaagtctccaaaatgtagttggggagcattgaatattttaattaagaaaacataactaactaacttgaaaaaaggtgtaattctattactcataggaatggaatgaatgaatagattaattgctaattaggatttttactgttaaattttttaagccgttaaaaattttctttaaattattgaaattattagatttaagaagttttacctaattttattaatgtggcaatcatttatttactaaatcatgtcccccgaattttaatatctattaaatcacgtcccttgtgcttcttaaattttcatccacgtgagactttcaaatgtccttaaatctaacaataccaatagtttggagagaatttttaacgatctgaaaagtttagaggcatgatttgatacatgttaaagttcaggaggcaaaaatctaaattaacttaaataaatatccaatagaaatgatgaaagaacaaacttaactaatattgttatgattgttttgttttgtttgttttagttggctgatgtttggtcatgtggagtaactctatatgtgatgcttgttggtgcttacccttttgaagaccaagatgatcctaagaactttagaaaaactattcaggtacttttacatacaaaccacttacttaaaccgtggttgttgagtaaccaatgagtttctgcttttagtacagagctaaaagcatagaggattatggccttgcttgttttggatgctgagatgctcatattgttttcatttatattttcacagaggataatggctgttcaatacaaaatcccagactatgttcatgtatctcaggattgtagacatctactctctcggatatttgttgctagtccaatgagagtaagtaatattattatttatcattgtattctaataatgtatgcaatttcatgaaacaacagttatatatgattgtcaatctctgcagaggattacacttaaagaaatcaagaaccacccttggtttctaaagaacttgccaagggaactaaccgaggcggctcaactggtgtattatcagagagaaaatccagggttttctctccaaactgtggatcagatcatgaaaattgttggggaggcaaggacaccgcctccagtgtctaggcctcttcgaggctttagttggggagaagaaggagaagatgacgacgatgatggcaaagacattgatgaagaagttttggaagatgaagatgaagaggatgagtatgacaaaagggtgaaagaggttcatgctagtggggaatttcatataatctaaaatatgtttagtttgtttgtttgtgtatctgtattatcatcatcatcatctcctttgtctagagctattatatttatgactacaaactttacagtactaatagtttgttagcaaaaatgtagaagttatagcacttatttaaatatgtaatgtctatgattttgttaaacaataaattggctccctcccccattgtaatatgtgtatttcttcacttgtttaactttaaaatatatatatgtggttcattcaggactgttttaaaattggaatttatgctattgtgttgtgtattatacacttcaattaactaaattgtaaatattaattgtttacacaattagtaatgaaatcttttattttttattataggtttagctcatctatgtttaaggctgtccttgagttcattcatacttatcaagttttaagtaagtagatataattaaattaaacatcttctcttccatgagtcaaaattggtaacacttacaaatattcttatttgtttgtatttattctgaataaatcatagcaaagcaaatgctttgttgtttgaatttgaataaagaaatgaattatgtatgatgtaaattctgaatataagaaggaccattttcacactctttgggatgcaacgattggagatgttgttaggagtaatagtcagccacacgaatattcaacctgcgtagccaaagagagtgaagagtcatatgaaacacatcatatctcttaggaggatcattcactacaaagtgtctttgtgccattttaacacgccgttgcatcctcacgtaatggctactcgaaattcccatcaagatctccttgattcgaggtatgtccttcaccttgatttccacactaaaggctttccaattcaatacatcactgaaaggtgggatgtacccatccgaaatcaacacaggcacacattcagcatagattgcttctacaactctcgggctcgccacctcgtacccgctcgggcacaagcaaaacttgctgttcctcaacatctcaatgtacgagactccacgtgggagagtctcgtacacttggatgtctgtgtcattgttcttccatctttttaaaagtaacgatctggaagaaaaaaatcaatcaatcagtaatgagtggagtaactcaaaaagacaagacaagacactcttatattaattactaccttatgtggccgtggagacggcctgcgaagaatgctagggtagtcctctttgaaggagagggcccgccgaggcttgtcatttcgccggtgaagaggttgatttccgggagggatgcatctttggatggcttgaaaccttccgaagtgttggcattgcataacacccgaatggagttgtggaacaaacttggcacgaaagatgatgtttttggtccctgcatgaaattaatttaattagaaagtttaagagaaaagtaatcaagagacatgcatggttaaaaattaaccatttacttttttgtacaaacttattctttatcatttacatctaataatacatacaaagaggtacactactctctttccataacgccaaaacactatatatatagtatcaaaacattattattttttatgttaaacgtgttagacatatttcactgttgatattagaacgaatctcagatatttttgaatgtagcaatagtattgggagtgctcttagccatatatactttcaggtctatagtacatccgaatttcgatatctgtttcgacacttagagaattttttagtttaattttgttatgattctgtatgttatagttatttagggttatctgtaaatttttaaaaaaatttgagtaacctataatgttaaaagtaaaatttacatattttattacacttgagactgttttttcttatacacgtagtaagtaagtatttaaatcttattttcaatattgtaaactatataaattttttttaaaaatttacaaataattttaaatagttataatatacgcaattataaaaaaaataccgaaaatgataaaaaatctaccaaaatctacaacataaatttcctatactttcacttttattcaatcatgaagaaagaagaagagtttgaaatgacccatgatgagaaatgagaaaggtaaaaaagtagagcacattattacattcacaaacacaacactatgacttttaaagaagaaatgaaattgggcatagcaaatagcaaatgctacctccacacacacactttacacaataaatgtaacaccacaattatttattcttattccaaaacattcaaatacaaaactttattctttatcacttcttttttaattttacattattttttaggggtaattgtatatgtataaatataaaagaaagagataagagagaagagaagaacacattgttctctttcgataaaaccaaaacaataccatattatgttaaacgtgttagtaataaggaaatatcataactggtgaggtgatgtttaaatatcagttccattcaggtacaaaatagatttttatttatttatattcctaattgtgtaatatgaccattataccctctttctctcaccacataaagaaaaggctaaagctgcaccacagtaatttcatctagggacgctacacagacagagacaacacaatatcatgccaaaaacacaaacttgcaagaaaaaaccttcttcctttattatatctttatggaaatttctcattttggt

SEQ ID NO: 19312 - DNA, 2471 bp, Cannabis sativa
cggccaaacaaagaaagctacattagaaattgtttgctctcgttaataatttaaattaatattgcttaagcaaccactattaaattagtccaatcacacatcaaaattttgttgttttgctagctctatagctctatctgttagaggtctatttctagtctaccgttatttatttatatgtgtttgattgctgctattaaattaaattacgtttctgtcctttgcgtgattttcattttgctagctaaggacaaaaatataacaattacttttcagctgtagtaagaagatttaaatataacaattaatgggatcatatagtatctacctattaattgattattgaaatgttaataatgataggggaaaataaaataagattgtaataattataacatattagcttcgcgttaaatatttcaagctggctttgatttctattcgaaccataacacgacaaattgcatgatcagacagagttgggattaatatttaaataattaagaacttataatttacttgagaaagcttattgataataattacgtgccaggatgtctaaacacacagatttatttaataagaagaaaaaaaaaatcttatgttcttccattttcttgtccttagtatcacactatattgtgatgtgtacagggcattgatatcgatatattatttatcttagtcgaagaagacgacgaacaactcgtatattcatgccacttcccaaatctttcatcacttgatatataatttttaaatattaaaataatttgaaaatagagaaggattttttaaatgtataatatagctctacatctatatacgtgctaagattctgataaaaactaatttatgattcaactggattgggttggcgtttaccacgtaagatgagaaagaatttaaacaggtttgcctgacttcgaaatgggtgattttattattttatttctcagtttgttgttattttccttaaacgatagggtttgagtgcacgaaaatgacctaagtctatatgtgcatgtcgatggatgaagagagactatcatacctgaaagtgaagcttttgaacttattatttaaaaagagtatattataataatggtcttgttctactacacatgcatgaattatagtgacatgttctaattagtaaaatatgtgttatagccataggagctatatctacatttatgttgtatgtaccgtttggctctgcttttgtccacaagtattgtgaggtgcgcaaatgtgcgttagttcatgcatgtcaaattgttagctttctctttcggttatatattatatatattttttaagttcttattattattttttatgtgataaaagttcttggtatgcactttactaatcgatcaatcacgtataaattaattaagacgaattttttttattaattattatgttggattataaatacgtaagttcttcattaacttaactacactttctggttggggtattattatgatagtacgagaatcataacactaggttaagtagcacagatgcatgccatttgcatttcaaaacaaaacaaagttttcaatgatatatgacgtcgagaagcaagtcaataaatcttagcagataataaacaagtacgttattgagaatattactataattataatcatctatgaattacgtcctactatagaggaaaaactggttatcatactagaattgaagtgtctctgtgcttcgtctcttaattcatgctcacgtatttgtttaaataaactcattagaattgggatttatattaattattcgcatcacacaattattatctcaaacaattaatttcgttccacacactgaataagtgaatgggtttcggtggtagtacttgtatcagtaaaagaatctttcaagtactttcttttaaattaagggttaagggtttgtttggtttcataatttaaaaactgttttcaattttaaaaaataaataacagtttttaaaaattaataagtttggccacttactacaaattgagttttaaaaaactagaaaacagaaaacatcaaaatattattttcaatattcaaaaacaatttctttgtttaacatattctattttatatttttgctcatatactcggaccctagaccggaaattgaacccagaccccgaccttgacccagacctcggaccccgaaccccgaacccagacccggatctcagactctgacccggacgtagacgcagacccagacaccagactcggacgaatctcgacccaaacccaaaacccgaacccggacccaaacttggatcctccccaaacccggacccagacccttaacctcgactcgaatcccagaccctagaccttggctcgaacccagaccctgtcctggacccgaatctcggaccccaacccgaacccagactctgaaccttgacccagaacccggacctagaccccaaattgggacc

SEQ ID NO: 19313 - DNA, 2646 bp, Cannabis sativa
actaatttactaagaatattcttaagtacctgatagatgcagccaccaagaccaatgccctcaaaaaattgatgaaaactaagagctgccacaagaggcttgattatttttggactttgagaagcaccaagtgacaccccaattatcactgaatgaacaactattcctatctccaaaacctgttaacagctactcatatagttactaacaattacaattttttttaaaaaaaaaaaaaacaaagcataagtttttgtttttattcataaaaaaaactgttgaacaccatttaacatataaagttagttgacatttattatcaaaaataaaaatgagaaggatataatttgaaacctcaggcaggccaatactaaattcacaaaaagaaaaagcaagaaacataagaatctattataagataagtaaaagtttcataaagagaaataaacatgactggcctaacaaagaaacaaaagtaaaaagccttttttgttcttcttttcattttcttgaaagaaagatcaaagttatgtatttttttttacttacttgagagatgatcttgtttcgaataatttctgatgaaatcgatctttccaactcgaacgaattactagagccatgaacatgaacatgatgatcatgatcagtagtgatcattacctcatcagaactaaaaggctgagctttattgagctcagacctcttatggtagccagtagcaaaggactccatcatcaatgtaccaatagccgaaagcatagccacaaaccctgcaaaggggaacttcctccatggattttcactaaggcaagggcttgtcaagctctcatatgcatcgggaagtacatggatgaacccggttgataaaataacaccggctgcaaaggccttgatgaggaagtacatgtcgttgttcgggtttagagaaggcaaattcttcaccaaaaatggaagacatactcctagtgcaccacttgataggacagagccaatggcaatgagtttgtatgaaagagcttctgattttttatggtcttcaagttgtgtttcacatgtgcatgttgaggataatactatggttggtaatgatagaacaagggtcactacaaagattgttaaatgattatatggttggaataagaatttcaacattttttgttttgaggaaatttagatggaaaaacttgagtatataagggaaataactaatgtgagcagatgccagttctttgctgaggacaaagttttgaatgacatttattagaaaattcaatagtaaaatctctataaaacaaaacaaaagattgaaattaagacataatggtatcttagcttaagacaattgataggaatatgacaagagagcatgagtaattctttgctgttatttttattatgcttaattgagaatctcattttcagatatgtggacaaggacaacacatgaaattgaagatttgcccatattagaatgtgaaggaatcttattcttcttcttgggttctcttatatataatttatgtacacaaggattgcctactttgtcaacataattttatgcagacatacaattatacaatcctaaaagagatgtaattccaagaatgtcagcaaattgtgtagggaatcttttatgaactttgcagcatagtttttatactatttatgctcattgggaaacctcacctcaactataatcattcttataacacttgacaattcttttgaagcatccattaaggagcattattttttatatcatttagaataattcatatttttaattttgattttttaatcattaatgtaaaatgagttaaaggtatttaatttgtatttatttctcctaccaaagtaaaatttataagctattattttattaaattgttcacattgcacattttagtggaaaaacattctgcttatctatataatatatgtatattttaataaaataccataaaattattttttaatataataaataaatacacaattaattattataaataatttaataatgttcaaaatatttttttatttatttttagtgacaatttttcaaatgatagcgaaatgactatttaattatcttttaattattgaattaaatattagataatctatttaattaaaaagataataataaaataaaagaatttaactaatttatgtatctattatttatatttgaatttgaattatgaacttaattaaattagtcattatcttctattttaaataattaattaaaatgtttatttatgacattatatatgatatatatcagaataacaaataagatagttaattgagaaaatatataatacattctgagagaaaataagattgaactttttcgctctcactttctttcgcctacttgtatgccccctctctctctctctcctcatcttacacgccacactcactgtagtatggtgtgagttttgtgatcatccatgtctcttcacagtatcttataagttgagaatatactgtgattatataattgtactcattcgtcagaatctaatagcctactctattcctaagtgttgaggctggcttgaaagattgtggtgtgaactctttagcaagtttttgaattggatattcgatataatacgaaaaaataacgag

SEQ ID NO: 19314 - DNA, 5294 bp, Cannabis sativa
tattattataagatgaatttttacaaaagattaagaatattttataaatagttattaaattaaaatttaaaatttaacatttaattgtattaatagcgacatataacacatttaatggtgttaaacatcactgtgtacgtcttagtatttctctatctagatagttgtacaatttactatcaaattctatataatacctcttcatagaaagaaaaaaaagtacctagtaaaaacgctctatgtaattagattgtatcctctccatatttgatcctcaaggaaacagaattgatgatctgattaggataaccgaggtattcttagactactataagcagcttattggcacaagcatgacaaatagaaggagggttatatctagtgttctcagcaatggtcccctggtaacaagtcaacataaagatatcctcctgaaacctaatacagatgaagaaattaaacatgccatttttgacatttcatgagctaaagcaccaaggccagatggttactctagctatttcttccaagataattggaatttagttggaggtgacatctgtgatgtagtaaaatccttaggaaatcaattgcacaactctcactatcatcccaaaagtcaaatgccccaatactcctggtaattttagaccaattgcatgttgcaatgtggtctacaaagctacaaccaaggtcattttctctagactaaagaatatactacctgatattgtggctcaaaatcaaggtgaatttgtcaaaagaagattcattgcacacaacataatgatttgtcaagacttagtcagacattatgggaggaaatcatctaaagctacttgcatgatcaaacttgatttgcaaaaagcctatggcactattgaattagaagaggttctatgggatttgctttttccagaccaatttattactcttgtaatgaattgtgtcagaactccaaaattctcttttttttcaatggatccttctatggattctttgaatcaaagagaggattaagacaaggagatcccctatcctcccttctctttgtcattggcatggagtatttgacaagaatcatgaaaaaagtgggctgcaaagaggattttgcttttcatgagagatgtgatgctctaaggctcaaccacctaagttttgcagatgatgttttgcttttttactaaggtgactataaaagcatcattcttttgctccaaggcttgaagctcttctcagccacttcagggttacaacccaataaaaccaaatctgcaatattctacagcaacatggcagagcagaagttagctgagtgttggatgcatcaggtttctcaaggcagcatgctccctttagatatcttggtgttcccatatgcactaagaaaatctcgaaccaataatgtaatgtcttgctagaaaaaatgacggcaagaatacaatcttggagcaccagaaacatttcttttgctggtagagttgtgctcataaactcagttctttcagcaatccatgcatattggtgccagattctcaagctaccaaagaatgccattcatgaaattgaagctatatgtagggcctttctttggaaagggcaatacatgatgaaggggctagtttactggcttggaataatgtctgccattcaagatcagaaggtggttcaggcattaaaaaaattgttgaatggaattcagcagctctcttcaaatatgtatgggcaatagcaaacaaagaggacaacctttgggttaaatggatacacaatgtgtatctcaaagagaaagattggtgggagtaccaagctcctagccatggaagtcagtactggaagcaaatagcggcagcaaagaatcaagtcagatcacttactgatgcacaacaattctctcaaaacaagtatcgaatttcagatggttatgatttgatttgtcccattcaaaacagtgtgtatttgtgtaatgaagtttgggggagattcaacatccccaaacacagttttatactgtggttagctattcaaaacaggctcaagaccaaggacaggctacagagatttcaaattgttaatgatgctacctgcaatctgtgtttgtagtaggatgagtcaattgagcaggctgctaaagtggattcacaaagccaaaatcaacaagttcaaaaagaaagtgttggctgctgccacaacccacttgatgtacatgatctggtttgtaagaaatgatcaggtgtggaacaaacacatagaaaatagagagatgtaattgtacaaagaatcaaaaatcgtgtcaagcatagagcataattggtttggccaaaagagattggtcaacaagatagagattggttccaaaagctgtaaaaagttgtacacgaggtcttttgataaaaagatgctctttcattataatagattgtaattattttgtggattaataataaacttgctgatttataaaaaaaaaaaaatagattgtatcaaaatagtagctaagaaataaggtaaataaaggaaaaaataaaaattttaagttctaataaagctgacttgtgactattcttctgaaagataaaaaaaaaaaaaaaagatttgtaatactgcaactaacttaatttgggtgaagtagatgggcacaatataatttgttaattaacctttgcttttgttttggacaacaaataaagaagcatgaatgatacttattaatactctacataaagttttgggacacctattcattaaacaaaaagaatgcagtattgaccattctcattagcacttctagtctgtatcattagtattattaggacacatctttaataaatgttcaaaatggcataacacttggtttggtagaaaaatatatatagatataaatattatattaaaaaaaaaaactctttaattaagaggaaattgaagtatgagattatagtttcatatatacttttagggctattattgaactcagaacttggtcggaaaagaattgggttggatcagacatgattatatatggttatggtgaaaataattatgtgtttggttttaaaatagattgaactatttaagaaaacaaaattatctgtcaactctcccttttctgagtcaacaacagttccaattcttgttaatcaacaatcaatgatcacaaaagccaaaaatagtattagaaaaccaaaatcagctcttgataatcaacaatcaatgattacaagagccaaaaatagtgttagaaagccaaaaacattcatgatagctctactgcctaccaaaatctcagaagctttggttgatgcaaaatgaaactctaccatgaatgaaaaaatgggtgtcttgaaaagaaacaagacttacattattgttcctcttcctgaaggcagaactctaattgggtgtaaataggtgtacaaaatcaaagagaatcaagatggatttgttgacaagtgtaaagctagacttgtggccaaagggtatcatcaacaaccaagatttgatttttcagaaacatttagcccaatggttaagccttgcacaataagaattgtgcttactttagatctatgcaactcatggaaatttcactaattagatgtcaacaatgcttttctcagtggagacctcactgaagaagtttacatgcaacaacctcctgggtttgaagatccatctcaacctcatgttgtctacaaacttcataaagtcatttatggcctcaagcaggctccaagagcctggattgacaaactgacctctgttcttatcacctttggttttcaatcaaccaatctctctttatcaagcatcatcttggtcaaaccatgctcattatcaattatgtggatgatatcgtcataacaggcagcaatccttctctaattttagcatcgatttctaatctgcacaacatttttggccttaaagacataggggaaataaggtatttccttaggattgaagttattcttgcagaacaaggtctacatctctcacaaaccaagtacttaaaagacctcttgttaagagcaaaaatgcagtatgcaaagccaaattcaacccccatgacttcttgtctcagattatctgtgcaaggtagtgatcttgtagaaaatgctcaattctacagatctattattggaggtttacaatatcttattgtcactagactaggaattgcctagtgtcaataaggtatgccaattcatgcataatcccctacaatcacattggaatgcagtgaaacgaattctcaaatatcaaacaggaaccactgcatgcatatcaaaaaattgagtgctttggatttgatgggattctgtgatgttgattgggttgttgatcctgatgataggaggtcaaccagtggtctctgcatctatcttggttcaaacccgattgcttggaaatctaagaaacaatagaagtgtcaaggtcttccactgaggctgagtttgaagttttgcaagcattacaacagtaatatcttggatccaatctctacttggtgaacttcaagtgtcactacaatgcacaccaatagtttggtgtgacaaccttagtgctgtgttactggttgcgaatccaatactccatgctcgaaccaagcatattgaattgtatctctactttgtgagagaaggtcttaaacaagggtctagaagtcagacatgtgccagcctatgaccaaattactgattatttaaccaagacaatatcaagctctagattttcctttcttatagagaaattcaatgttgaaagctcttccaacttgagtttgagggggactgttgagaatagttagtttccaactattttctgttagagaaattagttaattctgttagtttttagttgtttgttttgcttcagttgagctataagtctcattgtatatatactctgtattttaccttggtaatcaataacaaaaaatcttttcattctattcattcttaattttaacagtttttatgttattgtttaggtgtttatagttgtttttctattatttttacgtatctttttttgtacattattgtttggtttatgtgcatttttatggtgtatatttttagttaattccacacattgttttgttgtatatatgtgtatttattttattatttttatgttgttttttagttttcttttaagtggttcttaaaatatttttttattcaacagttagtttttagttattttttaattgatatatatttttttatggtgtatatttttaatttcttccttacaattttcttggttgtatgtgtgttgttttgtag

SEQ ID NO: 19315 - DNA, 3653 bp, Cannabis sativa
  modified_base (1228)..(1229): a, c, t, g, unknown or other
  modified_base (2829)..(2829): a, c, t, g, unknown or other
agaaaaggtaaaaaagttgctttaaccgtgtgtaggtttatatgtaataaagtgtataatttgtatttttggtgtaaaaatttctaattaaaatgggcctgattttcctttcttatcaaaaaatgggcctaaattaagaagaggaaacttacaagaaattacactatatacctcctttaacttcacgtttttaatttttaccatttctttcaaaatctattatgtttatctctttttttaatcattctatcaattttacccttatcatttcatgctaatttttattcttctttaatcaaaattttgctccaactttcctacaaacctacacatacatttacaaagaacacaaaagtattatatttgaaactatgtcttagttatgtgagtgtttgagaataatttgagtacaatactcataaaaacaggtatatttgaattaaatttatttggaagtaaatttgtttaatgtatcaaaaaagtagatatttttcaacttctccccatatactagctttctttattcttttttactttaatacggtttatactgtgttttttaatatttttacttttgtactagaatcacgcctagaccatacccatctcaaccacacgattacacgaagataaattacctcaaccacaagaaaataacataacaaccggaaaactaccattaattccggtaatgacaataagataacatcaatctaactcaaaacaagtagaaaacaaccaaaatacttgaaattcaaacagaaaaaaatggtaagaaattgaaacctactaatttgaaatgtaaaataataattaggtaacacattaatcaatcacccaaaaaatatataaaaaaaaatcttagactaaggaaagaaacttaactaaagtattatatagataagaacttctccaaggaagcagcatttcatataaatgtcgttcctttttgttccaacaagggaccatcaaagactacattttaagtttaatgctacagtgcacggcacacgatataagttttttttttaaaaaaattaaaattaatatatatatatttatattattgatttatttattaaattaagaatttaattttgagaaattttacaatgcatctttttaaaagtaatgtattgtttctacacctgacaaaatttttttagtccaatatttttatagtcgtgcatattataattatttaagatatcttgtaaaattttgagannttcagaaaaatttaacacgccaaaaataatgtatctttctaaaagtggcgcactgatgtactcatacctattttagcattcaatagacttttttagtctactattattttatagtcgtgtacattatagttatttaagatatcctgtaaaatttcgaaaaattcaagaaatttaacacgccgaaaaataaagttcaagctgtttgttgcacgcgtcacttttttatttagaggggtacattgtggtgattttagtttaatatgatattatttttttttaattttattaaaaaataatataataataagaaatatttttttagtgtaatttttggtattgtggttggaatggtaatactttttgacactaaatttggtgtgccccttggagatgctctaacacttaaaaactatctaatcgatgtgagactttagtttgtatatgtggactattttacaaacgaaataagaagaatgtgtcttacaattagaaaaataggaaaacaaaaaaaaagataagatgccacataaactatttttatgctttctttatatatatatatatatattgatttgttattagtatattgtatcgtaacttttaaatacaacgcaacagaagactttatgataacttatgatgttacttgatatgttgaagtttattaagtttaaaatttactatttcttgttataaaatatgaaaaagaaacaaaaaagtaatttttaatactggttgtcttgttttggagaccgtaaaaaataagagatatctaaatactagaggaaaaataaaaataaaaactaagagaaataataaatttagagaaaaagaaaaaataattataataaagaaaatattcaagttgtgtagaaggatttccatctcttctttgtcatgtagaacgaactaaagatttaataggttataaagtggctcgcatagcaccgtcaattacacacctattttttgttgatgacagtttactcttctgtcgggcctcgcaacgatcttgtcaagcaattaaaaatatttttaatctatattcaaatgcatctggtcaggtacattcattaaaaattatattttatgtgatagatagaacaaacttgttcttaaggttaattctaaattctaatatatgactggattgtggtgttattattagccttatcaccattttgttagaaaacctgacaaaaataataattttaactgctacttgttgtttgttttgatttggaaatttaagtgtcctgcctcttccttgttgaattacttcaaatgttattcattgacctcgcttttagctaacgatagtgagtctaattttgtaagcgacaagtagtttaatacgattaaaatatattaaagcaaataaagatacaagaattttattgaggttcagccccgagcagttcggtaatagtctaatcctcattatttgtattgactcaagaacaaggagaaaggttccttttcttacagctcttacaacagtacctctgaatatgaattcttagacaaaatctttcgaccctttgcttagtgaatatgcatcactgtttatagggttataagcttggagaggaagtatttnccttctcgttacaattgatataagcagaaagattgcatagtaaatacagaataaactcatcatgggatttggacagtttgccatatctctgtaatttgatcccaaagttatagggatttcctggatgactcacgatgaaaaagctgaattcgctaagtgttggagttttgtgcggattgcccactgcttggtctagaggacttcgttcgagcgaatgtatgaagtgtcctgttcggcttgtgtcttgtgagcagatacctggagtcgattccacgtgtcaccatcaagagatgccacgttggagtgcagaaattgggataacatttgcccccaagtctgtacgggacttctgaagttgcgtgtaaacttcatccgagctgtctttgcgtttgaatgggtgacacgtgtcaggtgcgtctgtttgcgactcgatgtgagggctgactgggcgtcccttcacttttcggctaataaatgctctctctcatgcaattaatgcttcgaaatctgattttctctcaccacgtttgacggttgcacttgattgcttttgatttcccatattcgcgtttggggggaaccgaggcgtctgaggttttttgaaatgattaccccttttcgttgtttgcctataaataccattgagcattcgttcacaaactcattttcaccaaccttctttgctaagtaagttcagagtgaaaagagaagtttttagtttcaagtttgctgaagtgttttcacaaaaactgctcgtttagcttggcgtaacctgaatccagacgttcgatccttgagtaagttctcgatttcttttacgttta

SEQ ID NO: 19316 - DNA, 5621 bp, Cannabis sativa
aaaaaaatattaagtatttattaacaacttctccaataaattagatattttcatttcatttatttatatatattatttatttaatgtgagatagttaaaaaaaaatgaagaaacggtcacttcagttcgtgggaactagagaaaacaacagaacagatcatccacgtcccacacggagtatatctttccttaacctcacagccttttcacgaccaacactgtcacaacccaacaatataccaccacatcagcacgtaacctattacgttgctgtacacgtggtaaaatactattggcttttatttttattttattttatattataaagggcttgtattttcttttttatttttgatcatacttttaagaaacacttctcaagctcactgtgggggtgggcagttagaaccccgaaaaagctcaccgtctctttcttccatcctccattaaaaccttccttcaccaactccatccattaattacaatcagagagagagagagagaatggccagtgaagatccagaaaacagaggagataaaagaagaggtagtaataatggttactcaacaacagcatcttcatatccaatagaagaatcagagacccaatggacatcatggttggtgcccatatttgtggtaatcaatatcgccatgtttattgtggtcatgtacgtcaacgattgtcctaaaaataattcagggtttcagggcaactgtgtagccaggtttcttgggcgcttctcattccagcctttgaaagagaatcctctctttggcgcttcttcttcaacgtaatttgaaattatatatggcttttttcttttttctttttcattgttattcatggtattatgttggggatttgattgcttggtaattactttatattgtttttccttcaaaaaaagaaaaaatttacttcatattgtttactgtatgttttagttgacacctcttatctaaatattaatcaaccctacatattgttcataattggtttggtagtgttcttaatttgatttttctttgctatgtctcttgttttaattaggagcatagtttaaagtcttgttaaagaaagaacctaatttcatgttttctaattttgaacgcttgcttcaaatttctgaaaagaactagtcagattgttctttgctaagataactagcttcttatttctatttgggtctgtttgatcaacatttttttttctttctgaatagttccttttaatgtcccatctctgatttcagtctattatttatgttatttgaagttaatttgtggtattgttttaagtttgctgatacagcttatatttgtgaatcattttgaattcaataataataagttaataacacatcaacaaaatatagatgtttgatataactgaatgattttcaaacttttgaagattgaagaagttaggagctcttgagtggaataaagtggttcacaggcatcaaggatggaggcttgtcacttgtatatggctacacgctggtgtcattcatctgcttgtgaacatgctcagtttggtatttatcggaattcgcttagagcagcaattcggctttggtatgctctctctttgttttctttaattctaaactccaaagatagtttcacataagcttgaaattgtattcaaagtcgtgcacataatttctgattctcattgttgaaacttttgcagttcgaattggaattatatacctcttttcaggctttggagggagcatactttctgcactttttattcaaaataatatttctgtgggtgcctctggtgctctttttggacttcttggagcaatgttgtctgaacttctcacaaattggactatttacactaacaaggtgaacaactcatttgatctaatctatagtatatactattaagtaaattacattttttgttatgacaaagacgattaataaataaagtattcatatgttcacttgcataggctgcagcactgcttactcttttgatcatcattgtcatcaatcttgggcttggaattttgcctcgtgtcgataatttcgcacacataggtggttttttgactgggtttctacttggttttgttctgctgcctcgtcctcagtttggatggttggagcaacgaagtgttcctacgagtactattcctattgtcagatccaaatacaagccttaccaatatgttttatggctcatttcacttgtaatcctgattgcggggtaagtttttttatggttttttacagtcaacatgtcattaattcttgacataacaaaagggaggctttacaaacttctgttgtgatgatcattgcaggtttgttgttgcattggttatgctctttcgtggagaaaatgggaaccatcattgtcattggtgtcactacctcagttgtgttcccacctcgaaatgggattgtgatgaaattaattaatttaagagaaaagactttttttcttttttttcctttttggttttccctcatttgtaaagaattcatttattttatagcgttctttttccattattcaaacttgaatttatagtttgcaagacttctgatcctgaacactagtgatgtacatgtttatataagttttagtttgtttatatatttgagctttttttgtgagtaaaaaacaaaaaagaaaattaagtggcgtcgcccggactcgaaccggagaccttcagtgtgttagactgacgtgataaccaactacaccacgacaccacagatgagctataaattgtctcttttaactaagtttaaagtaatacaaaaactagggttcattcaactttcatgaagaccaacaccatgcatttttcacaatacgccaacccaagtttctattctctcccctaaaattaaaaaataaattgcttcgccttgttccgagtctgagagggattaaagggccacatttcaatcctaaacttccctgctccttacggccttttttggtatttttatgggctaaaggtaaaaataaagaggaacttaaaaaaaatactggaaaatagggaaagtttataaaatattgggacacggagatttttacagttttactgtattatatttacaaatatttgtattaaagtttcaaaattataaaaatatttcgtttcagtaaaataaaacaaacagctcaaaaaactttagaataacttaacaaataatatgaaaacaactataaaacaacaaaaaaaatactaaaaattaacagaaaaaaaaacaaaatattttttttaagtatatcgtaatgatatttttgcaatcaattaatagcttatagcttaaaggtcctgagtttgaaccaatgacctctcccttttcccatccctccctcaccactaagctagtcttagtcgcttaaaaaataacaaaatatttacctaattgcaataagcaaaacaatatcaacttttcaatatattttttgtaggaatttttacataaaatgccattttttctgtttttaaacaattatacggttccatagtttcattttcaattttaccattttgtttaaacatttatacgatttctttaaaactttttacatcatatacggttttgcttacatcacccaactgcccacacgtttccctccaaacttccaattttcaatcacttctattgtcagttatcacacactatcccactccctcgttaatatcaatattttttgaatttccctttcttcatcattttcattttgctcttcttcttcatctgttcatctacttcctctttttttttttttctttttttcttttttgttttctgattgttgtgtatgcgttttctctttgtttttgagtaatggttgttactcgttctttgtccccttctcctaagaaacccaaaaaaaagactattaaacaatctaaacccaaattagttgctaaaactacttcaaaacctcttaatcaaaaatccaaagttgttgttcatgtgggtgagccttcatctggtgatgctaggaaagctaaaagggagagaaaataataatgaggatgatttttttgctgttcgtcctaggaaggtatgtttgatttattttttttttgtttttttattttgatctgttcttgtcgtgatctggttcattgtttatgactggtatttttttttatttttttatttgtttatttccttaatttttcgtgtttaggtttttttttttttgttttttgatgttgtgggtttcaatctcatttttttccaaattaggtttgcaagttccatgttattagtttagttgtttaatttaaattttgttcatatgtatttattcctattttatgttctatgtgtttttttttttttgttgcttttttgtttattttttgtttctgtgttgatggacatatttcatttgcatggtcatgttcacaagtgctatcattcatggatgttaagaaatttgacaaaagaaaaaaaaaaaaagactaggtcgattgttgtctgtgtttgttattgtcatgtttttgttaaattagcatttgattgaggtgaaactttgatttcatactctcaatttgtaactacattgtcattttaaagtgagtgaaaaaagtaattgaataacttgataggttgtgatattttttttctttcttttcttcagtgcaaagcatgtttaattagattaatagaaacatatatctcactgttagtttgatagttgatttcatattcgatgtttttttattcttttatgttttttaggtttttctttgtttttattttgtacatttgttgttaatttcatgttacaggttccattgccatatttttacaaattaatgtatatcctctgttattgtgtgtccttttttttttatatattgttgtttcttgatatcagaatttgtttcttttttttttttgtgttagttaatttcttatgtatgcattgttcatttatgtttatttttcatagttgttgtagtttatatgttaggtttaatattgtcttattttgatcttcaaagtgataagatattccaagtctgctcaaaccatttatatgttcaatcttaactaaaggattttcagcctccttcatataattttgttatttttttgttcaattcgatgtttttttattcttttctgttttttaggtttttttttgtttttattctattcatttgttgttaatttcatgttacaggttcaattgctattttttaaaaaattaatgtatatcctctgttattgtgtgtcctttttttatatattgttgtttcttgatatcagaatttgtttatcctctgttagttaattttttatgtatgcattgttcatttatgtttatttttcattgttgttgtagtttatatgtttaattaattttactattttgttttttcagttatgggataataagtttggtaatgaagattttcataccacacgggtgacttctacgtgctcgtttagaattattgaaactatcatttctattttgacccctgaacagaaagaattgtttggtcagactgtttttggagtctttttaagaaccccttcttatgttatgcaacaccagttgttccatagtttatttttgagggaggttgtccagccaaatgaaaatg

SEQ ID NO: 19317 - DNA, 2746 bp, Cannabis sativa
attcatctcctcttgagtttaagacttggtattcaataaaaatgtgaactggatgtaagttataacaaaatttcaaagatgaaatactatgaagtttgtgctttcttatttgttttgtttcgttcttcattaatttgttgttttctacgcttttaaccgtcgtatgttcataatttgtcattgaccattttcatggtcaacaactgactttaaaattatataaatgagttcaccaattagttttgtaaaaatattatctatgtaaatttttgttacaaaaatgtatattgtaggtacaaatttgtatgcaaataattttttccatactgtttttcttttttatttgaagtaaatcgttaattttgtaagtagaaatatgaaataaatattttcaaattaaaggtatttttgcaactttgatttggcccatattgattagcccatcgaaattcatgcttaccaaccaaccaaccaaccgatgagaacagatagcaaagtagggagatcattagcccgtgtaaatcacgcgttcacaacctttgaagaaacgaaaaaaaaaaaaaaaaagacagaacagaacacgagatataggacactttccttacttccttcaatttcattaatcaaaccaaattaaacttgtattagtattatcctaatctcacatcccatttccccatttctcaatatccactttcctccgcggtttcctacaatttgtttgcttcttctcatttgaatgattggtttatcatcatcatagttcaaacgacacacaaatctggctacccctgagggtttgaggcctcgcttgtccttcaagcaagctcaaattgaatatcacgacgaagacgacaactgcaggccttggcgttgcaggttttccatggctttcacttgggcttccgctctcaggatcaccgtcctcctcctcctttccgccgctgttgttttcgcttttttgactttacctgttgaaaaggttaggcctttttcatctgggcctatcttattttcgccttttctttattgattttgctttttgtggggatcgtctctgaattttcttctttctctttcttgaatttgaaatgggctttcggcatatgtgttgaatttgtttaggaactttggatggtgtatttaagtttgccagtatctgggtatgtatgacttggttggttgggcgtctttctttttcaattacatgattagttgaatttgttagtttgtggacttggggattttgaatcatatagaaagttaaacacaagctgagctgtttttcacgcacaattttggccattagcaagtttaacacaatgtggtagaggaacccaattaccaagtggatgtgttggagatttggagttcactcattttttccccttatgatcatggtggtgtttcttaaatcattaccaagagataaatatgcttcaactatgcaattcaaatagttgacagtcctcagttataactctttagtctgtcatcggagaaatagttttaatatttttgcaccaatattcatacgtttctatttagcttgactaggttattaagtttctgatgaaaacaatatttattctgttcagtatttaaaggacttcttagtttgggtcgagcaagatcttggggcctggggccctcttgtgctgtaagtagtttcaaatttatctttttattttacttatcaattgttgctgaaaaattcaatgcctagacttctcaacttattattcttttgatgatatgcagggctgtggcatacattcctttgaccatcttggctgttccagcttcagtacttactgtaagcatactactatctctgccattagccaatctttttatctccactctcatttcacttgctctccatctttcagctaggtggtggttatcttttcgggctgcccgtgggatttttggctgattctattggtgctactctaggtgcaggggcagcattttttctgggaagaactgtgagtttcttgacctcgtgttatttttgtattgaaattttaaaggaagatttatgtcatgtattcatgttatgtgatggtgagtatcttataatggaatttctatgcagattggtaaatcatatgttgtctccaagctgaaggactatcctcaatttagttcagtggcaattgctatccgaagatctggatttaaggtcttcataagttgtatataaatttctgttttgatatgtgcatgcaataagttaattgggctttgatagttattcggtctcagttttttattctgattggatgatctttttctttattctacagattgttttgttgcttcggcttgtacctttattaccattcaacatgttaaactacctcttatctgtgactcctgttccaattggagaatatatgctggcctcatggttaggaatgatggtatattctatatccttgagctattacttcaacacttaccatgattattatgatctgtaaattgtaatgattgttttgtggtaatgtaaaacataattggatctcaaagaaatcaaaagtaaacaaactgaataaaatttccttgtgataatgttttcaatgttgtgtctgtaacagccaattacacttgctctagtatatgttggaaccactcttaaggatctttctgatgtgacacatgggtggagtgagttttcaaagactcgttgggtaagacttacaaaacatgtcatcctttcttaccacctattagacta

SEQ ID NO: 19318 - DNA, 4285 bp, Cannabis sativa
tttattttttatataaaatttaaaatattttatatatcctttattaatttgtattatataatttaattcaataataattaaaaaagaaaaataaaactgaaacggaacagtcgattcgataaaatgggcggttaagtggggcccggagggccactttccaatattgccttcaaacgaaacataaggttacccggtttcccttacaccgggtcccaccaccctgactcaaccggggtcaaacacacaagactgttatctctgtttccaaacagctctccttcctattctcgtcggctataaaaaagatcttccactctccccttcaccttgttcttttaccaagctttgcctccacacacttctcttactgtttcctctcttttcaaaaactctaaccgcatttcataggtaattcctttcttcttatgcaccgccactagttttagattctcagcttcagtggtggaattgttcacctgctttcctttttctctgaactattaattcatttttttttggttatttttcgatcgattatcgttgttatttatctaactaactggaagtagattcaattgcagaacaatggcgcactttctgaacgatgatcttgaatacgttgctgatgattattacgacgtcactgacttcgacgatgatccatttggtgatgaacagtctcataagaacgacgctacggattttgagtttgaggatgacgttgatacggtgcttgttaaattttgttttgtttttaattttttatagttcaagtgtgaaattcatttcatatttgtggtacggtgttttacagagcaagccaaagacggatacctcagctaaggaagctaggaacgggaaagatattcaaggaatcccttgggaaaggcttaactttactagagacaagtatcgcgagacgcgactgaagcagtacaagaactatgagagcctttctcgctcccacgaagagcttgaaagggtaacctcgctgttttttttcctctctctatatttacgagtgcgcactcacactttaactatgatttttgctacagaatctttttcgtcgttgtattaatacatgtaatagtaaaattatcatatgcgaatatccgatctagaaagatcggtttgacgattttaacttcttcaaggattccacatagatttgttgtgcttttctgagaaaaaagataattaaaccaacatatttgtgtctgcgtttgtatatatataaatatatatttatatttatattcacatatattatatgcgtatgcgtaatgcgtgtgtttattatattgattcattttaatcgtgttgatcgttgttattttggtagcaatgcttggaagtggagaaggggaaaaccttttatgactttcacttcaatacaagacttgtaaaatcgacgattgtgcatttccaggtagtgactatatttcttcaaaaccattttacaaattttcacgtggagttcatataataacataatttatacatctcactatcctgaattaagggctaggacttaatccttttgctctgtaaacataaggtcactcgaatttatactcaattgccaatagcaacttgctgtcatctttaacttgtgttgcatagttttcacagcatctgatttgtgttttggccaagtctttctctgtacttttttgatcgtttcttcttttggatcgatgttcattgtttataatattctacttaatggtttatcatttgcgtgtattgggacggcataaactttccttttaaagtctcttgtctaggagtacaaaatagtttacttcttgtagctggtctaggatttttctttcttggtcagatagttgttgaatttggttgtgcacacatcgttagtctttaatttttgcaggtcttatgcgtatttacagtaattgttggatatctttcattatatgagtatagctttgtgcctcagccattatttggaaggtatggaggtggtgtcgcagatcttattatcattcgagatgtattgtgacttacatgcaactaatcttaagtttatgtagtgctccggcttaactatcaactttgggctattataagaaattgatgtgtaggcctacaaattgatgactcaattgaattttgatatgaaggctggctccttgctccgtgctttttttttttattgaaaggaaatgaggttggatttaaacaacttttaaccgaagtgatttctcattcttgtgactttataaaaaaaaaaattctccccatatatttccttttagaaagtttcctcttgtctttcttttactcccttctgaagactactttgaagggagatttgttattagtgctactgaactaagaagctttcatagagaacaattgttcaactattatgagacagaagtttcagcttatggtttagtgagttcaattttttttggttctgacaaactaagtgcaaccaaatgttttcctaaaattacgtggcatggttttagcactcacaaaatccttttttgcagttatgtgaagggtggatttgtacttctaatattgcacattacattttgtaaaaacataaattaagagttcaaatttcaaggatacatactcgtatatctgctactgtcagatgtgtctttctactgatgagattatctgacgagtaagatatggatgcattacggctgtggtatgacttggtatttctatttgtatcttgatttgatattgatatgctcgtccactgtattgctataaattcattcaacaaaactttattaaataattacatcgcttgtccttttacatatatgaacacactttgcacccgactgtcagtcttggtaatttataacataccacagacacatacgtaagttttaatttttagaagatattctgtgtaaagtatttacaacattgaacatataagcagaaaaagtatggtcatctcttcattgcgaacgcaatttacttgattcttttttacttttactggtgtggacaattttctagacacgtgtagagtgccctgctctataagaattgtgatgcatgattgctgattctcctacgcgaactgttctgtttaaagattctgtctagagttgttaatattcctgtaagttgtaaaactgtagatatattgcatcagtttgattgttaagtatgatcttgcgctttaacccctcagtggcatttgggactgctatttctctttattacagcatttaaagaaggtgggagttataactgagctgctggcgcgtcattgtttatatggtatgataggaaaaaatttgagcatttaagagacctctgtatcaattcttgttgtagtatgtttatgtgcagctcttgagggtacctaggctgcgcatctcatttattaatttagtaaaattttcatatgtttggattatgtccttgtaagatttatgtgcaagatttctgcattaagaaatcagtcctgctgtgctgtattatctctagttctcttttgcctttatgcaaatacattgaacaacattttttttatggttaatttgtgaaggtttatctctttcttgtgacctttaattctaacttactatgattacatggtagattatggactacgtgaatgtaaccagttccatctttcagtttttgtcacccctctgcggttactcatatcataatgcatagtattattttttcactcattgcagtctttcctgcgcatgttatgctttcttctggactatgttcatttttttgttttgttatcttagctgtgatgtacgctgtaagttatttttgatgttttatatgctttcttgaatgaaataatgtagtccctgatttttccattgaatttctttttgttcttgttgtgaagctgcggaatttactgtgggcaacatcaaagcatgatgtttaccttatgcagaactattcagtagtgcattggtcatctttgctcaaaaggggcaaagaagtactcaatgtggtgaagccgatagtgcctactttggtcagttgagacactatgttaaataaatagtgcaaacatttccctatttccaaccttcatgttttttgtgaaaagtttgctcttaaatccagtactgagtaatttggttttacagaagaatcctggactgttggcacagacactttctcgagtacaaataagcaccatggctgttaaggagggtttattggtagcaggtggctttcagggtgagcttatttgcaaggtatgagaattctgtagatacatatttatgaatgttgc

SEQ ID NO: 19319 - DNA, 3143 bp, Cannabis sativa
  modified_base (2469)..(2473): a, c, t, g, unknown or other
cgctgccatcaatgtaagaatttcttaaactcttatgtgtttatttcactgttttaaaaaatttatatttaaagtgttagattatagaattataattaaatatacatattatttaatttaaatcctaataaaataacttctaacaactgattctttaaaaatactaattttacacatatacacactataattaataaaaaaatatattttttaagggggcagccatccactattggctctatgtatgtaagtccacctcttatttattacataataatataagtcaattacaaatataatattatatcaaagtaattcgtaatacatacaacataacaaatgtctctttagtatagttcactataattatgaacaatcaacgatgacaaaaaacataagtgaaaaataataggtgtagctaagtaattttcaagctaagaggagttggaacagagtcccaactgctcctttcaaataaagaaaattttaaaatatgaagagttggtgccaaaattctactcaaagagatggtttatactgtgactatacatctgttctattccttaaatgattttatatattattatctgtttaatctctctcctcatttgaatgcttgtttattttattttattcgttattactttttttccaaatatttaataattaaattatttaaatgttattcctaaataaaataaataataaaatagaaaaaataatgtataatgtattataaaattctaaggtaaaaaaattattattttggtaatatattttgaagaatatagttgagacactaccaagagaattctacatacggtcttgtagaaaaataaataaaataaaaaatgaataggagaaaagatttacatcttaatagttataaaagaatatttaggtcggtagggaaacatttctttgttagttgatttaaaatgtattaagtacagcatgtgccttaattaatttcattttgtaaaccataaatattttcaagagacgtaatcataataataaataagatcaacaaatttattatacacatttatttattttaattatataatattaatacagaattttaaatgtctttgatgaatacacatttattataattatactaccaactaatattaatttaatggatatattaaagtattgtaagagaaatttatgtttgagcataactctggctctatggtacataaggcaatttttaatgaaaaatgtaaaagttgagttatactttgtaaaaaaaaagtagttttgtaatatttttacattaacttttattattatactccaatacataattataaatcttaatgtaaaatttaatatgttatttaatacttacttaataatttattaaaacaatataaaataacaataataataatacaaagtttaatgtaaaatataacatttaataataaaataataataataatgcaagtcatttaatatgttagctaaaatttaataaaaaatattaaagatgacataatgataaatataaaaacatataatttattgtgatacaaattttgcatcatgttatattgtgatgcaaattcagatccattttgattatttgagatttttacatcataatttagcatactattggaatagactcttaacaaaatgagcaatattttatatttgcatctcgctctaagttcctagtaccattatggcgcgatgtctaataattatttagtaatttttgtaatttttattaaaataaagaaaaatactaaaaggtacttttaatgcctagaatctttattggtacaatttaatattgggtttaacttattttaatttaataaatgttataaggaaccactaacaaataattaaacgccatgtcatagaggtactaagaaccttggtattttataaaaatactgtaacgtaaaataagtgagacctaatattaaattataccaacaaaaatactatacctcacaacaataaagagcactcatgagtcatgcttagtctgggcataattaaaagataccctaatattctcaactcttctcaaattagctcttagacaatattcaatgcgatgtataatttgaattaaattttgctgagaaaatgagtcaatatatatttgactcaaattttacaaccatgctctaatctattagggataaaaatttacctttaattaatagaaatgtataaaaaatcaagaaaaatattaaatttttattgaaagtacataaaaattctactaaatatataaataaaatacaaatagtgattaattatagggttggcattaattatatttgataaaagaataaataaaaaaaagatacttattcgatatgaaatttggccaatgttatatacagggccagctctagacataggcgagctaggcccgtgcctagggcccacactttccgggggtccaaaataaaaaaatttattaggcttttattnnnnnaaaatttaagtgtattataagcaacaaatattcataatttagttggttaaggtggaggacataatgtctaaggtcatgggatttttttaatatatttttaagggtcccaaaatttaattcttcttgggcccatatattttcagggccggccctggttatataaatatatatattttgaaagagtgctccgaatcacactatgatagtcgtcgacgcagagaaacttctagtcaacaagctaattgtctagccaaagatatacaaagtcagaatatgagactacaaagcgacttatataagaccaagttatctcagaaatttagacaaaataactcgaggccacctttaagaagcatctgaaaaaataactaattggacgaaaactacctacaaactaaatagatatagaaagtggattaacacactatacaacgataatattgtgaatttttaaattaaggaaaaaactcaattattattttaataagaaaaaacttatcttttaagcttttttcactcagcttgtcaccattgtagagctgagtcttccaaagcagatatatactagtcaattaacctgcaccatacataaaatttgagagattaatcaaatttagcaaattaaaacccaactaaaattaaatatttttgccaaaaaagtaacaaaact

SEQ ID NO: 19320 - DNA, 7744 bp, Cannabis sativa
tgttaattggtttatgttcattattattgttcaaggtgtgaatttattgcaggttttatgattgaatcctcaaagttatttccgatggaattataacataaataattagttattcctagaaaaataaatactatacatcgaaacgattcttttttttttcctgcaaaatacactattaattcaatgatataggaatatttgatcacttcataaaaataattaaaaactaatagaatttgataatgcaatactagcctactaaatatttttctcgtagtatttattttgtggtattaaatcaaatgtataaggaaagtattattatgcttatcttcacatgtatatatatatatattaaattatgaaataaaaaaatgtataaaaatatttatctcttgaagcctatcagtgtattcatatgtcttttcacaaattgtatccaagacggatatagaaaactcacacctcaatctttcattacacacattgattagtgtgggctgagtaggatacactaaataatgagtttttgtttttgtctcaacacagtaaaaaaattttgtgaaagtgaataatgataatgacttttttccattagattttcttaagtatataatgatttagaatatatccgtattaaaattcaaactaatataaaaataataaaaatttaattaaataagatatatttatttaaatattaaataataatatttaaatatttgtattatacctaatttttgagaaataaaaaaagtcaaccctgcaactttgactaagacttacaaatatcaaataagttaagatatcatatttgagggccacatgacacttttagaaaacttacgagaacactaaccaatcatttggcattgtgatccacacccaagtgtgcccaccctagaatttatgggcttgcacaagaattttcatcctagagacctctattcgacaagaaaactaacaaggacatgaattatttagaaataaaaaggttagaacttcaccataaagtcaagatttcacaaggagcccactccacaatgcttggccaaccactgccatctcttggcataaaaagatggcagtgctctctacttccaaaccaccaaagggaacttgtccaaatgtggtcccctaacaccaaggagtataacacaattgaaataaatcattttccattcaatgtcaatgctactcgatctgtgccatctttgtgcgcaaaaaaagtgacacaggtcggccacaccaattgggaaggggattctttgtcaaaagtattttttatcatcaagacatcaagaccaaatgaggaaggccaccaagtggtatagaagccacttggtcgatcactgccgtctttgtggcccagagaatggtagtggtcaaccacaataaatgaagaagggtctctttgaccaaagtatatttctagcatcaaggtaccaaaaataagtgagaaaagttaccaaaaggtgtagaaatatcctaacaatcatctgtaaaaacacgaataacatttacccacaagttttcgagatgctttgcctttcgagagcttgtagtattcttctgcttcttggaaacaaatctttgacacgtggtgttggctgggatcccggacgtatcccatgaacggttatcaagtaaggggttattaatcgtaggttccattggcgtggcatgcatgcggcgttattaatgcgattgttggtgcacgtgcgcgtggggagagcgttcctcgggaggaattacaataattgtaggatgattgagatgacctatcctttaatgcgtatgggatacgagacatgcaattataaaaatttaaacgccaatgcaagtcgttttaactccctattcgtcgaatcgaaacatgctttctgggagaagcgatctaggccgtttattttgactcgcaaggatccatgttgaagtataaataggtacaatgaacctatatttccttttttcatcttcttcattcttcataaacccttttgtaaccttcgaaccagagcccttgttccccaggtaatcttcacttcaccattatttctaacggtgaatgcaagaggccttcgattgttttatatagtattttctaaacctctgttcaattagtttcccaaacgcagaacctataaaccttgacctactccaccctcacccagacggggattttgaccttcatgctagttatgactgtgtgattgattgggtttgacgctcctaggcagattcgcacaacaattttccattctccgttcaaacatcaagtaagtatcgcaacactttgttgactttattctatttctgtatccaggatggcaatgctaagttcaagctaggtctagaatattttgtgtgtttgaatggttgaatatttcccgtagaagcatatttctagggtacgattatgtgcgaactctctccgccataagagcgttcatatcgcgtagatagttagagtatgcccgttagtaatttgtaagttttgtagattttaacagtataccaaaggctcttgaatgaacatcaaaaaagttcgtccttttatgcctatgtggagttgttaggaccctaaaatggttgaaaatacaacaaattagtagaaatattcagagaaagaattaattaattaagacgtttaatgtcgaagatttttgctttaacacgaactaagtggaaaaaaaaatatcaaacaaaactaataacataaggtctggtctaggagtgatataatattattattacaaaactaaaagtgaaaaaagaaaaccacacgtagaccaacaaactaagaacaatcacaaaactaaaaattagaaactcaaaaagttacacatggtctagcaacaaagaacacttataagaaattagtaaaacatgttccagtggtgtaatttttcattacagagcttcaaagctaggagacaataagacatgccttaatttatgcaagcaatgtactgaatgaagatagaatatgcttttgaaattatttgtaacaatggccaaaacatgtccttggaagcactataacataagacatatggatatttttggggaatttttacaagtacttaaatcttatttttgttaatgatttcttttaacaattttatggattttgttttcaatcaggtttttacttgtatttcctaagaacaatacatatacatacaaaaattggataaaatttaacgcaagactaaaaacaaaggacacaatgtcatttccgcaaacaagattggtaaattactaagcccaatgttaaaatgggccagagcccaatagataactaggctgttctgttttggtgcagtgcaccataaaccagcgacacagaggatcctaatctccctcggccacttcaagtagagagtgagtgagtgagtaagtagtagttgtagtagtgtaactactgttaagtgttaacgtcaaaatctccactatcatttcactcacttggtcctggtccctggtccgtcgtcgttacaagatcgctttcccatttcaccaaattaccaaaacacccttactctttcacaacctcccattcaatagacaaccatgtccaaaatcgtcattttatcattacctgtgaacaaaaatgcgcacgttagctgtctccccccgaaaacccaaaaaccaaaactccatcaaaaatgaaaattactctctcttaataattactacttttattacaacattaatatttttatgtataaatatttttaattgatatttatattgattatggcttatggcttatcctacgccattcacgcttctctttacaattttttattgttcaaaaagaaaagaagaaaactaagcattgagtgactgagtgtgtctgccatggatctgtgagctcagctttgttccatttttatatatatatattttatatttatgtatgagatctattttttaagcttctccgttacgttttacgatcttaattcttatatgtcatttctggaaatttccgttttcggtggttgcccaaatcgtgctcctttaaacgggtattgagttcgggtacagagtccgacccgaatggtagaagtacagtgttacatgtatcactactgctacgactatgactgcaccttaggagtttgtgcgaggtcgatcggcatggttttgggtccggcattttcgtgatcggcgttgttttcttttggggggatttgggttgaatgcttcagcgttgcctctgatgaacccactttgctgcattgctccggtttcgatcgaccgtgagcgggccaaccctgtcgtagggaaatctccggctcattgtaaccagttagggatcgatgcttcgatcagaagcgttagctatggtacgaaaccgagtttatcggctcaggtatcgtcggtcggtacggaatcggataaaacgtcggcgacgttgaacaatgaggtggaggaaacggtctgcgaggctagggattcgaaggtgtttggtagtggtggtggtggtggtagtgtggctgggattttgtataaatgggtgaattatgggaaaggttggaggtcgaggtggtttgctcttgaagatggagtgctttcttactataaagttcatggaccagataagattttgatgagcccggcgagggagaagggtcttagagtgatcggagaggattcgttgaggtatatgaggaaagctaattggggtagcagtaatagacttggtgcgtcggctaggccttgcaaaccatttggggtagttcatttgaaggtttgaaaccatttcctgctttgtattttgttcattttttttgtacttttcaagtatttagtattagtatagtttttgataacatagtattagtatagttagttcttgttttttctacatgaagggtacgagtcaaaatctttttttttttttctaagaactctgccgtttgttctgttatatgattttgctaatgcatttttaaatctgaagtagtttgttttcttaaggtttcttcaatacgtgcaagcaaatctgatgataaaaggctttcaatatttactggaacaaagactcttcatttgcgttgtgtaactagagaggatagagctatatggatcgaagcactagttgcttctaaagatcttttccctcgagtattgtcgagttgtgattttggggcttcagaagatgttgttgtttcgacagagaagctaagatcaagactagtgcaggaggggattggtgaggctgtcatcaaggactgtgaatcaattatgctttcagaaacctcagagctgaaaaatcagttgaagactcttcagcataaacatgttctgttgttggacacgttgagacagttggaggtgtacccttttttactatttagctgattcttttgtttaacacgaataatgggatgtttggtgcagtagtgtgattttgctgttgttgacaagtttgtatattttcttaaaatttgatttacagacagagaaaattgagctggaaactactgtcgtggatgaaacaaaggaacgagagtcatattgtggacaggggaataggagatttagtggttagttcttttctgtgatgcagacattataggaaattcatcatttttttgctggtgtgtacatatatatataaatatgtatattgtcactctcatttttgacaatctactccactcttattgtcatagatttctattctgtcatgtccgagggtagtgcatccgattctgatgtagataatgaaagtcaagatggagcagatgttgaaacagatgaggatgatggaacatattttgatacaaatgattttttgtctgccgatgcattgagaagtgcttcttatcggagtagggaaggtactggaaacggttgtatattcgaaagggattctttcttttctgatcgattgcatggatttgagagtgaaatcaggatgattgaatatccacatgttaaaagaagggataacttgcctgaaccaaaggagaaagagaggccaattggactttggtcaattatcaaggacaatattggaaaggatttatctggagtttgtcttcctgtttattttaacgaacctctctcgtcattacagaagtgttttgaagacctggagtattcatacttggttgaccgggcattagaatggggaaaacaggttagttatagatctttggctgttgttatcttacaaatagaattttgaagcaatgaagcatgatatcttagtaaagattgaaccacttgatctagtgatacactgaccttgagttttgaattaaaatttgatgtcttcactatattccaattccactaatacaagaaacatcaacttatttaaaatgacattatcaacaactaatatagcatgtatgtaaataatgagtgatcttttttttttttctctttggtaaaacatttaggatatttgaaaattaaagactaacatatttattttccatttattctgctctgtcatacgcgtttcagattctggtaaaagatacataatctgttttcatgttcaacatcttcatttgtatcattatggattaattaatttcagtgtacagttatctgaatattttgacaaataaggtttcatgtgttgcagggaaatgacttgatgagaattctaaacgtcgcagctttcgctgtatccagctatgcatcaacagaaggtcggcagtgcaaaccctttaatcctctccttggagaaacatatgaggctgactatccagataaaggacttcggttcttctctgaaaaagtattactttctttcttctcagcagaacatgtggacatttgacatctgatagaagcatttgattaaatcaagtcatcatctccttttaacttgttctgtctttagtatgaaatattgctatttaacagcaacatgtttagtgaaacgcatttttttctaacaagcagcttggctcaggtgagtcaccaccctatggttgttgcttgtcactgtgaaggacaaggctggaaattctgggcagattccaatctcaaaggcaagttttggggccgttctattcaacttgatcctgttggtgtccttacactgcagttcgatgacggtgagaaatttcagtggagcaaggttactacgtctatttacaatatcatactcggaaaaatttattgtgatcactatggcaccatgcgcatcaagggcagtggcacttactcctgcaagctaaaattcaaagagcagtctatcatagatcgtaacccacatcaggttagttcatagttgtgggggacaaagcgcatatgaggtgtccttttttgcgttgattttagtgacttcttttttatgttatgtttcacttctttttttccctttcctgtttttattttcttttgttttgtcaggtacatgggtttgtgcaagacaacaagacaggagaaaaagtagcaatgttagtgggcaagtgggacgaagcaatgtactatgtgctgggagatcctaccacaaagccaaaagggtatgatccaatgactgaagcagtgttactgtgggaaagagataagtatgtgaccaagactagatataatctctcaccttttgcaatatctttgaatgaactcacgcctggcttattggatcaattgcctccaaccgactcgaggcttagaccggatcaaagacatcttgagaatggggaatatgaattggctaatgcagaaaagttaaggctcgaacagctacaaagacaggtattca

SEQ ID NO: 19321 - DNA, 9626 bp, Cannabis sativa
aaaacattataactatctataaagttagaaataagactatttacttacatttctctataatttaattgaattgaatttaaaatgcaggtattttggttagctcacataaaaaaaaatagtatttaatttatcaatttcttccatgaataaatttaggttttttaaaaaataattgtaatttttactaaaggactttttaaacctaggtaggaggcttgggcgtgggccccagcttccccactcttgggcctgccctgcggctgaggtggtagtagaggagggtgaacaggaggaaaagatggtgggcggataggagcagtggggagcttggatgacttgatgctggaggtggtgtctgataaggatatgataggaggaaaatatgaaaaattcaagttggtttgagatgcatatttataaacacaataataggcaaagaatttaatacaacttagccacaaatcatactagaaaccatgagcagaaatacagatactagtaagaaaaaacatgagatatgtgcacctaaaatattcagcaaaaaattacaggctaaccaacatttatctaaaacgaggcccgcgaaaaacaatgtaatgatttaggctgaaaatttatgttgtgtccacaattttttgaagacggataaaacatactaaaataacccttatctagagggtaaattcccagtttagccgaaactttgaatgaaattgtgaagaataaaaaataaaaggattgtggctacatagagatgtgaagtttggtattaaatgcaactagaaaaaagtatttagctcaggaaccaaattgttacaagtctaaagagttaataagccagttctataagcaatgggtgacagaaacctcaaactttcaaagcagccttgtgaaccatagtttccttgtgtatctggtggcaactcttctcaacgagatcaagcagcttctccaagtttgaagaccatgcgttaaggatttcgttgctatcctttgcggtttgaaaattaactacacccatcggcctgtcaatctttgaaactagggccttggaaacaaccatttctgaaagatgcttctcagcttccttcatttatagaggagagaaaaaagactccaagttagagataaacaccaatatcaatgggtatataggaagtaactaacagacaacatgattcaactacattgaattccattactctggacagaacaactagttattagtttaagtctgataaattaaaattagcatcaacaaacctggatactgagacataagagctctgcaagtcttttcagtgtaatcctggcgtagtactttgaaacaactaagatattctgaaatggaaaattaaaacaaataaataaaaaggtaagcagaaacagatagctgctaaacatgctagtgtcaggagaaaacacacatgttctataaccctctgtttcaaatcttcagctgctttgtcccccaaggaacctccaagcatgttcttctcattctcaaactcatccttgtatgaattccaaagagctgtccattgtacaacctccatggtaaccagttgtttcaacagcaatctacaaagaatagatgcaacactcaattgtctaattaaaataggcaggtatagcatgttacataagcagctaacagacacagcattaatgcaatgaatacaactaccagagtcatacctaaaatttgaaagttcagagagattcttatcctccagggtggaattaagaagactagattgcattggatcatgtggtgccagaaccaagtaccaacatattttccttaagatctgcacatagaaatatatcagagaagctctaaataaatcaaaaccaaaaaagggggagagtgatactttaccggtatccagtctgaaggattttctttgacagcaggaatctcatatattgctttgtagcatcggcaaatttcaaggtaatcattgttatgtgaataatacctggaaaagacaaagccagtattaaatcatgtattttttaacaaattaaaatagaaatttagcaaagttataatgacatagtcaaacataaatgtgaggctcttgtgcaaaccctcaaaaataaaaagttaatacactatgaccgaaatttccaagtaaattttcctaaaacaaacggatcagctcatggcccaaaagtgatcccaaatcttctacagtagccaagctttataccaaatcaatcatagtatccaatcctaacaatcatgaacaagtaacatttacattgaaaattaacttttaatagttaaaacctataaggaacacaaaaacgatatcaattactatgtagttatcgaacctaagatcccgtgggagcaaaccacagacctaaccatttgagctatatagcactcttatatatttgaataattttcacaaggcctctgatgactatatgaacatcaaaagtcaaaagagttaatatacatcacatttttaaactatactgggaaaccataaaatattctagaagacactgagtactatgcaagcatataatattctagaagacaatgagtactatgcaaagcatgaatcaaagcttaagaagctattcaccatactactgcagcactatatcactgcacacctgatggaaaagtaaaatattcctgacgataatgaaataataaaactgcagcagttgtccaataagcaaacctcaaatcccaaattcagaaatgccaagactaaccataagatgagatctcacaaaacctcaagataattacagtagtgacttcatacatcaaccaatgtatggtatacaataaaatacagacaaaacagtaaaatgggaaaacttccccgtgtaccttatcattagttcataataaatcctctttaactctaagagtgatggaatatcagcaggagcctcctcaacaacaccatcaccttctttaggttttttcttctctttcgagatgtcaacatcaaacacccttggactaatcttccttgacaggatttgagcacgaacataatcttgacgatccaaacacagtcgaacctgcagattttaatggttggataaccggtaacttatgtccaaatgtatcaactacataagaaaacacttttgaaaaatactaaatgcaacagtggtaagaataacatacttgttcaagaatgaaagcaattttctcagtttttgccatagcaccaaaagtttcaacctgtaaagttaaaccatcaaaaaggtgtgcttgaaaagggaatatcaaattggtgaaaatcatgcaccaaccgctatttcttgcatcaaatcagcagcttcagctataagtccttgttcttcctttatctttgccagttttttagtcaacctggctctctcaatctcaacatatatctacataacgacaaaaatcattagaaaaaagtatgatgtaaactaataggagccttttggttggagtttgaaaaacatattacctttccagcagcaacattattaagggtttttataagctctacacgagtttcaacgtctggcgtctcatctatatactgcattgcttgttggaccatagcagttacagcctgtacataacacccacaaacagcattgacaaatacagttttttatatgagaataagattgttttatgaagaaagagtacattcacccaagggccttgacatcctagattgagaacaacaatacaatcgaatagagaaaagacaaaaaaatgaaatgaactgaaatgagattcgcgatgatatgaaaaaaatgagtgcaaagttgaaccctctctaaaactagaacaaaagtatgtacttgactaattccaagaaactagagatggtaagctgtcattaaatgctttgtccttcaatccctcggctatgtttggaagtggggaaagaaagaggtaaggaaaattaaaaaaaaaaaaacaatttctcatatctgatacaaaaagaattgtatggaaaaaaaagttgagtcaaaaagttttttcatatcgaacaggaattttttattttctttatttcccacacttctttttacctacattttccttacctttttctttccccactaaaatccaatattcaaacataacatagcctggaggaagccctaacatgagcttcccatatcttctataactttaattttggtgaaaaaaaaggaagcttagaatcctaaagtcttgtcttggtaaaggaagagataccactgcaaatagcataccagtcgctcaatgaagtgaataacaattgaactaaaactatatatagtatagagaagaaaaaactttgttaagatacaatttacaggatttgaagcccggaacactaactcattaaaccacttgagttgttccacaaatagcaagtagacaaactcaccacacataaaatggtgaattacacataacaaagtcctaactaatacgacacagctaaagttattttcatgtagcataaagtaataccactaacacaaacatgtacacaggcatctagacatagtcaagtctaacattcctaagcaaaaaaattgcacataccaaaactggaaaactataaacaacttatgaagcatacatacagctctaaagaactttctggttttaaataattagacagaaaacacaaaacctagataccttttaacagtttgtaattctttgtctacaagtaactaaattaaaaacctaattggaacacagaacaaattaaaaaaagtaaaattcattgcccaaccttaaagagttatgttggtcttttttaatgtagtacctgcttaagttgaccacggcgttttgataaaacaataatctgctcattgagggtcttccaagcacgtgcttcaaagcacagctgtagaatgtcagtagcagctttcttggtgccggccacatctccagcaagcctcatctgcttctccacattgagcaattgctctatggtcgcctccaaattacttcctccttcctggaagttgagcgaattcatatgtataattaaattttgcagtcaaatgaattctgacacgaacaacccaaagagaaagagggccttaccatatttaattcagtttaatactgatcgatcttcgataaccaaattaaaatcctagcagacaaacttcctgtcaaaaattagagtgaaccacaaaaccctaagttaagagtagctcaatttccgggaaaatgcatgagaacttttttaataactagtaatataaagaaaagaaattattagcccatcaataggtcaaaaaaaaaaggaaatcttaatatgtcaaaccactgtcacttagacgatgctatggaggagctgtgtgggtggtgcactgactgccgagaaagggagagagatgagtgaatgaaacagacgagagagaaatggagagaggggggtgtggagattgacgccgaagattagggttagcaggttatttattttctgttttatttttatattatatttatatactagtgatgagtaccgtgttactttgtatgattgatgaaaactcaatgcctttgataagatttaacactaaataattcaattgaagcaagtataaccaaaaccatatcactggaaatgaagaaagaactgaaattgtaaagagtaccgtaaagggataaagatctaagatcagtgcttcagtgtccagcgatcggaaaaccagtcccggagagctaggctggggtaaggggagatggtcgtcaatggcacttcggatccgatgggagagagtacagcgttgggctgttgagagtttatatatccgaggttgcctcttccttcaagaaattaacaatgcttttcaaaactggtacttgccatgggtagtcctcaaaatcttcattactttctaatatggtccttgaaatattttttatgacaattaaatactactattaatataacatttttttatgacaagtgaagtaagttaaaaatataatatattaaaaatatatgaaatataattataatataaatgaatatattaattatagtaatataattaataaatatttaaaaaaaattatattcatatagagtaggtataatcttgtaaagaagtacattagaattaagattatacaatattaataaaataagttaataatgtattaaagtgtagaatttttaatatgaaattaccaagtatagtttactctgcagtatactctagcgcgcgtgtgattttgattcagatcacatatgtggatagacatttagtaaagtaactgtgtataatttgatcatgcatgactaaaccgatatgaactagcacttttatcaacatgtcatttataaaataaaagagttattcatatcacaacgatgatcattagtagatcagtctgaaccttgagtattcatgaactcctatttaccaagattttcaaaaacttaataaattgagctttaaaaataaataaaacagtaaataatagacaagtattttttatgtagtttgggtgttaataatccatagtccatgagtcaggtgtattggccctttaggcaattatttggataatacattaagtgtttacagtataaaacctagctctgcactccttttgtttctcttgaagaagaagaaagcttgtaggatcttttgcaaaggttcggccagtataaagtttttgttcaccctttgcacataaaaataggggtatttataggcttacacgtgagtaaaggcattccttttacccacctacagttttgtaccacagctcattgcaagggcaggaaaatacaacttcgaatatgaccgtccagccttgaagaatcttcttgatcatgcggtgcacagggatggtaagtagtaccgtttggatcagagacacgtgttgtccaaaggtttctcctttataaattactctctagacaagttgtcatgcaaaaaggtgtttctagaggtatgtacgcgtactaccatggcctggcacgggagacaatatctgattatgtgtcagaaaaaggaataatagtctgtaggtcgatttccatgtaaatctgaagtgaccatctgcatttgcataggagttgttgtccacgattagttcagagagtccttatctaaaagttgaagagagagaacgagtcttggagcttcaaatatgataaccaaactctcgttctgcaaagtatttgtactaccagcaacaaccacaaggccactatcaccaagctccagaagcagctagcccatcaaccaactaatggcataaaggtttttattgctctagcagcaatgaagagggctagagagactgctacacaatcattctacgacactattaatgcaggggcttgggttgaaatgctttgctttcgatctatggatatggtaccctatgctacttcattgtcagtggaagaaagatcattccatccttgggcaccttggggcaaatgaagaagaatacacccagaaggttctcgctatcgacgatgagtcatatcttatgaagtaattttacaaaggcaatagcaacaagtttgacaaagaattaattgatggtttggagtaggagcattcggctgaagtggtagtctcttcagggattgctgcccaagaccttcaaggcctgccccaggacaagccatcagaacttccaacttcagctcaggacgtacccccagtctagcctgaagagcagctcatcgtcccaaccaaggaaatcccctcaagccaggctcaggaacaacctctaaaccagactaaagaatgactttatccaacaactcccttcattttttgttttaattttagttttgcagagacaattttaattatgccttaactgtgaggtcgtctgtattagctttagagacatctattttacttatgcatgtttactttatttttatacttattatttgcttcccttttttgtccttgtttatttattatgccactcagtagattgttttataggatcttgcaaaatttctagttccaacgaccaaaaaatgatactctttgatctttctaactttgtaactactttgttgaactattttgaagtatgcaaaactgcacattctatagatgtcaacttttgccaaagtccttatcgtggcatttcacaaacccttggcgaattaaccttacacagaagggttgtaaactttgttcccaaattactacaggagtcgcgaagcttaccctttgtctacgtgtttcccagttaattgccttacgcaaaatactataacaaaactatgttacttagattactgagggaagggaactaagcatacaacaaaatcttgcaaaggttcctttcttggagacgaggcttaggttttgctatcacttagaccatccttcctcgatccaaagtaacagagctggctcaacatttgacagaattttcctaaatttgtgataagagagttgttggaccacagagggtttctagatgtgtttatttacctcactccttgtaggaaatctgtcagcttgttcaacggaccgaggcgactgtaatagtattcaaacaatgttcccttttcaaggataatgctgaaaatatattggatgtgccttttgcaagaaccaagttggttatgcaatagactttaagcggtttttccttccaggaaggagggttgaagatgcactagaatccaagcaatggcttcagtcccaagactaaaggtaaaaactagattggacatgcagtagactttaagcactccctctttccaggaaggagggttaaagacgtatcaaagttcaagcaatatttttaaccaagagtttaaaaaaaattcaaagtaaagtactagtacaaaattacatgcaaatgtaaagatcaaatagaaaagcactaagtaaggcactcgtatgtttttgagggcacatagctaggtatactacccccaaatgatctaagaagtttggacttctccaaattcttggtcacttgttcaaaacatagctcgtgtgggagacaaacatgtgaattctctcatttcattgtactcaaaagtttacattaagaaagaaaatttacaaataactacatacaactgtagaggaatgttagaccccaatacccccagcctattggtagtaacaatgcaaatggtctgcattctaagtgcaagggatttttgatttgtccattctcttgagttgtaatgttccatttcccactttatgttgtatctcatagagtccttcccagttaggtcctaagaccccccacacccagttcttgtgaagctgggaagactcttctcaagacgagatctccaacgttaaatgtacgacttttgactttagaattaaagtgtttggcgatctttccttggtacatcttgagttggacttgtgattattctcggagctcttcaattaagtctaatgatttttagagcaatgaatggttttgggtagggtcataagtgtctcgtatatgaaagaggattgtggtttctatttggacaactgcttcacacccataggtcatcgaatatggtatgccctgttgaagttctctatgttgttttttattcccagagaactcgcggaaggtcctctggccaatggcctttacaagcttggagtttcttcttcaa

SEQ ID NO: 19322 - DNA, 2059 bp, Cannabis sativa
gtgctaaatgtagcaatgctgcctggattagtttcctttatcttctcacagaaatagggtaactgagtatatgcctctttataagagccttgaagctgctccctagcaatctctttcgcccgccatgcctgagaataattcaactgaatcccatactctcgtttgatgtcatcggcaatatccttaggcttatagtttggagaaactttcaacttctcctttatgatacttcctacccaacctctagttgcgcgatacccggctttcactgcagctccatcacatgtgtgattcgtgtgcattttcttgatacaaaccaattgagtagtagacaaccttgaagcatatattctccatgggcaaccttgagacttgcatttgacagtgacacgatgactgtcatttttcttatatctgtaagcaaatccatgtgcaattgagtatttatgcaaagcttcccgaaactcactaaaactattaaacctttggtccacaccagtgattgtgttttcccactgctgagcagccttacgatgattttcgtcgcttgaaccacaaggaacacaagccaggggaaattcatatggcttcaaatcattttggtgattatcagtgccattctcaatcagaatatcaacaccctcagcaacaggaactactgcttccgatacagttgtcctgcttgacctgcacattcaaccattttgtgaatcctttaaaaaccaagttcaaaacaagatacaatgaaagatcaaaatcagaaaagggtgttccaaaatgattagaacgacaaaaacaactagtaattaaaacaacaatcacattacactatctttctcacaatgcataacaaaatgtgaacagagtccatttcctttagctatacaaataatgcattaaaaacacaaaattgaaacagtgaacaccatagcagtaagtacctactagcaggcatgttggatacatttcgggcagcagcttcctcaaacatgacaaagacatcaacagtgacagcctccccaagaaaattgaccattcgttgcaaatccttgtctttggagattgtgatgagggtcttcttattgccaggaaggaaatacttaataaccatagtatcagcattacaattaaacatttcagctatttctgacttgaaatcattgagttgtgtttcactgtcaatgtccacagcataggcctcacccccattataggagagagatccatctttattggtgacgaattctccccctgactgacatattgctataactttcttcgtagccatgaccttattctaccctaaaaaacattattcatcaataaaacaaacacacaaacacttagcatgaaaaaaacacatacaatgaacataacaacaaaaccattcataattgtcaaaataagaaatcagaacaaacccagtttccaatttcccacaagtaatcgaaaagcgtaataaaaattgaattttttttgggagggagaaatcaatttcaatatttattctcagcaaacaacaataccatatgaataattaaaaaaaaaaaaaaaaaggatttttagacaacgatgagaaaaaggaagaaccctaatatgataaaagacaaaccttgaagccagagtaaacgtgaaaaagtcttcgcggttgagccctttatgtgttgtcttattctcgttcaaataaatttcaataaaaaggaaaaaagaatggaatagagatggaagtggaagtggttaaacaaagaagaattttatggtttgggttaacaatggcttcaacccttgtgaagggttcttcttcttcctgttcttcttcttcttcttcgtcgtcgtaggtcatagccgtaagaagaagagaaaagcgatgaaggaagggagagaagactactctagctggggttgcatccttatcatcctacgtccgcctaattccaaacccccctacattcaacatcattttctctaggcccattaacctggcccaatgggctgctttctgagggtccatcagcagtctaatagtaggggtaagttgaaaaatgcatcttttattaat

SEQ ID NO: 19323 - DNA, 2820 bp, Cannabis sativa
tgtagtcgtgtacttgatgttgtgttaaacaaaatgaaaattaagaatattaatcattctcttagcttctgtgatgcatgtcaattagggaagtcacacacactgccatataaaactaatcaccgccgagcctcaaaacctcttgagcttgtgcacacggatctatggggaccatcacccatagcatccaacactaatttcaggtactatatccattttgtggatgactacagtcgttacacatggatttaccccttgagagccaaatccgaagcacttggtgctttccttcagttcaaatccctagttgaaaataaattcaattgccatattaaacatctccaaactgattcaggaggggaatatcaagccttcaatcagtttgtgtgtaataatggcattgaattcacacactcatgtcctcatacctcagcacaaaatggacgtgcagaacgcaagcatagacacatagtcgagatgggtctcaccttgcttgctcaatctcatgtccctcaaaaatattggtgggacgccttccaaacatctacctacttgattaatcggctacctacccctgtcctaaaccagaaatcaccatttgaaatattgcactctagacaacccgactacaaattcctcaaagtgtttggggcagcctgtttcccatgtcttagagcatatcaaaagcacaagtttcaattccattccaccaagtgcgtgaatctaggatatagtgacagtcacaaaggatacaaatgcttgtctagcacgggtaggttatatatttccagggacgtcattttcaatgaagatgagttcccatttcaaaatggcttcctaaacacacacaagcccgagtcacccgtgtctatccttgtgcctttctggtcagctacaacttactcaaacagtcatgatactacacaaatcctaactccaaatgctgaagatccaactggtggagtacatacaagctcacccttaaggtcacctgctatgccatcctcaccgtcctcttcctcacatcaggtagatgaatctgaccacattatttcgagttttgaaatgaatgacaggcctaatattgtgtcaaccgaagagagtgatccaagcctaacacatgatcagcccttagaagctgaaacacgacatgatgaagctacccccagtactcaagtcaaatccactcaccctatgatcacaagggcaaaggctggaatcttcaagcccaaaacatatgctggactgtcaaaatggactcccatcactaaagtaccaaattcagtggaggaggccttgaacactcgtgaatggagagatgctatggacacagaaaacaaggctttaatcaaaaacaagacatggattttggtacgaaaaacacctggtatgtacatcgttggaaacaaatgggtttacaaaattaaaaggaatgcagatgggagctttcaacgatgcaaggcgcgactggtagcgaaaggatttaaacaaagggctggtatcgactttggggagaccttcagtccggttatcaaagcttctactgtcagaatagtccttacaatcgccgtgtctctatcgtgggaagttaggcaattggacataaacaacgcctttctcaatggatcgttagttgaggacgtttatatggagcggccacaaggattcgaagacgaaactaaaccggactatgtctgcaaactggtcaaatcaatttatggtctaagacaagctccgagagcatggttcgacaagcttaaagcgacattacttggctggcagttcaaaaattcaagggctgattcttctctgttttactacaagtcagaccaccatgttatgcttgtgttaatttacgtggatgacattatagtaactgggaataactctgagatgatgaagcaatttatcttgaaactgaacaagctattctccttgaaagacctcgggcctcttcattacttccttgggatagaagttcatcgtgatgaaacagggatgtatctcagccagccaaagtacattgaggatctcttgaagaaaatgaacatgcttcatctaaagtcttgtcccacaccaatggcaactggaaaaacattgtccatattggacggtgaacctctgaaatgtcccacagagtatagaagcgtgattggaggactacaatatttaactcatactcgacccgacataagctttgccgtaaataagctcagtcagttccttaaagccccaaccagtgtacattggagtgctgtaaaaagaattttgagatacttgaagggtacaccaaaccacggcctacacattcgtcattgtgaaaggttcgacatcactggttttttggacgcggattgggcatgctgtccggacgatagacgttcaatagcaggagtatgtgtgtatctaggagacaccttagtttcatggtcatctaaaaaacaatctgtggtgtcaagatcgagcaccgagtccgagtatagagctctagctcaggtggctgcagaaatatcctggatacaagggctgctgcaggaacttaaatttcccttcaaatctacaccaatagtctggtgcgacaacatgggcgctagtgccttagcttccaatccagtatatcattccagaacaaaacacatagagttggatgtacattttataagagataaagtactggagaagaagctcgaaatcaggtacattccatcaagtgaacaaactgccgactgcctcaccaaaagtctgtctcatagtcaatttcagtttcttactggcaaacttggtgttgtttgcacaccacaaagtttgagaggggatgtt

SEQ ID NO: 19324 - DNA, 3238 bp, Cannabis sativa
tcatggtttcctatggcagaaagttaagtgcttaaggtttgcataatgattaatcttaaagttgttcatacgatttatatatttagtttaaccatgaataatatatagttttaattacttttatatattttctccttacacacaatcatacaaaaaataattataattattaaaatttaaatctaaatattactatcattttaattgagaaataaaaaagtatcattgttattattatcaaattattgaatttttaatatgttgtattttcaagctgtgctttcaagcttgtcgtgtctaagcacatattttttcgtatcaagttgtgctcgtgcctctcgaactcatatcgtatccaaaaaacccaattcatatttacaacacgaatttgtggcacacataaaatcttattgacttaaggagattgatttattgcaaaatttatgtgaataaacatggccgttttagaaactcaacaacaatagtacatacctcaatttggacaaagaattgatcttattattattacaattgagtattagttgataataacaaacatgaaagtttgtagcataagacaaccctaacaacatagaaaactatcactataaaaatcaaaaagaaatgcaaaatatgaaatgtcttgttaaactaatcatattacacaaaaaaaccaaaaatcacattctaacataaattatcaattagtcttcttgtcaacattggtgattagttgtcgcatttggaatctccaaaacatgaaataagctaatcccaacccaagtaacacaaatatccaaacactatcttctctattctctttctctgaaatcacttcttctattccgaaattatccctacctgaatttcccataaaagcctccaacaaatgtccatataccacatatacccttccatcattccccatagtcaaagaagtaggaaacctagcttcatcaaggtcaattttgtcatataccactccttctccccaactatcttggcttttcaacatccaaaccttcttaggtgagttcaccaaaacgacaccgtcttttcggatcgccattccatcggctataggcatatcttcgtttagtaagaccaacctggtgttaaaatgctatgagtttgattgaaatttataataataagtaaaaatagaaaatttgtgtgtattttgtcaaacatttctcgtgcgagtaatttgtgagatttatattatagtcataactaccaagttgtaactctatgatttagataaatgttataagtgtgattgaaatttattttgaaaaaaaagaaccaacctggcgttaccgttgtcctcgttgactttgaacattttcccggtattggtttgaaccactaaaaggtaacccttgctcgagtaaacgataccgtttaagccgcaaaagctgaacggtgattcttgatcgacgggataagcagtgaagagtggcgatttggagaaaattgaagcttctccttgattgttaaccttccatatatagttaccaatcgagttggtcacgtaagcgttgcccttaaagtcaactgcaacagcgttcgggcctggtctcttgagatcatctccgtcggtgggaaggtgagaaaggaaaactcggcggcgtgtgcgaaggtcataggcggctagagcaccaaaattagggagtggttcgatagcattgatagcggctagaaggcgattgttgacagtgtcgtaggtgaggccaaggatggtgacgttctcaggtaaatcaggatcaaaaattagagtttcgacgacgccagcatcagagacagagacaatggttcggtcacgtacagaaccgaggataaaatgttgggctaatgggtcccatgtgattccttccgggtagagatttggagatcggaaattgattatgtggggctttcgagcttgggttagggttgggccttgggccaataagattaggaagagcatgagggcagagaacaacatagaacgagtcatgatgatattaatttgattgagttgttgtgcttagacttttagatttcagatttcagtgactatgagaaagctatgtataatttagggctgaacatgggttgaaacgaaaactggtaattaaggttaaacgagttaattctctgctgccctgaatttaagactaaacaatcatcagatacaaacattaaaacaatgtgattaaagattggcatacatacataatacagttcagtactaatctgagaacaaaaatgcaaaagaaaagaattcaatatcaaattctattgagatacaaaacaaacacttaatatacataaatttaaagtttgtatatacagtgaagcattatctttctgtatacttattgtaaaatagaaagataactgtgtttgtgtgtatgttctttctactaaaattgcctcattaaaatatatcttaaatcttcatccacacaaaagcaacaagatcttatcaaattgagcaaaagtttctatcatcttcatcttacactctaacaaaatcccaaaacccaaatgccctacattgtttctatcattacattaacacaaatacaattcagtacaaatttcctactgaatctaataaacaatcacttcacacaactgttaagttaagcccatataattcagtaccaatttcctagaatgaatccacaagcaaaaaacaacaactttggtgtttaacaacagaccacaatttaatcttttttcctgttcttagtaaactctgacttcttggcccaattcatatcaattcaacaacagagcaaaaatcaatcatttttcttgttcttattaaactctgctttcttggtccaattcatatcaattcattatatatatatataaatttaaaataccaaaattctatataatatgacagtagtaaaatgatcaagctcactcctttgcttttctataatctaaactaaaataaatttctgtaaaattttatcaaataaatttcaattaaatgaaaagtaactaacaaattcaagtacagaccaaaatataaaaggaattcaattgaaactcatcaaatatgaatcgaaataaagaacaaaaacctggaagacgccggatttaggtggtggtgccgaatgccgagaaaggaagagagatgagggtacgtggtggagattaacgccggcgatttgaacgaagaagagagattgaagatttgggcattaatgtattcagccctaaattattatattat

SEQ ID NO: 19325 - DNA, 2659 bp, Cannabis sativa
gagagagagagagagagaaggatatttgatttttttagaatttgaaaaataaataaatggtaagggtcttttgggtaaattggaaaattattaagatagtattgtataaatgatattttttgtaatatgtgtcttttttaagtatatacaatgaaatttcccttaatttgggtgtaaatttaaatgtgataccatagattattattattttgaattatgatttaagtaaaaaaataattacattctttaatttttttaagtaaaaaatattataaatttaaacccacattaaattaaaattaagcacacatcacattcttattaattaagagtatagatactttatattacactatacaacattataatataaaagcaaagtcaataattcataagaaaaatattataaacttaaatgtacatttaaaaattaaaattaagcaccccaaatatatcaaacataaaagcactaacataaaataaaatgtgatacaacaattcaataatatgaaagattttagtaaattaatataatattttcttttaattaatgtaataataaagaatattttttagtataatttttagtgctgtaattgaagtgaaaataatttttgacattaaattttaaattttatgatagtatgagttgaagatggtcataacctaaaaagaacagatgaaatactccctatacaaaaaattgtaaaataaaaatatttgatagcgttggtcatactaccaactaataagtaattgacacaatctgtattactaccggctcgcatattaattcgcataactaaagccacaatcaactacccaaaggttattttatttttacaaaccgaatcatgcatgatcatgtttttagacccaactatatttaatttaagtctttagaaagaaccaccaactaactaacatgtctttcattagttagcaaagacagaaatctcatataaataaataaaatattcctaaataaatcatatgatatgagtgtgcaaaaagcatcgaattcgatttctaaaagcaagaagaagatcaaacaaaatgcagcagagagaatggatgggacatgcttctctctctctctctctatctctctatttatatcttttcctgggtcatgtagtgttgcgttatctttagctttcaataataatagtgttttcttttatcccatcacaccaaagtatgggaagcaacgaaagagacaaaccaaaagtacatatagatgaatcaaattatattttgatgaatagaaattagtgaaagaaattagaaaagaaaaaaaaagtatctaaatcttataatatgaaaaaacaaaacactacattcctattaaaaaaacacactatattttggggtttctttcagagagctttcgagtccctacttttggacaaagccaaaaccctctcccacgagagaaagaggggcaagacttaaccctagccacgttctctactggcacacactttatctatttgaagaagttacacagcagaaagccagaaaacacaaatgaaaaaaataaaaataaaaataagcttggtatcagacctcagccagctagctctgccaaaaatgaacctgcaacacccgcctgtaccagactttattttgacccagttacaaaaccaaacaattcttaccaaaaaaataaaggaaaaagtaaataaaaaatctacccattgttactctctctcccaaaatacccaaccatcatgattcatgtgtgttctgctgcccatgtttgatgtcattgaaacccataattcaagactaatgtttaaaatctagtcttccaatctaataataaaaatgccaaccacagcctatgacctcacctgacttgatctgactactccttttgaatatttactgttgaactagcttttctatttttaaatttacaatccactcccaaacaaagcaatgaaaaacaattctggttagtattaattatatacattttaatttttatttgccaattgaaaacccaccaccaacccaatcaatcatccaatgttttaacctacaaagttggtctttcacttcacgtactataactctagctagctagtgttattattacaactcactctgtgctctactattaactagagtacttcatcatatatattatccgcgattcccaagtccctggcattaattaaatgcattcaatatttcattaatatttggtacttctaaatcttacaataaaactagaattaattaaatacgttaacaccccaaaaaagaaaaatactaatataataataacataaaattacaaacaccaatagaataaaataaaaatttaaaacaagttcttaatttcatagtaagagaaaggtagtacaccgataaactggtcagactaataatctttgataatgaagatgatagcgataacgacaatgatggtggtggtggtggtggcagtggaggccactactaataaggcggcggaggcgttggaggctgcctggcagttggggcccaaattacatcggatggcaattggctatacatagacatcccacaagaatcggccggagcgtgtcctccactctctccaccccctgaacgcggcggagattgcgcctcagcggatggggtcgagttccgaacctcatcgtccgcc

SEQ ID NO: 19326 - DNA, 2479 bp, Cannabis sativa
caggtagtgatttgaattggattcagtgtgttccatgccatgattgttttgaccaaaatggtccttattatgatccaaaacactcaacctcatacaaaagcattacttgtaatgaccccaaatgtgaaatggtctcatctcctgaccctcctcagccttgtaaatctgataaccaaacatgcccttattactattggtatggtgatagttccaacacaacaggggattttgctcttgaaactttcacagttaacctcacaaccccaaattcggggaaaggcgaattccggcgagttgaggacatcatgtttggatgtgggcattggaatagaggcctgtttagaggggctgcagggttgttaggacttggtagaggacctctttcattttcatcacagcttcaatcactatatggtcaatcattttcttattgccttgtcgatagagatagtgataccaatgttagtagtaagctgatttttggtgaggacaaaggcttgttagctcaccctgaattgaatttcactactttggtcacagccaaagacattcctgttgacacattttactatcttcaaattaagtccatacttgttggaggtgaaattctcaacatatctgaggagacttggaaattgtcatcagaagggagtggtgggactatcattgattcaggtacaacacttagctattttactgatcctgcttatcaagttattaaagaaacattttttaacaagattaaagggtaccaaactgctgagattgaagatttccctttggatctttgttacaatgtttctggtgttgataatttggacctaccagattttgggattgtgttctcagatggagctgtttgggatttcccagttgagaattacttcattcaagtctatcctcaagaaattatttgtttggcttttaagaatacttcttctaatgctctttccattattggaaactaccaacagcaaaattttcacattctttatgatacaaagaattctaagctgggatttgcaccaatgaactgtgccaatgtttagaaaaaaaaacacttctcaaaagattgaaacaagtgtaaacatggtggttcgaatagtcatatttttttttcattttttttttacaggtacaaaattagattcatttgtttttttttttttccaatgttacatactgatgataatagatatagtaacatgatgtattgtattacaaagaatatatcaatgcataatttatattattattagttgttttatttattctgaaattgaatacctcatcataaggtcattattttcttcatggtgcaattattattatttttaagtttttttttattgtaacacttgtgagactttgtattataattagagtaatgatacgtaataatattatacaagtaatctaaagagtgagttataatttggataaatatgattagtttgaaaaatctacaccatcactatgtatatactacatgtataattatataatattttagtgtaattggatttaggtttgtaaaatatgaatgggtcaactgttaggtttgtggcacaaggactactcaatatgaaaacaaagcattaataagtcaattccaagggctttgaccaccagccaaactattatcaacacatgttttagaattttcatgtacttacaaaagcatgaatttaaaacctctaattctaccttacactttttaatgcttgtatttattatataaattaattatcaattgcgtttatttaatcaaatttaaattacgtataataaggcttcagaaaattctaggaaggaacattaccaatacagtgtgttcataaaaactggttggttcttgagatatatatagctttttagttcaaacacaattaagttataataaaagattttttaaaaaaaaataaaaaataaagaaaataagaagaagaaaaaagttgtccttttcattctaaaatgaattaaatatttatttgaatgagtcattgctagccatttatttattaatttatcttttttgaagctggctagatagctttatttttcttattttgataaaatatataaagaaaggctaacttttcaaataattatatcttgaatgatgtaattaagtatcaggtctcatataatttaataaaataatttttagataatatcgttaataaatcgtaagacgtcacttctaggtggtgcctagcactactatgagataatatcctataattagttagtagttttctataatctttattaaaataaaataagtggaacccgatattgaattgtaccaataacaatattgcatttcacaaaaatgctaggcaccatgggtgtccttttaacatttctcaatatatatatgaatgagtagtgctatcataaatcgcctattacaacctcttaatcaacatccgtgctcgaaaacacatgtcgaaatatttcttttcaattttatttt

SEQ ID NO: 19327 - DNA, 3329 bp, Cannabis sativa
  modified_base (643)..(643): a, c, t, g, unknown or other
  modified_base (1798)..(1806): a, c, t, g, unknown or other
  modified_base (1949)..(1949): a, c, t, g, unknown or other
atatattctttgaacgatgtaaatattttacaaaatattttacaaaaaaaatggtaccttatgtaattattcctatatataatatgtgtcaaaagacaatcggatcatatataatttaagatgagtcttactgctaactttttattacaattttttgtatccaaacacacatactggaatatttttttttcaaattttttttcatagcagtgttcgttatactgggatatttttattacaatttttgtatccaatcacacatactggaatttttttttttcaaatttttttcataacgttgttcgttatacttacaatattatctctgtaaatttcgaaaataggtttaaaattttttgaacacatgtgatataatatatcaaacaatttggaattgttatgaaaaaaaatgacaaaagaaaaaatattttgacataatatttcaggcataaaaattaactaagagattataataattagcatacttgtggtattaattatgtggtggaatgtcataactagtacacccataatatatatccctctttggtgttttggtttctgttttgtttggttattagagcaaatatggctcatatttatacaatattaatattgtatattatatatataaatatatatntatatatatatatatgtggatgtagctggtaaatcatggggttcctgaatacgttttgaagagtgttttaaaagaaacatctgatttctatgatggaacactgatagaggagcgtaggcagtacgagagaaagagttgcagtgataagatccgatgggaactacggtcatcatctggtgagaacagggaatatctcaagattgttacacatccccactaccattccccttctaaccaacccactttaaggtattattattaagttaattaggatttttatccctaaattttaatatttattaaatcatgcccctgaatttttatagccgttgaaatttttttttattgagattgttagatttaaggaattttatttgatttcattcaattttacttagtgattgttatgtactaaatcatactccccaaactttgacatataccaaatctctcgaacttttacatgtattaaatcatgcccctgaacttttatccatgttagactttttttttttattaaaattgaataaaagtttttaaatctaacaatcttaattttttaggagtcataatttgaggggattaaaaaacccaattagtcttattattattaccaaaactgtagttgatcgtcttaaattaaaattatggtaatgttaagataaattaattattatgcagtaaagctttggaagagtataagaaaagaatgcgagaagtggtacatggtttaggaaaagccatatcgaaaacactaggaatggaagaatcattcattgaaaaagcatttaagcttgagtcagggtttgatgtggttgccctcaattattaccctccaaactttaaatccaaaggttcaatgggattgcctgatcataccgatccaggattctttgtttccctaatccaagatgtcaatggagggcttcaaattctatcccatcaaggcaaacgcatcaacataaattatatgccttccaatgctattttgattaatattggagatcatcttgaggtatataaatatatctacattatgtacttatatatatatctctcttatatcttgtatcaaggccggttttttttttttttttggttaaagttaacggttaaaactaacttacaattaaattatttaattaattttttttnnnnnnnnntaattttaaatatttaaatttaatttaaaagtatcaataaaattaaataatttgtttttatatatatatataaatttaaatttaaatttaaatttaacattaattcaattaattaacatatactttataacaaatttattagntatattatttaaaatatttaaatttatttatttatttattttttttaataaaattagtttaatatattctttttataaataaatttaaaattaaattatattttatatattcaagaaaatataattgaattgtattaaaattaacttttattattattattattttaactaataattaaataataataattctaagcaatgttactatttttttatttatttaagggtttatatattacattgtataatttggaattcgaactcagacttccaacacactctatcttatgaccacttaagctagtctgaagtggtttactaatacctagctatagtgtatatatatatatatatatacatgattttgtccaattaagaatacttatataagttaaatttgttcagattgtaagtaatggaaagtacaagagccatgttcatagagttgtggtaggcaacaacaaagtgaagaggatatctgtggcgacacttcacggaccatcgttggatgcgtttgtgaaacctgtgtctgatttcgtggacgacgacgatcacccatccaagtacgatggagccacatacaagcagtccttggaagccactggttatgatgaggttgatgttcaatctagtattcaacattttcgaaccaataattattaatttataataatgatcagttgtcatggttggttactgatgatcgtcattcgtgatgatcatatataattaatttattctcgtatgtatttgagagaagggatctaagggtgaagttttgtgtggcttttatattacttaagtgtgaaataatgatagttttatagtgtgtgggaatatggcaatgtgccacatgcatggtttggaggctcgggatgaatgtataataaaagtctttttaattaaacttattgtattttaataaataaataaacaagaatatcaaatttgtgttaaaatttagttgtgaaattattctacatactatttatttaattatttttttctttatttatggtttgagttgttcctgtgatttttatgtaggttgttttataaattttagttgcgatttagattgctccgataacaacgggtttttatgtggattttcataaaagtaaaaaaaaaaactattttgaagtttaattactatgttactatagaaatcttcaatacatagttttttttagttggaaagatgagatgcggtgaaaagtgagttagcttacttacagctaagattcactgagtattatttatatatgataaaattaatacaataaagattacaacagaaagttgttacaagaagataaagaagttgatatgatgtaagcaaataactaacttctaactactcaatacagttgaaactag

SEQ ID NO: 19328 - DNA, 4372 bp, Cannabis sativa
atgaacttgtgatttgaatattcatctctctcaaatttaagataacaaaaaatatatataaatttgtattggataatgtgaaatgattatgtaagtaattaataaaaatgtatatatctatctctgcatgtatggcaagattgtcatgttgctaaaatccatattttgtggtattcttaatttgttggattggattaaattacacatgcatgcatggggttttgttttgttaggctaggcctagctaggccccacttcatcatgttttgccctaatttcatttcattactatctttagccttttcttttggaattctgaacaaattatctactttacacaactacactatcactctacttaaatttaatatttatgtaaattttgtattttactttaatttttatgtagttattttattataatataatagtctatttgttattattaccaactcaaaaattaatgttacattaaatgtgtaacagttaaaattttactataaaaatttacgtaagaatttaaatgtaacaaaataaattatataaaaaattttaccgttgaaaaatttaaatagttaggcattcaaatacaataaaatgaacttacattaaaaattttgtggcaaatatggtattatgcatatggatctgtactatcattattattaggtagtctcgatagtctcctcatgttggtggtgatgctaaattttataatttttttctttccttaatttaagtatttaagtcttaagagtgctcttatataagttaacgagatacaaacagtgtcatccattcaatttatcatcacataattaagattgaataagatgcaaaaataaatgacttgttagtggtgcttgaggcttatatatatggccacttgaggctagctcaagtggtcataggtgggtgtgtgtgtgtcttggaagtcctgggttcgaatcccaagtaaaacatggttgtaatatataaacgtttaaatcaaaaaaaaaggcctatgcacgagtcttattgcaaagagaatgaggaaaaatgaataaagatttgtaggttggtatttgaattgagtccaagtgatgaggtaggtgcatgtggaagctagagtagtggtccctaaaatctaaagattattgttgtgattcattaatggaacatttgggttttggtggtatatataaagtagattcaatcaagtgcttcactctacaaagttgccaactagtattactattaagatctttcatacacagtaaaacaattcaaacaaattgagggttcactcttcagtttaagccacatatagtcaagtccaactctagtgtgtgtgtgcaaaagaagtatttgtaattttgtagtgtagaaagtgtacatatcattactctttataaactaaaatatatatatatatctatacatacacagcataaaaacaaatgagttttcatatatagtaagtacaagagcttttatggggcctctcaggtacattgtatgccatgctatgtattgtataggttatagattttgaaagttaattagaatttttaccttaaattttaacatgtattaaattttgttctttaagctttttagacccttgaaaattctcctcaaactattgagattgttgaattcaaaattttttattcaattttactaacagaaacctaatgtagataaaaatttaaggagcacaaattgatatatgtcaaaatttggagtatcaaaatttgaggcacgcgatttagtacatggacaatcgtcacgtaagtgaaattgaacataattggacaaaagtctttgaattcaacaatgtcaataattcaagaagaatttttaacggtctgaataaatgccataatttggtacatgtcaacgttttgtgtaggcaaaatagtaattagcctatggtgtgtactagttttttccttcaagttgtagggaacatgcatcatgcatgccataatactataccatccaggttcacattatattatattagtacatttgatgtgatgtgacatgaatgtatatctagttgttactcaactgattgtcaccatttttgtccctgcagcttgcagctgagatcagatacattcattacaaaatactaaaatgtcataacacaagtacattacaaactcaacaagcaggcttaacacaataataataataattggacacaagtacatagcaattattaatatataattagatatgacttaattatgagaataaacaactttaaacaaactaagccaccaacttggagttccagaaaacaacctttgagaagcaacaacatcaaccacttaacccaattcctcctgaatacacgaaattttgaaaatcaataatcaaaacatgatgaagcttgctaggaatgttttatcatccaagaacattaatgttaaccttgcttatcatatcatgaaaataattctttagttcaaatatatatgtcttcatgcttcaaaagaatctataattttatttatatttcttattattaagcagccacacgaattcattcttaatctaataatcttttttatctttcaatctatctgtttatctatctcacttattctgtttgtgagctaatccttctatctgtgttttaagattcttctatcatttactcatgagccttaaatcatgatagacaaatatataaatgagaatgttaactttcaaaatgtatttggggctcctaaggatgtttgtgtatggctttaaggcttcaggagtagttaggatcagtataccaattattggagaacattctctttcacggattaaatgtaaaagtattgagctatatataaaaacatgagctactccactcatcaccaattaatttcgagtagaaccccatatttcttaacatgttatcaaatccatatccttagctggctttcgatcacacctatctaaatggttagctagtcgcatgagatctaaattttagcaaatggcatggcttgtaataaggtaattcaaaattggtgagcaaaaataaccaccatcttgagaaatattgagccacatataagaacatgggttactccactcatcgtcaattattttttaacaccaataagatgattattaacagttgcatgcattcttgtaaatgaatgcagctgttagtgcaaatgggtgtttaattatgaatggttgcaactgtagtaatacaaatttctgttaaagttaacatttatattagtatattttgttaaataagtcgttaattaatacttgaaagagcagaggagattaaattatttactgtataatggatctttaagcatggtttcgaggtgataaacttgagggcaatcttcaatctccatctttcttaaagaggtgatgaggctaattctctcacgcggtatcgtcaacttaggacagagcttgatcgaaattgtcctaagagaattagagtcgctgatccaagttgggatttcctctaaactatcacagcgccatatgtggatttgctgcagactgttgagttctttaagtttttcaagatgaacatttatgtcagtaagttgatccaagggacttccacattcctggatcaccattggacatatccatgatatgtagtgtcctcagtccatagagaggagcaactgtggtggaacttgattctttcgaacaagagctggtgtacttgatgtggaagaagttagtttaaaaagagatgatctactacttgggcgaaactggtgcgttggagagaggagaattagatgaaaaagatgttgatgctttaaattcagatgtagtatgaattcttctcactccttgtgctgccataattgaccgtttgaatggctcccaactagtgtttttaagcactagtagttcttccagccatggaaacagaggcatggaagtgagagaggggcaatcctcaattaccaatttagaaagacaagtaaataataatgtagcatcatcacatgagtcatctttacaccatctctttagttctggcaaattagtaagtctcagctctttcaaggatgaaaatgatgtttttaatgatgtttgatccaccacaatgtattgaagattaggcaagtgatcaagtgggggtaggcaatgacatttgttgcatctagattatgataatttcacaagattttcaagtgatggaagccaactcgaaaacttggtaccaccataagtagatattgacagttctctgagatttgggtgtggctcaagatcttctagcgcctcttcaatgtaatgtttttagtacaagagtttgtaatgaggggcctttaaagatataaaactcactaatatgttatttgcaaaataagagataaaacaaataaccatc

SEQ ID NO: 19329 - DNA, 2823 bp, Cannabis sativa
  modified_base (67)..(69): a, c, t, g, unknown or other
catgaaataaatcatgtgaactacacaacataaaatgttatttcagatctttattaataagtaaatnnnattatattgaaatgcgttttatttagggcacaaaacccaacaatttgcccttaagttcacgtggaaacttcttgctcgtgggtggacttatttgaccactaagctagttggatgggtgacacatgttctctcttcggtatctgcggtatttaatgttgccgtgagatctagaccttaattggcgcactgacagttactgtatatatgcatgttgtcgtatgtacttcccaacatatgtgatgattatactttcttgggagaaacctaaaatttatatctttggattaacatattagccatctaactattggtttttatggtccatatcaaagttataaaagcgaaagcaaaattttgataaaataatttttatctaatatgaaccataagtccaatgaacacaacataatgaatatagattaaatctaatctagtgaaagaaattcaattacatcttgatgtctatcagggtatccttatttctttttgcataaaaattgcacatccaatccaagaacttgattaaagaatccacaccttgatcttccaatccagtctcaacaattagaaatagagtgggttattagaccttataggatgaacagatttaggtattacagtttgaactcaactcatgagacactataatgagattaggatttcgatctcacacacacttagaatatagtgtgtgcacatgtgagactagagagagagagtaggcgtgacagaaagagaggagtgagaaatatatcaatcctattttctctttaattgcctctatttattttctctattttttagtttttaaaattgttgctatttacgatactatacatccttatatatagtgttataaagaaaatatttaatcctttatttaaaataaaagataaatatctaatttgatttgaattcaaaattcaaattcaaatataaatatctaataaccgaatatcaaaatatctttattttaataattattattttaattaaaaaatatctaataatatatttaattaataattaaaagataattaatcttaatttaatttaaattattttcagtaataaaataatttaaccaaattaatcatggacatttatatgtcaccctacacatgttgaataggcatacacgtgtgagccatattttaaggtctaaaattgatttctcaattttgctacaaataagatttgttatttattttaccaataaataataattgattaattctcattaatctcttattatcacaaggattaaaataaataaataaatattattttctctaaaataatatctttctctctttaatattcattagttaataataatattatatttaactaattaatatagttttattcaataaaattaaatagttaaatactattaattacacaattcataattttcataatttgtaatatcccagaaacttaattatgaataatttgggcttattatatattatggattaactaggtagtaaagagtagcattacgatcctgctaacctaatttagtataaattataaatttttctataagtagataaataggcataatttttttaattacagagatttatttgaaatatgtggatataatgtaagttatttgtgaaataaaaatattttcaagttcggcgatcctggagaccaaattgcaggccaaaaatatgataatagttttacttagtaatgttgatggaattagtgaaataagttgattttagatataccagagtattttggggtacttggagttgaacaaataccctaaaattaaagacttcttagtggctaagaaataataagacaactattcataacaaagtttttattaatattaaattattattactattattattatttacatttatcagtttaatatatattatatatattaagtttaaaaatatatcaaaaagaccgatgaatgaaacccttcgttggttcgacgaaacccttatccccctctaattattttctatgattttcaacccgaaaatctagtgattcaagcttcggtagtagtgggatagaaaatacttgaagagggaaggcttgaggtaaggattggtatcatgttaagcttaaaacgattggttttatatagtgattttttgaattagaatagttatggagggtctgacctcataaaattattctcgggtagctataggactagttccaatatttacttgttgaatttgaggtgattttgagttagaaattaagtttgggactttttaaagcttaagtcagaacgttaatgaatttttctatttaagggcttgattttaatttttgttacgtgagaatagttgtacttattgtatatgtgtgccttgtaaagtttggagtgattacgataggtttcgatagcgtttcgatgagtgaaaaatttagaatttttgactttcacccctgtcaaaccgatccactagttggtgaaccggttaactgtttcccatccggtttaccgtttctgggaagtctcaagaaattgggaatcgtatttttgccgtaacttttcactcgagtgtctatttcgaacgttctatataccatttcgaagcttgtgacaagctttaaaatatggtgtatgttttagagctaaaatataagttttattttagagtatttgtaccatagggtttgacggaaaaccctggattgtcatatgcaagtgttaagcagtgttttgggataaacacttattggtttatcgttgttgtgaca

SEQ ID NO: 19330 - DNA, 2477 bp, Cannabis sativa
cccccgagaccccttgtatgttgtgggtagtcatagtgttgtgtgaatgtcctcatttacctttgagaatgtccttatatctatggtgggggtagtgtcatctacctccatagactaacttggcatgtaggtgtgtggtgattgttcattgttagtccatcgttttttattcttggagacgcccaccttactcaagctaggggtaaaggtacctgtctgacttcttttttaacagtcatgatcaccgtataacggtcaccccaacagtcatgactttacatattctccattaattcagtatcaatatttccgtaccacgtgtcgttactcttgccacgtcatcattaaatttgagtaaacactaatataatatataaaaatacaaaaagaaaaagaaaagtataaggggtttattaaagccgaacaaactcatgtagctcaaaaaatataagagaaatagaaaattaagaaattaaaaaaaaaatattgctatatccaaaaaagaaaattagaaagaaataaggagagtaataatagttgttacagatttatttgtgtaaaaatattactttcaatatgttagtttttatgtaattttcttctattttttattataataatttggagagatacgatacatattttccctcatatataggtagcttaaacataattaaataacttattctccaaaaaaaaaaaaaaaatagaacaaattataaataaatactactaaagcttcttcaaattattatttatttcatgtgatcacaatccacacacatcataattactaattattataagtacaaacacatataatagagcattaaattattgattttcttattctctaatattatatattaaatacctaattaccccacatgcatatcccaatcccataaataatattattaaaattattcttttcttttcttttctttttctaataatatatattcattcattctcatcataatagtcttggctgctataagggctaaaagcttcccaaaaccaattggttttcctccatggattaattcccatctctttgcaaatttcatcactatggttgatgctaaaagttgaaatgcaatgccttttgtggaatcttgtacttctcttcatgatctctaactcttcatttatttgttctagcattttcttcactggaggaagcttgaatttctcgtccgctagcctacacaaccacttacagcgcaattctgctgtttgcaaattagatacactttctatgtaccctacaaatgccatgttgggtatcagtggatgaattgtacccctgtcacacatatcaaaatttcattatacatagaaatatttgcagcataaatagtacatatttttatttcattcacttatatattatatgttttttttttttacaaattaaatactaaatagagagaaatgttataaaggacataagtaggactcgatgcaagggcgatatgggctcccactttggccctatttttttttttttttttaaaaaaaattatattttagatttatatgtattttttttaaagtttagatttgtcttcttatttactactatatactaaaaaaacataattattttcttgtaaaggcccaatatgtttaaaatgtcatattttatattttattcaataaagtaattcaatttattttttaaaaataccatgtttcaaattttaatgatcactatatattaaaaacaccatttttgttatacaatctttctagaataccgctattagtatactttaataccaaaactcacttatctaaaaataattattttataaaaaactgctaactactcatctctaataacaaatacccatattactatatcatatatagtgaaaaaaaatttgtgaaatagcaaaagaaaatttgattattattatatattacctatataagggcatgacaccattggagtcaagaagaaggctcttaaaagggtgaggaaatatagactggagttttttcttgccatcataaccagttgcaagaagaactacatcaacttctaatctagttttgtcttcaaattcaataccaccactccaaaaaccccattttgaagcctttttgaacttcaattttcctttatctgcttcctcaaagaaattctcaggcaaaatagccatttggcatgaagcatagtcctcttcaaatggatgatctggttttagtccatacttcaccaatggtagtttccataacaagtattgctctatgaattttgatattcctcttctctataaatatcaattatttaataataattagtactgatctgggcgtcgtaaaactaatttttcttattatattattgttattctaaacaaatataattaatttatgtgtgtgtcgagtgtgtctggaagatcatatatattttattgaatacttctgttactaaaagatgctcgaaataaatattttaccaaata

SEQ ID NO: 19331 - DNA, 6399 bp, Cannabis sativa
gttgaggtattctcaaagaagttgcgaataagtggcttcatttctagaacatcctcaggtatccatgtatcacccatcttcggaaaagtattgtaagcatgcccctaaaagttcacaaaacaaaatcattaacaagacatgcaactagcaaataaatacacaatatttactaattaatttgtacatacagcatcatttcctgcaacaaatgctcccgagacagcagtaataccgacgagtaagctaacaggaagagcaagtctctttacttttgcagcccctttaacccatgatattgattctgcaggtggttcgggcattacaaccgagagacctgtccagaggaggccactgtatatagcaaatgccgaagtaagatgagctgcaagccgatatgggcttactctaggctgagcatattcagatggcggttcctatttgaaaaaataaagagtaattaaaatgagcacaaaccgaaacatttttactattcaaatgtgcaaataaacttaatctcaggtgtccaacctctaaaccacttttaaccatccaccagccaatcagaccctgcccagcaccaagggcgaaaagagtagagagtttaagtccgagttgtacggtaatgtatcctttacgaagaaaatatgaaaagggtaaagcaaacatgataccaagagctcttccccacatacgatgtgcatattccatccagtatataaacttgaattcatcaatgctcattcctcgattaaccctgcacgagccacaatccataaatgcatcaaatattaataaaatgatagcaaatagcatcaaaatcattgtccaaactctcaaaatcctcaaacactgaccgcttatattcaggggactgcttgtacttatcgaattcatgtaaccattcctcatcagatagaggaggaagtccgccactaaacttccaatcagtcatcgaaagaccagatcttgttagtcgtgtaacacctccaagtacgaccatactaaaaacccaagcagcagatccaaaaagccagatcccaaccattttttgagcatgaggtccgccgtttacaagtagctttaatccttcattacttttcgcattaagggattgcacggtggaaacatttctcaacgatggaacatactgagaatgaattgcactataaactcattacacatgtattaaaattacatgaattgtgttccgaaatcaagtaaaactgtgttagaacaagttcattcattacattaaaattttcatggaatacagggtagccataagaaacatataatatggaaagcacaaatatagaaataattctactaggagataatatatatatatatatatatatatataaataaactttgatggacagaacatattaataaagttgcaattaaaacaagctgattaaaaaagagataaaatattaacttaaggatctcaaactctttgttgttgcaacagccaagccaattttttcgatgtcaagatttgaagaaagaaaaaaaaactaggaacaacggagaaaggaagatggcattgaaccagccatttcagtcacaagaacactaaaaaaacaaacaaaaagttttttttttttaaaagaaataatctgtttctgatctcccaatctatgactgtctactactggaatgacattttgcagatggagatctcgaaatggcgtttaatgtagttaaagctaatcaattcagctcaaattgtttgaagttggttcccagcttccatacaacaaaatttagcaaaacacaatcttttagttctaaagataaagatagaagaagaaccttaggggaagatcggaaatcatgcacaattctccgtacaattccagtggagaaaaatctggaggtctcctccctcacaacactagacgaagatgatgctgttttggtgaggtggttgtaaagagccttactgttgcctttcaccaacaaaaatgacgacaatcggctccggaacatctctttctttctgtctcaataccaaagccaatgtgttaaggttttaacttctactaacttttattgataaaacaaaatatttcttaataaactagttaaacaactatatcaaaaaaatcattttgaaatagcaactgagattctaaatgcaagcaattacaactgtgatgtgattggataagaggcatatattttgacagattctaatctttatttgcaaattaagcagaatgattcatcattttaagaaagaatgaaacaaaggcagagaaactaatagaggtgatgatgatagaaatgcatttgcaattaatagaatgagaatgtaatataatataatgaaatgaaaaaggactcttatctcatccaattaatagggatgataatgcaatagattgaaatgatgtgattctatatctataggtatttcaagcctaatctcatgctaagtaactcaatgagtttgatatgtaatttctaaataaaatagctatgaaaaaagttaaattaaactcttgagtgatgagtgttaatacattattactaatggtgtttattaagaacaacaaaaccttaattacttatattattactaatgagtcatgaacacctttcctgaaatcaaccttatatttctaataacattgaacaattaatataaacaatttatccacacagacattttatcaaacacttcatataccaattacaacacacacattttatcaaatattatctatcaaatacatatatatatatatatatataatatcaactatgacaatatcaaaatatacaaagatatcaaatgaagacaaattgagccccattagtaattacaaaaaaaaaaggtaggagaaatgttttaccgtgtaggtgagttaagaaacggagagttggtgagtgaggtgtaaggaggagggtgaagatgaccgtcggtgggtaatgcagccggtgcttgaggcggcgcgtggatgaacgcacaacgatggggaaaggtttaagctttgaggtgatcgaagaagaagaaggacttgatttaatttacttcaaaataaaggactttaatataaatttaatgtactttttacttttttttttttataaatagaattattattattattaaaataagttttaataatttacgacataaatacttaagtttaactctcgctcgattgtaaatgaaaacttctgtaagtaatttagctcttaagtatcaagtaaataatcatgtgtcaatccttaattagtctaggccattcaattttattttttatttaaaattaattaaaattgtaccaaattatttgacatttaacggttaggtatacttacagaagttttaagaatatagcttatgtattattaccattaaaaattaaatttaaatatttatatacaaccgaaagtaaaatttaagtatttacggtggaaaatattattattattattattattattattatatattttcttgatattaaaattgaatgagtttttacataaactcaattacttattggacacctaaatgtgcccataaccatatgaaaatatgtggtgttgggcaatactctactctaccatgtaataataacttaatgtgtaattaataatggtacatttagtctttgattttcagtctaattaaatattatagaagattaatataccttaatgttttttttttaagagaattaatgtatttaatatataacaataatttgtctcttattttggacaataacaataatttttttttttttaagatttgaagaaatttggtaagaaaatccaaaagcagcatttcgttcttctaagcccatatacaagggattattttacaagtacacaaaaattacaaaaatataattacatagaattttaatatttttaattttatttatagaatatatgattttttgatatatttttatatttaactcttgttaatttgttattaattttttgttatctatatattattttttattgttgtttggatgctatttttctgttacttttatgtagttattttattattttcatgttatttttatgatacaccttaaaaaagtaaaaaaaaaaatcttaaaacgtaaaaatgtaaaatgtttacaaaaaaaacagtactttatggtacaaatagttttgtttttaatgaaaaatggtataaatcgttaattaaatccaaaagtggtattttgttcttctaagcccatttcaaacttttcaaaaaagcccaatccaataagcccaataacaatagtgataaaacctcgaagccactctcagagctcttgagctaaccaacaatggcgtactcagctacaaggcgtagcttaatctccatcttcaaccgaactctctcctcttctccttcttcaacctcattctcaactcgccatcgtttagctttagcactactaaatgaacaaccccaactcgtcgtccctgactcagtaaaattctcagtccggttcaagacttccgggtcgggttactcgccgctaaacgatccggctccgaactggagcaaccgtccacctaaagagactattctcctcgatgggtgtgactatgagcattggcttattgtaatggagtttgctaatgagcctaaaccatctgaggaggaaatggtcaattcttatgtcaaaaccctagccactgttcttgggaggtaataagctaaattgggtttgattgttagaggggtttgagaaaagattggatttttgttaatggggtttgatgttttttgtgttttgtagtgaggaagaggctaagaagaagatatactctgtttctacaactacttatactggttttggtgctttgatttcagaggagctttccatcaaagttaaaggtattgctttataattttgttgtttatggctcatttgattttataaatgttgttcttttgattagtttttgagtgtgtgatactatgtgtattgatttgttttgtgttctagagaaatttgcagtaaataagtaaatatatatggtaaactattttgatctggttgtattatgcccacaccaaaataatgactagagttattttggtcttaaaaaagtgtactttggtgattaaaacgcaatcatttcatattatttttgtgatttttttggtttcttttagctgaatctattcatgatcattcatttattgtttctggtttttcaattatatgaggatatgtatattgattcgagaggagctttttattcttatattattgctttaaactatgaattttattagttgatgggctcatttgatttagagatgttattcttttgattacattttgagtgactgttgctatgttttttgaagattttcatgtaaagtaatgtaaatagtcaattgtttgagaggaaaaattagttctaagacttatggccacactaaaatggaagtgatttgtttgtaaaaaagttcactatcctgatttaagtgcaatcattttaattatatttgttggtcttttcaagtatttgttgtacatacagatatagaccttgacttgtttagagtttgtctgattcttttcccttggtttgatagaactgcctggtgttctttgggttttaccggattcatatcttgacgttccaaacaaagattatggaggtgagcttaagcttgtggaagaatcgattatggaggtgttctttgttatgcaagtagtcatatttgtttttgtttcaggagatttattcattgatgggaaagtcatacctagaccacagttcaggttcactgacagacaacaacaaccatctcggaacaggcctcgagctcggatggataggcgtagtagagagccaatgcagagccaaaggagagaaccgaaccaaaactagctacactgaatgatcataggcccaatgtgatgttcttaaaaacaatttctgagatttaatgggaaaaatcattcagagcttaggatgttgaactatgatccataaaaatcttggattgtaagtattatgtgaggtggtgaacttattatgcttgttttgatttgtttgttatcatctgcatttatacaaagtttatagaccttgtttttatgtattggtgtaaccattttgagagtgagcataaaagtttggggtatttttattttcttttttttttttttttcatagaaactcacatagcaactaacgaatttaaatcgcaactaaaattcatataaaaattattagaataactcaaaccgtaaatttttttttaaaaaaatcaaaaaataatatataagatagttctaaaagtttatgtatttcttatagtattattaataaattgttataagtgtatttttatattgagttccacatatttagattagcgctattagagtttaatttggaaaa

SEQ ID NO: 19332 - DNA, 9500 bp, Cannabis sativa
  modified_base (7273)..(7277): a, c, t, g, unknown or other
agggacatgattttgtcacgtgattgtactttcacggaatgtattccgtgatgtacaacaaccattaataggggagttatttgatctgaaggttgagattgatctaaatgtaattagagttaaaaaataataacgtactctgagacccattattacacgtactctgagacccatctaatgtattccatacattacagaatacattctgtaaaaatatcacgagacaaaatcgtatccctatatatatctatatagacggtaaaatgatttagggttagatttgtggtcacatttgaggacatgattacgtttggtgccagatcatgtaaatgtcttattataaccagggatggagggagaaaatatatgagggtcaaatgaaagtgcaaacaacaacaaaaataataatttgagggggccattagataagtttttaataaaaaaaattataaaattataacgatttttttttaatatatatatctacatataattgaagaatatattattaacaagtcttttgtgattttttttttttttatgaataaatctttatattatatataattatatttggacagcacatacctccgtcggtgattatatcatcatctctattatctatcatcaccaaagtccaatcaataatgtaataataataataaagaaagctgagaccaataatggaatccattaaagctaaattttgtcatcaataacattttgttttcccataattttctattctcaatcacttgttaaaaatgagtatctttagaacactcccactatttttttttactttattatttaaaatactttattaaaactctataatttttttttcgatgaatcagaaaatttgtattgctcacaataaacttttacaaacaatagcacccaaaacagggcctaaataataaaatctgtacattgtttctatttcttgatcctctctttaacacactacattttttgttctttttttttacaagctgtggaaccatactgtatcatcagcagagactttttttggccatattgcattaattctatagatcacatcttgtttcacccctgttataaccttctctgcatccggctttgtgctttcccacacagacaggttgcgtgctctccaaactgtatataccagacaactgatggcagcagctaatacattcctcttgaatttgctgagttttgatcttcctatccacctggttaatgcactcaacgaacctgctgctatgttccaagacagccgggtttttattccttgtaaacatgttacagcaaacctgcaagtaaaaaataggtgttctgcattctcacagtgattatcacagagttcacattgttctcctattgccattcccgtagctttcaacctgtcctttgttctaagccttttttgtattgccaaccacataataaaatagtgtttaggagtgtttagcctcccccatacctgctgagcccaagagactttgttttgggttggacaaagtaccttgtagccttcctcaatctgatattgttgagtaaatagttgctgtccagctgcttctttaaagtgatctttcaaattgaccagacttctccaataccaactactatgatttgaagctttgtaactccaccaatctctatccttgatatagacactatgtatccacctcatccataggctatcttgtttttgagcaactgcccagatatacttccccattgcagctcggttccattcttgtatttttctaaatccaatgccaccaacactttttgattgacacactgcttcccatgctactaaaccagggcctgttgattgagattggcctttccataggaatgccctacaaattgattcaagttgcctcaccaccttcttgggcaaaatcattacttggcaccaatatgtatgaatagccatcaacacagagttaattagaaccacccttgctgcaaaggataggtttcttgaactccatgttcttattcttgcagtcattttttctgccaatgcaatgcactcattcccagatatccttttagaacatattggcaaccccaaatatgtaaaaggcatatcctttagagtaaaaccagaagccctttgtattctgttcacctcctcctgaggcatattgctacaatacattgttgatttctggagactgggttgcaaaccagatgtcatagtgaaaagcttcaatccctgcaacatgcaatagatacttttgaattcccctttgcaaaataacaaaacatcatctgcaaaggccaggtgatttagtttcatgggagagcatctttcatgaaacttgaaatccttcttgccccccactttcttgaggattctggtaaaatattccattccaatgacaaagagcagtggagagattgggtctccttgtcttagaccctgttttgattcaaagaatccatgagtacacccattgaacatgatagaaaatctcggtattctgacacaattcattacagtctgaataaactgagagggaaagtgtaatcctgcaagcatctcctcaatgaagtcccactcaatggtatcatatgctttctagagatcaagcttgatcatgcaattagccttgtttgtcttccttccatagtgtctcactaaatcctggcagatcataatgttatgtccaatgaatcttccctgaatgaagcccccttgtgattgtgaaaccaattcagggaggatgcatttgattctagagcacaatagcttagttgcaatcttgtaaatgacattgcaacaggcaattagcctaaaatccttgacggtgtttggacatttcatctttggtaccattatgagaactgtcgtattaatctcttttagtattctgccagagctgaggaaagaggtaactgctttgaatacatcctcacctaccaaatcccaattatcctgaaaaaagaagctggagaaaccatctagcccaggaactttgtttctaggaatttcgaataccactttcttaacatcttctttagtgaaaggcctattgagcatttctacttgttcagtagtgaccaaaggccctctctgcagtatctgttgtgagactttctttctatctgtcaaactcgatccaagaagcgatttgtaataagagatgaaagcagttgtgacctgttctggttcaaatactcgaattccatctttattctcgattgagtacacctggttttgtttgttcctatgtttgatgctcgtgtgaaacaaggaagtattgctgtccccgtctctaatccagctgattttcgctttttgctgcaggaaagagttgtagtgttgctgagccgttacaaatgtcgtcctagcagcaagctcctgttcatgtagtgttgtgttcagggggtcctcttgcagctttgattggacttcatccaatgttttcttggtttgtatcgatgtggcatgtaaatcagagaaacccaactgattaatctctcttagaaccggtttcagtgcctttagtttagacactacctgatacattagcgtaccatgaatcactttcctccatgtcatttcaacccgcttgtcatactcaggatgagatttccacattctgaagtacttaaacggctttttgccacaattccatttgggatatagtgataagatacatggtgtatgatcaaaagttccttcgttgagaaataacgcttttgcactaggatagttatcacaccattgttggttggctagaactctgtcaatctttgaatatattctatcatgaccctgctgcttatttgtccatgtgtaaaaactgccagtagactttacatccttaagctggcaatgttgtaggctgcctatgaattccatttcagcttggtatttcactcgatgccccactctttcttccttggttgtaattgcattaaaatcacccatgactatccaattttcttttgttttaagaccattcagatctctccataattccaatctcccctgcctatcgttaaacccatatactactgtcaataaactgctgtatgttccgtctattgttgacattctcaagtgcattagctgacttgtgcacttgataatatcaacaataaagcggatcaggttccatgctataacaattctcccacctttgtgccatgctatattcgaggagaaacaccatccattgaaaacatttaggtacaaggctcccagtttgtgagcctttaccctagtcttgagaagcccaacaaaaccagccccctgtactcgaataaactgtctaatagcttgttgtttttgttgtttgttggctccccgaatgttccatacaatgaatttatccattaccaagagagggatctcccccctcttgtgttatccactccttctgcttcttgctcctgaattcccagctggtctttctcggctagaatctgaaaaacattggtgagctttgtcccattgtcttctcccttcttttctacaatttttttacccttagaaaccatttgaaaaccctcatcatccacgggtggtatctccttccttctatcttctttaaccacccactcttgcttagcactctttttcttgttacattcatctgttaaatgccccatcccagaacaatgcttgcaaataaccggtttccattcatacttgacacctacatgaacattgctgccaaattcatcttcgaaatccagtaggctaggaaattcttgattcattaacacttccaccataactcgagggaaattcagtcgttctctttccttagtgactgcatcaaccattataggcttgccaattcgaccaacaattttgaaaagtgatcattccccagtatttgagttcaaggtcttcgagttgtatccagataggcacagtcttgacatcctcctttctgaagtttgtatttggatcccatggcttcatgatgactggtcttctattaaagaagatgtagccagcattaagcacctggtccctgaatgttatcgagtgaaatctgatgataaaaactccataagtaagcatcttgactttgtctatctcatctttccacaatctattaacaaatccttcaagaactggcaatggaggatttgaccctaacacatagcatacaatggatggggtccaaaaattaacttcctcctcaatatcatctaatgttatcttaactttgctagactctccattccccttaaaatccgactgctgcaaagatttttctaaattgcgaattattgaatcagatcgaagaacagggggttcgagtgtttaccttgaagcaattcactgttacattgctggtttgcctgtataaagtgcaacatatccattcgagcgtcttccatgcgcctaatttccttcggagatgattgaggagacagtggagccggatacacatcacggagatgcgaatcaccattccttctccttaccgatccattgaggacatcatcctcttagtaatccctatttcttcttcaatcgccttcgaaatactgtcatcaatcacagtttcagagtccttccttgctttccttgccgaaacctttgctttccccttcgtctttgacctagtttttgccatagctccagcttcaagctgctagagcaaaaacggagagaaaatttttatttactatattattatcacattatgaatacgaaaaattaattctataattatttatgcatcaatatctttatatttttatatcatttaaataatatatttatattttatatttggactatttcactaaagcaagattatttataaatttaacagattaatgctctgtatatcagcacaattcgcgaaggttccaaaattaattttttttttttcgaaaattatcgctaaaaaaattaaacaattgtttaaaaccgtaaaaaaaatatagatatttccagtaatttaaaacactagttaacaaaataggcgacaggtttaacataatccatcagctatactatatacacgacaattttaaaccgtcaagtatgagaccaataaaaaattcatttacctccaccaattccccctagacctaattagctagtagcctaagacatttgccgtttcaccaaatctcacgaaccatctagcaatgccccctctcattgtcaacccccacgaaccaagatcggcccctcgtcgtcgtcaaacccctacgaacccagatcaacccctacgaacccagacccccctctctctctctgtggctgtcttgatctccacctatctcctctatctccgtctccgtcgcctttcttcgtccgcactcaaggtatatatatatatttattaatatataactatttatttatttatatatatttattatctttttattaaatatatcgaatatatatttatttatatacatatttttttatagctgaatatatatatatatttaaatttaatgtgtttaatttaaaattaagtgttaatgtataaatttgatgtgtaaaaatttgatgttgttataaaagaattaatatgttttaaagatagttattattgtaaaaaaattaatgtgtaaaaaatatttagaaaaagattttaaaatagaaaagattttaatttaggtaaaagatttatttatttcatttgttattgtaaaaataaattattttttttagtttagtttaggtaaaataatattaattgttattagtataaatatataattgtattaatttaggtataaataaatattttagtatacgtttagaatagttagggaaaaaaagtattataagtttaattttaattaatttgatttaataatatttttaattgtgtattgtaaattttgagtaggtgtttatttatggtgatgccgtttgaaaaaatttgagacgctatattagacttggtaatctatatttaaatttttgtattcaatatatttaaaaatattagaaatattaaagtattttgcattgttagtttcaattatatttaggtattagtgtgatattattcgagtaagttttaaatttaatattttaaatattttatagtattggattcttcgtgttgattgaagaatgcacaagttgttatctttattagagaaagatataatcactaaaattttaaaattttttatttagtggagtttgaatatgttagatattcatttgtagtaggttctgtgattaattgtactgtggtcgaatgggtagaatatgcatgtgagatgagtttgaatatctaaaatattcatccgtagtgaagtnnnnnctgcgaatacatgtactgcggtcgaatgggtgaataatttttgcattgttaatgctattttgttatttttgtattgttttatgtgttttgtttattatttttacatgtttaaaatttttggaaacattcgattacaactgttatgctgccgaaattttgctagaattagaataaatttcactaaaatttatatatgtgtggtaattaatttaactaattatttactacacatatttaaataaataattgaatacagttttatttttatagaagtttcgaaatggataaaaattggatgagtgcaaatagattatcagcgaagtatagtcaatgtgttgaccatttcttataattttgtcagaagtaggccaaaaatcctaaattggttatttgtccttgtcttaaatgtggtaacatggagcgtatggacattattaagataaaaaaaacatttttttaggtacataatagacaagagttataagatttgggttcaccatggggaaaagaaaagagttttgggtgagggaacatcttaagtctaacaagtttaagggtgttaatttggattatgatgatcacattctagaaatgataggagacgtacaattcaaattaaatgtcgatccattaaagtttcaaagttttgtagaggatgccaaggagcatatttaccctaattgtaataggtaattatcaacacttattaaattatatatacaatataaaacccaaacacgggtagagtgataagagttttacgaatttactagctttcctagtagagttattaccataaggtaatgtgatgccttcgtctttctacgaggcaaagaagacactttcttccttaggcatgcaatataagaaaatacatgcatgtcctaacgattgcatcctataccgtaagatgtttgtggatgcaatattatttccaatgaaagaacaatatattactggatattaatggactgaatagagtatatgaatttctaaatccgagtgcgattgccaccgaactaggggttgacagtccccgttgtcaagcactattcactcgtatgactaggataccaatccacataaatggattattgcccctataataatgggtatgtagatttaaaatcaataatttcatactttataactcttcataatatgtattaataattttacacatatttgtttgtgcagagatatgttttactagatgtttatactcatctaactaagtatgcagatggtggaatacttggatttgagcaatggcgacctactagatgatttaaaattcatcatttccaagtaagttctccaatatgcaagcatagtttatatttataaattttatatgctaattttacttttgtgtgtagattgttcacaatttataatcaaatgacaagacaacccgatagacctactgagtggataactcttatatgtcttgaaaatttgacaacaaacaatgtgaatactacgttatgaaattcattaaagaattatgaccgtagaagatccaatacacgtgttgacacaatcagcaaaaaaaaagtattattctttattaaatagcatattaagtcttaattactaattaatatatacatttattttacaggataagttctccactacgtatacaaatgactagacaaatgttatgcgtgatcagtggattctttatgtgaaagcagaagcggagagacaacgattgccctattgttgagtgtgtatatatatctcaatttattgttactgtataaatttgtaaatatatttagatgattattagcgttagttttaattattgttactatagatttttaaataactttagttaatattagcgttagtttaatttttgttactatacatttttaaatatatttagatgatattaattagctttagtttaattattgtaactatatagatttgtaaaaaatttaaaaattaatgcaagagaaaaatagcagaaaattaacatttttcccttatttttttaatataacaattgaaaaaaaccgtcgctaaaaaaaatattgttaaacttaaaaattgtaatcttaaaaccatagcttatagtgtaggacacgattttaaactatcgcctatatctattctatataaagtgtacctatataaccgaattcttggtttatgagaaattcgtgggagactttttatttatattaaaaataaaataatttattatta

SEQ ID NO: 19333 - DNA, 3644 bp, Cannabis sativa
gatgtggatgtaactttgctttcacataatataagtcactttcactgttatattaaacttccaaattttactgctttcacttttactgctttttatggtgcgccatctcaccaaaataaaccgcactcatggcaattacttcaacgtcttgcaaataactctcgtttatcccattggcttatcatgggggtgacatttctcgtactccctcagctcatttccaaacttttgttgacgattacgagcttcaccctatttcccctttgggtagtccattcacttggaccaaccgtcaaaagcaaccatcccacacacaagagagacttgactggtgcctttccaatgccgcttgggacgcaactttccccactcctcgtcttcttcacggtaatttttttggttctgatcatccgcctttactcctaaccatccattactagcctgaccaagctaatccaactcttagattcatttttgataagccttggatgtccgaaccgggttttgaggattgtcttcgtgatgcttggactttaaacaaacagacttctcatcataacccattgctctggttcaatgagaaattccataattgctcttcccgtcttaaacactggaagcaatctttgggacctcctcttgccgctcatattcgtgagcttcaatctcaactcaagagcgttcagtcttctcctcagcccacaaatgaacaataggattggggaagacaacttaagagtgaattaaaccgccttttacataaagaggaagagtattggcagcaacgatcccagattacttggctcaagctgggcgataaaaacactcgctacttttatcgtattgctcctatgcgacgtcaaaccaataaaattcattctcttcagtgctcggatggttccatggcaagtgacactaattccattttgtcaatcgttgaaaattattttgcctaactttttcaaactcaattacctgaagacgacatcattgactctgttttaacgggtatcacagagcgccttaatgaggaagaagttggagtcctccaggcaaatttttctgccaatgaaattacgcaagccgctttccaacttgcaaatgacaaagcaccagggttagatggctacaatggttccttttttaagaaaaaattggcatttggtgggtaaggatgtcattagtgctgcccaaagctttttgaatggagatgctggtatctctgcggtaaacaacacactcctagttcttatccctaaaaaacaaaatcctgagcagatcaccgactatcgccctattagtctttgtaccactttttataagatcatttctcgagttctggtaaaccgtctcaaacccatcctcagtcgcatcatctctcccactcaaagtgctttcctcccaaaacgcttaatttctgataacatcatcattggtcaagaggtaatgcactccctctcccaccgcaagacaggacgcctgggatggatggctctcaagcttgatatggccaaggctttcaatcgtgtggaatgggttttcattcaacgagtaatggagaaatttgcttttcctcaacggttcattaaccttatcatggcttgtgtctctactgcaactttctctttctccattaatcaacaagttcttggccatgttaagccttccataggaattctccaaggggatcccctctccccgtatttatttctcctgtgttctgaaggtctttcctctctaatttgcctcaaagctcaacagccccaaccacgtaaacactctcttggaataaaaattgccaggaacgcttccactatttctcacctcttctttgctgatgacagcctccttttagttttgcttcctctgctgctgcggctatcatcaagcaaatcttaaatgactatagcttggcttctggtcaattggtaaactttaccaagtcggccatgttcttttcaccaaacatcagctctgaaatcaaaaccgacatcaccaacatccttggcatacctattagagatacttttgacaagtatttgggccttcctcaaacatttggaagaaaaaaaaaaggatgccttcaattacattaaagatcgggtttggtttcatataaacaaatggaactcctaacttttttccaaagggggtaaagaagtccttttgaaatcagttgtccaagctataccctcctatgccatggcttgtttcaaactccctgcctcttttcacactaaactcgaatctatgatggctcatttttggtggggaggattggagcaaaatcgtaaaatccactggaaaagctggtcttctctttgtttctcaaaattccatgggggtcttggttttcgctctatgaaagctttcaatcaggcgatgttggctaaacaggcttggcggcttcttcagtctcctcactcactcgttgccaccttactcaaatcccgttactttcccaacactaattttcttgattcgggaaagggccatagaccttcacttgtatggaacggtatctcttagggtaaagaacttctccagtcaggtattcgcaggtcagttggtgatggtaccacaatctccatcttcaatgatgcctgggttccagggtatgataaacttcattaccttcgataccaatcagatgctaatttgacagtggcaaaccttttaacgcctactaaggaatggaacctcacccttctccaatctacctttcccacggatatttgtcaagccatcctaaccattcctcttgtcaacatcatcacacctgatacatattattggtcccttaccccacatggcacctacacagtcaattcaggttatcatcaagcccatagtcaactccaccaaaatgatccaacaccttcggataatactgtctctcaaacttggtggaaacagatgttgtcactccctttagctcccaaatttaaggactttctttggcgagctagccatgataatctacccaccagccacaaccttttcaaatagaaagccttaccttcaccatgttgttgctggtgtttttatcatgatgagaccctagagcatgctcttttcaggtgcccaactgtccaggaggtatggattttaactattttccatgattttattgatagaaatagttttctcacttgtatggatttactttaccttgctgccactacatttattgctagagactatcactactttttgtgtttgctgtggaagctttggcaatgcatgaacaattggttacacgctggtttgcatacatctccttcccaggtgctgcattgggtaacagattacatagatcggtatcaaagctgcaacaccaattgtttttatactagtcaaacaccttgtgtctctttgttgtccacagagaatgaaccacacatccccagctacagcctcctgatttctgtagatgcagctcaagatataaggcaaaataagatgggctttggtatggttgttcagacatgtcaaggggagatactcttaactttggcaacaccttggagcggactacatcaacctatgataatggaatcacacgccttgtactatgctctttcttggtgttctaatcactccatttatccagatggcatagtttcggattgtaaggttttagt

SEQ ID NO: 19334 - DNA, 2924 bp, Cannabis sativa
  modified_base (2851)..(2854): a, c, t, g, unknown or other
tatcatttgtaattgggtttctaacacattcaatatacattttctattgttttgctactgttctattcctacttttgctactgttttattgtgttcttgagtgtggagttatcgggtcttatcagtagcacactaacataatgtattttgatcatataataataaatttgaatatttaaattaatgtgttattattaaattaaatttatataacattaaatttttttattatgataaaaaattcgattgtaaaatttgatgcaatacaattaaaacattatttattttaaaaaataattataatattttgaaataaaattataattttaaaaataaatagatatatggcaacacttttataattagtgttgttatatatttttattaagttacaacatatggtaacacttttataattgttgccttatacctacatttttagtaacactctaggagacaacacgtttataagtgttgccttctaattttctttagttaaaaaaaagtgttactaaatgtaatttttctttagttttcgattgaattatctcctacacttccaattcagcttcatcaattccagcttttcactatgtaaaatgaacaagttacaaccttaaataataaaaaggcaataacttttaaattgctgttttgtaaattattttattgagaaggattttaagattatagaaaacattactgaaaatatggactttgaataagaattacaaaacatagagaagcataatcataaatatagtttttttttttttttttgtttttaatgattacaaattaatttgtatgtgaactttacaatgtgttaataatatctacatataaagctgaccacattttaccataaaataatgtaaacagtacatgtactttgttaaatgttagttagttagttacttatcagttataacagttaggtagcttccctaactaactcttcttgttgtactgtatataaagggctgtattcttaattccaaatcaatgaaatctttctttcacttttacacattcaacatggtatcagagctaaaattttcgcttccgccattatagtttttgtttctcaactctgtctttttcgttcacagactctgtttttcttctacatctattttctttttctcctttcatggcctcttcaacctttacaccagttgttttctctcacaaagtttctgtcaagcttgatgacagtaactttctcctatggcgaccacaacttctttcggcaattcgaggtcatcgacttcaacaatttatctctgacactcatcaacctccaagaaagtatctcactcaagaagatgaagttctacagcagatcaatccgttatttcttgactgggaagttcaagatcagttgttatactcatggttgttgtcttcaatgtcagatggtgtccttactcgaattgttggtgctgaaacttctgcccaaaatctggaaaattctagaggtatatttcgttactcaaacctcagccaaaatagatctttatactactcaacttcagaattgcaagaaaggatctctttcaattaatgaatacttgcttcgaattaaaactcttgttgatcggcttggatctgttggtcacaaaatctccaccaaagatcatgtttctgtaatctttaaaggattaccctctacatatgatacttttgttatttctgtcaactctagaaatgatgcttattctgtagccgaaattgaaaccttgcttttgtctcaagaacaccgaattgatgcccacaataaagaacttgattctgtcaatcttgcttctaaccgtggttttagacataaaccacaaagttcacccaacttttctccccatactgataccagaaattcacatgaccaaaccagcaataacaagaacttttggaacctgaatgctgtccccaacaggtctagttcagcacctttttctcagcaacctcaaggccaaggtcgtggtcaaccccctgccaatccctccttatctcagtcctcttcgactgctacaaaacctgtttgccaaatttgttcacgaactggtcatactgctgcaagatgttatcagaggttcaattatgagtttcctggtgtaggagctgcaaacatccctaaatactcagccaacattgccactgctgacagtgttaatgatgaatcttggtaccccgattcaggagctactgcttactgcacggctaatgctgcaaactttacacagaagcaaccttattttggtcctgatcaagtgcatatgggtgatggtgctggctttcccattcaaaatattggtaacacctttctacacactacaaactccaataaacttttatttttaaatagaatgttacatgtgcctcatatacaaaagaatctaatctctgtttctcaatttgctgctgataataatagtttctttgaatttcaccctaaaaaatgttttgttaaagaccaggtttcgaatgagacaatcctggaaggtcatcttaaacatggactctatgtcatagatcctacacaatttcatctgtcatcctccaagagatcacacaattctcattctttgaataatgttcaatcttgtaatcacaatattaatgtctctgcttcatgtaattccttttctttgtggcataaaaagcttacatatccatttgttaagattgtatctgccataatggccaagtgtaacattcccaattgaaataaagatgctactgacttttgtgatgcttgttgtaaagggaaaattcacaaatttccttttcccacatctcaaaccattttcactcaacctttacaacttatactgttgggttttatgccctnnnnaaaactctatttcaatgtaatccggattattcagtatcaataaagaaaaagaagtattttttcattcatt

SEQ ID NO: 19335 - DNA, 4760 bp, Cannabis sativa
  modified_base (324)..(326): a, c, t, g, unknown or other
ggtgtttagcctcgagtttggtgtatatatgcatatatagccagccaatattagtatatttatgtttagtgttattattgaagaaaagtggatatatatggtttcaaatttcagagtgcctaccttacccatttcaagtatatatttatatatatagagagaaatgctaaaggacaccactggtgcctagcacccttctacgtgttaatatcgctattggtgcaattaggtatcgggtcttatataatttaatataataatttttatagagtagtatcgctagccaattgcaagtcgacacatttagaaggtgctaggcaccannngtgcccaatagcaatgctcatatatatatatatccattccattgtactactatatataatataacacatacatatttaattagtacgaacaccaatttgttggaaatcaaaatcaatcatatgtaaaggactgagtcaatccttactctccgaggcctaacaagcataactatttgaatatataaaatatatagatgagctttaatttggtatgcatttatttatggccgacctcgtactataagattagaatcatcacaatgtggccaacctaatatagaatattacaatgcgttaggtatgctattctcttaatttgttggtaaattttttcctacaacttttgagattgtaaaggttcttctttttgggtgcaattgatccattatggtaagtcaaaatttgtttctttatttgatatatatataagttttgaaaagattaaatgttattaggaagagcatgtatgtattaaattatttaaaaatatttataacctaaccatacaaattttccaaaacattaacacaaatttcttatggcaaacacacgcagtactttagtgactgacatcataagaacagtaacaatatatataacagcgacaattctaataattataaaaaattaaaaaatcttacaattaagttgataagaacaaataacatcatcaatcaatttgtatacagcaccttccactctctctctctctcaaatttatacaaaaatataactgtaaaggattgaaaagtttattaattctattttctttttttggattgaaattaatgaaaagtttaattctaacgaaaggagaatatgtgcgctaacactttttttgtactatacataggccatcaaaatctggacacttacgtaagtatgagttttattattattattatttatttttttaacatgtatactctttcttttattcctattttttttatggttggtgatcaagaatgttactaaaataacttttttttttacgaaagaagtcacattttatatcaatttggtgagacgagatctaagtaaataatatatagactagaccccagcaaattaaatcagtatatacatatatataatcataatgaaatgaccaccatatctattaaatctagcaactacttattcactttcaccacaccacattagtatagaaagtatccccaaaaaaattagtgatttatatgtaataaaattatttattgatttaagtctttgctgattttccttgtatttgctcatatacgtaaataattatgagttgatggattcttaattttgctcatatatataaataattatggtatgggttttgattccccttcttatacgtacggattctagtactatatatataatggaagacatataaattaggaaggaaaaatgattttttttccttctttttttctcgtaatctacatatataaatttatacatatatttctttcagttatatatattacaagtgaaaaaattgaagtagccgcaattaaatcaaaagaaaaagaaataacagttgaagttgtagctcaaacactaactacttctgttacttgttggagagtgtatttaaatacataattgtccctaattttcgagttatccaataacagatttttgatttaataaaatttttcattcaaaaaaatatatcagaataaatggtcccactaatattttatggtcaaaataaagaagaatccaaatcagtgtcaataaggaaaataacaataattaatgtataggattatattgtattacattaataattaaggaagtaaaccaaaatttattatggatggtccactctagatagctaactctttttgcagctgttattgctggcatacaagaaggccttttttatgtgtgaaagacttatcaatccataccaagaaaaataatcccaattactagatcctcacatactttaattatatatatatattaaaaagattaataatatttttataattgtgagacttttctctcatatatatttatttattttactttaatttgttccatgtgggtaggttttgcattggattaaacccatgatattgatctaaaagatgagacaagatccattgtcgttttaagccacatatatatatggctcaaaactagctggaaatccaagaactttatacatgatcagtcttttgaatcaaagctaaataattaacttcatagttcagttattataattaatttatgttatgatttacacagattcctatagtataatcaataattaaggcttcttttttattaagaaatgtgtctaaaacttaaaaaatttgaacgatgagttagtgggggcaaagaaagccgatataactcttatgacgcaatcacctacatcactcttaacttaattatgctttatatatatatatatatatatataaaataattgatttggtattattatatggtgaagcttaactttttttttcacaacattaaatatttatagcaaaataagaccaccccaaactttaataggtccatatatatatatgtattttattcttgtcgaactcactagttttgaattatatttagaaagaaatgaaagtctagatcagggaataatatcaatatgtatggtataacagtatatatatataaaacaaccaaaaggagcatttaatgaagataatctgatcattgagaagtgcatcactactcgtaacaaaaaataaaggttcaaaatgaaatggttgagcaaccaaaccctaaaaaacttgagatgagaattcaaattaagctatatatagtaaaatagtattcccaaagtggccaaaagtctactactgatccaaaaagctaataacatatctttctcctctattattattattcactctaaaactcaactttatgataaccacaacacatggtccacaactttcttccacaaatagcatttatatcctcattaatcaaaacctatatagatgtaggtccacagctaaatatatactctaaaaagatagtaactacatcacataaaacaagtatagtacatatagtaactaagatctctaattaagaagtggagaatgacgtgtgccgcgtggcaatcttttgaagcatataataaaatcagtatttttgtgtttgttggcgcatgaaatagctgcccaagtggaaagaagaggggaaaaaatgctcaccattaatataatatttcatgacaatgcttaattataactttaaattacaattttttcttttaatttttaaacctgaaaatacatgctcgaatatatatgtttttttaatttgttttaatatgaatggttgttataattaaaatattattttttaaaaattttaaataatttatcatatctaaaataaatttaaattttttaaaaacttatggtaaattggaatatcagatgtgttgttgatacagtaaattattatgaaaaaacatcgtacatagtaaacactactaataaatcatgttacctacaacagtagacaagtacatggcatcttgacacgtattaggtctctcttttagttttattattattttatttatctatttaatttttatatctttggcctattagatttgctatccacgtccgttcttttaacacaaaataatagtgtacaatattatattgtaaagtgggggatttgtattgtatgtgcatgttgtagtggattacatttacatttttttcatagagtcaaaatttatgtactgtatgccctttaacgttagttatagtctagcatacaaattaagtaatttatttttattttcaagatcatcaatatatataacattgtattgaaataatataatttgtttttgtctacaaagttcatttgagtcaaataatatattatttttttggttgctctctttaaattattgggaaatctcgctttggatccttaacacttttttgtttgtatttttttccttaaactttgaaaattaattattctttggtagacaatggatacatcattttatcgaataaatgtattctcaaactaaaaaagtatatatatatatatatatatctatatatataatgaataatgaaaatatatacatagataatacatgtttataagtaatagtacactactacaaaaatgagttttcatgacgttattaaatagttgtttaaagtatttctgtcggtttctataaccgtcgcctatacgactatcgtaaaatggggtagaataggcggtggttataggcgacggttttaaacagtcgggaatgtgaaaaaaataaaataaaaaaaaagaataactaatcaaattaaaataaaacaactaattaattttgttacaataacaactaattttaaaatacattaaatttatacaataacaaaataaatgtatataataaataaaaaagta

SEQ ID NO: 19336 - DNA, 3682 bp, Cannabis sativa
tttaatgtacacggttttttttttcttttttttttttttaagtccaattttaaaattttgaacgaggtcccaaaatgcttagaccggccctgtgtaacgacctgaatcgtctatcctgaacaacattctatgtaacgaccgtttggtctaatttgctatttataaacgtttttactttaaaaaaaaaaaatcggagcctcctacagtcctgctaaagtgaaagagaagtagaggccaccgcaccgcaccgactgatgatcaagtcagaatagtatagtaccaaggttcttggaacgaggattttctacttcgttaatcaaatgttgagtacgagagatatgatattaatatgagacctcacttcataatcatatgattcacaacaaccaccatcatattgcttctctctcacgaaaatgcaaaaccttaaaccagctcaagcagatccatgcccatcttctcaaatcgtcttccccggaaaacccttttgcccttgcctctgtgctttctgctgccgctacctccggccacgcttctttcttttcctacgctcgttcaatcttcgaccatcttcgccatcgaagaaacgtctttatgtacaactctatgatcagagggttcgttggaatgcgtgcgccgctggattctgttttatgctatttggacatgttggctcatgggcttgctgctaatcactatacatttccgccattgatgaaagcttgtacgattctcgtagccccgggttcgaagctagttattggtcgtttggttcatgcccatgttgttaaatttggttttcgtgaggatccttttgtgaatagcgctcttattgagttttactcttcggtttatgaaatggaacttgctcggtttttgttcgacaaatgtcctaagaaagatgtcgttttgtggacgacgatgattgatggatatgggagaatgggtgacgttaagaaagcgcgtgagttgtttgatgaaatgcctgagagaaatgctgtatcttggagtgccataatggctgcttattctcgtttgaataacttcaaagaggtcctctgtttatttgggaaaatgcaagaagcagctattaggcctaatgaatctgttcttgttacagttcttactgcttctgctcgtcttggtgctgtaacacaaggactatggatccactcctatgccaagaggaacaagctcagctcgaatcggatcctggccacagctttggttgatttgtattcaaaatgtggcttactagagtcagctttagcagtttttgagggaatttccagtaaggatgcagaagcttggaatgctatgattactggcctctccttaaatgggaatgcaaggaagtcacttgatttttttgaaaaaatgactgtagatgggattcaaccaacagagaccacattcattgctgttcttactgcatgtacacatgcacaaatggttaatgagggccttaaattgttcaacgaaatgagcaccatttacggggtaaagcctcagggggagcactatgcatgtgttgttgaccttctggctagagcaggaatggtagaagaagctgaaaagttcttagaagagaagatggggggactggctgggtgggatgcaaatgtttggggagctttaattggtgcttgcagagtttatgggaaggttgaagttggcaaccgtatttggaaaaagctagctgatatgggaatttctgattatggtactcatgtactttcttataatatgtatagagaagctggttgggatatgcaggcaaagagagtcagaaaagtgatttcaaaagctggaatgttgaagaaaccaggatgcagtgtgatagaggtaaatggtgtggttgaagagttccttgctggtgatcaatgccatccccaagcacatgaagtatttaagttacttgattcttttttcaaaataatttatttggaggatgtaatgtcacgcgatttttccttggataatttatagtcacaaagtacaattgtttgctcagcaagcgttttgggttgatactgcacaaaatatttgcataaacagcattttgtgccaatttttctgtagccaataggaagtataaacttgacttataagcacagttgttatgggataaaatatgatatctatttcattcattgaatgaaataaactgaaacaaggaaccaaacgctccatgagggagaaccaacaaaatcacttctactcgaaactccatgatgacttagtatgcacaagtaaaaagaaaatccttttaaatcttcaagctttatacctttgtaatctattgtccagtttgagcttaatccctcacaaatttgtttttggacaccttcccaaaaacttcattccagcgttgtacacccaacaaccttaagccaaccatttctaattttccaaaaacatcaatagaacgtctataattcaaaaagtaacttcctaatataccccaatgctatatataagctcaaagcttagcccgaaatgcaatggcatcaccagtggggctgctgaagtaacaaagtagaacgcaatggtaagcagatgaagcatgatcttttcacttatagtaattatgtgaacaaaaaattattcattttacaatttcagcttcaagctacaagaagaatattgtatcctataaaaacttggtaatatttttcttactcactaaatccctatggcttgctatatgtgtagccagggctcatccattattagttgtacgatggcaatgtcctgccctggttactaggtataagtatgatgctctcaagtttcaggagcactgtttcgcatgaaaatcctctgcttttatcaaaccagtgatgagatgtttgagtcttcgagcgccaggacctggcttgagttttgtggtatttgctatgatgtagtctaggacactcacattcgtatttcctttcaaccatccaccaggtacatacccatcagcattgcaacctaaaagctcattatcaattttgtctagaactgtttcgttcctgccaaacttcctcgcaaagggggcgttgctagctaccatcttctgaaagtcattggtagttaggaaatgagggtgttgcttaggtggagtgtcccacgatatgaagtggaggtcatggtttacagtcgtgttccgaaactcctctgcattacagatgactgtgtggaaataaccttcaggtgaagaaagaaagttggcataatacataagaactattcttggaaggttgtcccacccccacacgcaaaaatcaataaaagggcgagagagcatcatccaagcagaacctgaacaaatcatcaagcatgattcaataaacaagaagtatatgaactagcttatttaaagttcatcgaaattcatttccttggcctaatttagagttggaatactgagcagatgggtcaattctgactagtaacaaacttcagagtcaactaaaatcttctggttatgcaatgtatcaaagtatttaccagtaaggcagtacaagaaataacatgcggcaaatttaaatgcttctgtaaaaggcattgcaagatacaaaaatgtaaaattacaagcaattgatatgatcaaagctgaattatattttgtatagaatataggaaaacaccatctttaaaccaaaaataaaatgtgtgttccactatgttatgcttt

SEQ ID NO: 19337 - DNA, 3870 bp, Cannabis sativa
tcccaacatgaactacccatgaaattcgacctttattgggctgcgggacaggacgaacaactgctcttccatccatacgaagacccaagtgatcaggacaagcaaccttagaagacagcacccattcctataaaccacacccaaaaagatatacaagtaagttgactaatacaagctaacccgaagttcaaaaataaatgttgcaaacaataaaattttgagatgctacaaactacaataacacatacctcaagcttattagcctcatcagaagcatcttggatatccacatatcgcaccttcactttatctttgtgtttcttaataatagaggctctaaaccaacatcccctgataccactatcttgggagagcacttcaacctcagaacctacttcatacaactgtgaagagttatccttagttactttcgtagacaacgttgaaaaatattttcctccatccatatcacatgtttcatttccacagttgaaatcaatcccacttttaactaaattacgtggctccaaatatacagcaccagtcatctctcttctctcagtgcattgcctctttttaggccttacaccaatagcaggagcgttttcttccaaaagagaatcattagattgttgagaaatatcatagtcctttaaagaaacagaatacatgtatctgagtatatcctgtttccaataacctctaacttgagttatgtcaaaaggcgtaacatcatcatcttcaaattgtttgcggcagacaaatggttccaattgtgtgtgtcttgcctcattctgaaacttctcgtaatgaagggggctgagaacagtagctaatccatctatgcactcaatatttagatcttgaagacagagagaaaagaaaatttccctgtcattataattttggggcaaaacaataccaacctcatcaattttgtgataccaacgtaccacaacaatcttgctgcctctagattcttcatacatatcttccaagtaagcaacaagacgtttatcctcttccgccaaaacataaacaaagtcatgaacctgaagagattgaagggacagcagaatattaacacagtggactaaatattaacatacaaaaaaatatctaaaactaagaaacttcactcacggatattctaacaccattacactgaaaagactgataatgcttccgcttttttctgcttgacaatggtgaacccaaccattgaaaatcattagcacaatggcccaccttccgtaattgcatctcctgtggaacatcccctactattgaaaatttacaaaaaagaaaaagtaaaatcataattaaagactgtaatataagagtagataaacagcacaatcataccttacaagattcaacatccaacttgcatgcatttctacagtccaaagtacccacgtctagatgagaagatttgttggttgaggaatctgaacagtgcataaaatttattagaaaaatacattgcgtacagatttagtaataccaaaaggaatgacttcgtaacaagaaaaagcttatcatatattcaaatttatatatttgaccagataacaggataaccaatataagtaagacaaaattatacaatataagcttgcaaaacaagataaaacatatgtatccagatagcaaggatttctttcaacaaagatcattaacaaaaaaaaacacaataagttggccatgaaggatcttgacctagaaaatttgagggcataaggattccgatgctctcaaccggctctttacaatttaataaacaatcctgcagcccaaagcatagtcagttaacagaaacaggatcactagaaatccataggtcaagtgagaaattgcagagactgacacgaggataaagagaagaaaccgaactaggctatgatcccagaaagaattctcgtctaaagtaaaagcaaaaactgttgaaggagtggggaaatagacacatgattaaaatcatgcgacgtttatgttctcaaatctatcaatgggattcccaggggaaattaagatagaagctaataatattaaggaatttcaggaccaacagatctgaaagataaagaagaaagaataagaaaaacattgctcacagagtcaacgaaacccttcatcgaaataatgagggccaagagtcacctgggtggatttcgcaaccgatttaacggtgaaaatatatagacatggacgaaaagttatcgaactttaaaaagaggggaacagactaggccaacacacagaagagaagagaaaacaatatgcattcaaacgccagtataacaatacattagcctaaaccaaatcaaatctggaaatgaatttgccaactaaaaagccaaatcaaaacacccaaaaactagaccgaaaagccttcttatttcgagtttttacgattaaccgaatctgaaaaccacgaaacaaagcaaaacaaaacccaaaatgattggaaatccacgaaccaaattgaatgagaagttccctccacaaaactaaaaatcccaaacagaagatagaagaacaattgaatatgaagtctcctcccaaaatccaaaatctccactcagcgcaaaatgattgaaaacccacaaatcagaaaatagaagaaaattttgaataagaagtcccgtccccaaaaaaacaagaataccgaatcctggattggagaaaaccattacgaaaaaattaaaaatgaaaattgaaaaaggcgaaatttacctgcaacaacggaattaagccaatcaatgacctctcttcgagactttagtttggcaagaggggccacgaaaggcgaacgattcctcaaagcgtagtgatacgacatgtgcctcgagctcttctctttccctatcacagccagatcagaggtcccatcgcttcgcttcagataataatggacctccctcttccctttatcggtagaaacgaacacctcctgccaactcaggaacacaaacgaagtcgcggcatgcgccgccgctgctatcctctccatatccgatgtagaaaaggactccagcaaaaattctagaatttcaatttcaatagccaaaacctttgggctttgatttgtctattttttaaaaaaaaaaataaataaataaattggattaaaccctaaatcgaaggacagaggctaggctctgactctgagctctttatttttctttgtaatggcggactaaattttgagatataggagagagggttgaacggcaaatttgaaaatttattgtctataaaaaggaaggagggaggtggaactagggtttcgagatcggatattgtgaaacgatggacggctcagattggatccatgaggttacgcggacgaaacccgaaggaaatcacaaggattgtgacttttttttacccaaaatagccctggtggattgaagaaattacggaatcatatttctttttaaataaaaaaatataaaaggtatttatcgatcacatggggttaaaatgtaagaagggtcactttcccattttgtccaattgagttggaagggacaaacgacaagttgtgacccaaagtgggcggtggtgcccgcaattgccgatattcaaaagggagactcgctctttctgaatgacagctgtccatgaaagctatatgaggaacgaacttgatttaactttccatatttgtgaccgaagtaactaacttttaaattcattcacttataccctctcatatataactttcaatttttatatgaggataactcatgttagagaaaaactaattacaaatctcttagttacctttcacgtctgaaatcacatgctgaaatatttttttcaattttttttttcattgcagtatttgttatagttacagta

SEQ ID NO: 19338 - DNA, 3821 bp, Cannabis sativa
aaaaaaaaaaaaaactctaatttaaagtataaaaattaaaaaacccctaactaaccaaatttttatagatacactttatgaagataaacaatcatatataataatagcaatatatacatattaaagataaaagtcttattaatacgatgttattttaataactataaaaaaaagtgaataacattttgaacattttaatatggcatatactttccaatttcagtcccaaataattcatacagctatataaaagatatttcttgtattatcttctcattttttttcctcctcttattatgctcgaaaatcttcatgcataactcatttatgctgttatacacacatgcatattttatttatgatgcaaagatatatgtggatttttagatattagtagataagaataagaaatctcaaattggtatggggtatcaggtatgaaaagaaatcctgattactaggagtgggcaaaaaaaaaaaaataataaagaaaatgacttgtgagcaggaaaaaaagaaaaaaaaatcctcaacaaaaggctagaatcaatggatcaatgtttgatagctcatacattcccaattatatttgtcatctacattatataattgaaaaacttatggtttgtgattgatctattcatgccaagattatttatgtagtaaatgaagtaaatttcttggaaatttcaatgcagcaatcagaatattcacctatcaatcaatgctcaccatatctcatgattttcttttatgtatttattttaacaaatgtatgatcagaatcacattatatggtacaaagcacatgaagtaataatgaaactttttaattccttctctcatttatttttttgacaccacaccacaccacaccacacagcacaaacacatattttattttcttattaaaaaattatctttaattttggaattgtttttccaatggcatgtgaccaagttgataaataccattactatatatattctcatagtgtgaaagaaacaattaattgaggttcatatatatttattagtacctcatgatactcaatgtttctttataaggacaccaaagcaaagtgctgtcatccctatatggaatggtggttatttcataatgtttttctcgatgacagaatatatactttactattgttgattaataataattgatgattaataataataatgccaattgatcaatattcaaatagaatctctaagagtacatgtgcatgcatacaatattaatcttcaacaacaagaatcccaaaaagaaaaaacgggtaattattttgggataacatgtattaaggatgcttttactgacactatattctgtttttttttctctaattaattgtttttttatatatataaatttaaatatagatttatttaataattaatgtattttaatatacgggcatttaagacatgatctaaatgcaatattacatctcactaatatttacatttacatgactattctccaacaaagtaacaaagtatatttacatgtattttaatgtatttaatatttacgggcatttcattttttttcacacttgagtatatatatattttagagagaaatacatgaaaattatttataataacaaagtatatcagtaaaaatattctccaactaaaagcaagatttatccaattttacaacatagtcaaaccgtgacatataggttgtacgctatagaaaattaaaaatatccacaattaaatcttcaaaagaaacaattaaaaaaaaaagcatttaaaggtccaaaaccatcctagtgtttgtcttaactatgcaattggaagcaacaaaaactataatttaaattatgaaaaataattttgcctctatctcatgtgatgcaaagttaccaacatatattagtaggttttgaaagagcgacaacaactctccattagcttcccaaactatagtaccaacgccaataatgttcgtgggagcatccaaagcaacatccacattcaatttcaagtttcctataataggtggttgctacgacgcttgaacttgagtaggcagtgaaagccttggagtgacactcatgcacgttattttttgaacacttgaaagttaaaagttaaaagcagatcataatatctattaataatttttatttaatgatataggtattgtcttttaaaattgtaatattacttatatttattatgcatattgttaactgaaattttcagataataatataaaatatgttaaaattaaatagatgattaataaagaaataacattagaatttttgcgtggttaaggcgttaacgagccttagttcgttaagactgaaaaagccttattataatgtccgtatttaaaaattgactaatttagatttaaactcattttattatatctatataatttcattaatcgggatcccgagtttaaaatcatttgttgaaaatacatgtattgtatttaaagttacataatattttttttttacaaactacagggcaaccacaaaatgaaactcaaaatgcaataagatcggaaccctctaggttgcactgtcgcgatatgtacaatccttgccaagctcatctcactgctcctccagcttagatttaccttcacctacacaaggtagaaaattgatgagtcgacaaactcagtaagatatgcataattatatacaatcaatgttataccgtctttatgcctgatccgtcctgagctcaattgctaagctcaccaaatggttaagaatgttctcaatggaagtgcgaccactgtaccatatgcactagagtaccaactctgtacttgtgttggtagggccattatatgtactactcggagttactgagtgttgtaccacatgcacgatgtaccccttgatactcgtgttggtaacactgtaactaccctaaaaccctacagtgtactaacacccttaaaaccatattttcgttagtgttagtagtgtaaacaattattaacatgcatacatttacatatatatactttatgctatcttaccgatcgtttctgtgctcacgtgtgccggtcagcctgagtggaactgcagctcgacactttatagggccctaaaacacaatattcaaaatttcgatgagagacacgctaaaacacatcccagggactttaaaattaaactagaaataactctatcgatcaatgacatggcaataacctaaatagtacaaaaataggaaaaactaaggttccaaaattgtctcaaccggaattttggttcgatgagatttttcggggaccaactggtcggccaattgttacaggttttcctgaaccggtcgatcggtttagtgcaggaaccaccaaaaatgtccccaatagcacaattcaaccctaaactctccaataatctccaaaatacttgtatgcaccataataaacttatttcaagcaactaaacctaacaatttacacaaaattctaattcaccattagagagcaaggtttgagttcttaaactcaaactttgctcaaacatcatcacaactaacaattgcaacttaatttaacttaaataatcccaaataaacttcaaaacaccaaaacaaataccaattcataatacaacaacctagaactaaaattctaacatttagacttaacttgagcttaaaaaaatcaaaggagaagaagctaaatgaattttaccttgaattagaacactcaaggcctgctagaatcacagaattgaagctgaaaatctgaatcctagttggttccttagagaattcgagagagagagagagagagggggggggggggggggggg

SEQ ID NO: 19339 - DNA, 4843 bp, Cannabis sativa
aaaaaaaaaaaaaaaaaaaaaaaaaaaaagacgatgatttcatatttcaagctgttgaacacatgcaattatttatctatatatccatatctatcattgatcagttttttcttttgaaagttgttcttatacaaatgtaagttttaatggaatgaaatttccatttaaaaatgtcattttttatatatctaaaatatcgttttttatatatatttttacaattttacagatttttttatactaaaaattattacaaattgtactttttggtgtcgattttaactaatacttatattatttttactgtttgtagaagatcaaaggtagagccaattaaagagtgaaaatcaaaacaaagagaagaacttaatatgattaagctatattatcatcaagagttaactcaaagacaagtaaaggttttttattataagagagaaaatagaaatagttacaacacacaatttttaactaactaataataaactaattgagttaactaactaaccaatttaactatttacatcatccctcaaacgaaaagaggtgttggccatttgaagttcggactttaaatagttaaattgatcagcgaataaggatttagtaagcacatcaaccacttgatccacaaaagggacatatcgaactaaaatctttttgtcaagtatttgatcccttacaaaatgtagatcaagttctatatgtttggaccgagtatggaagacggggttttacatctaatgctacatcactttgactatcaactcaaatcactggacagttaactaaaaggtgcctgtaattcagtaagtaaagatacctatcatttgacttcagcagctgcatttgctaaagctctaaactcgctttatgtgtgcttgacctatatagcaacaacgtgttgcttttttatagaccaagacataatgtttcctcccaataatagaacatagccacctgtagatcgtctgtcgtatacacaacttgcccaatcagcatccgaataggtggaaaaagtgagagatgaagcaggttttagatgtaagccttctgatatagtgcccttaagatacttgagtagcctttgcaagcttctgagtgaatggttattagagcctcaatgagttgactgagcatgttgataataaaagttatatctgattttgtaagagtgagatattgcaaggctcccaatgtgcttctacacaatgtctaattagaaaaaggctctttctctgtaagagatagttttgttgctgcactagtactataatttggacaaacctttgcaccttccatgtgcaacttcagtagaagatctgttatgtacttggtttgagacaagtatatgctagcataatctctgtaaacttccaccccaagaaaatagtgtaaggagcctagaactttgagagcaaaaggtttgttgaggtcataaatgagctgatttatggggttcaaatttggacctataaccagtatgtcattaacatacactagaagatagataatatttgaatcggagttatgaatgaagagtaatgcatcaaccttagaagattgaaaaccccactctattagactttgtcttagcttgtcattccaggttctaggagcctgcttcaagccatatataactttttgtagatagcacacatgagtagggtacttaggatcctcaaaaccttgtggttgtttcatgtaatttgtctcttgtagttgtccattcagaaaagtattatcaacatcaagctattttactttccattcaaaagaaacagccaaggtaagaatagttcttatagtaacaagtttgaatactagggaaaaagcttcttcatagtctatcacaggggtttgtaagtatccttttacaacaagccttgatttgaatctatccaatgtaacatcaactttacagcttttaaggcataaaactcatgttgcatagaggcttgccactgtggatcttttagagcagctgctatggattttggttcagtgggaagaagagactttggtagaggatgttttgtagctaagtacgtatgcctttggtttaacaatgccactttgggatatagttgttatggaatgattccttgtggcagtggaggtagtgacattcactaaagttgagataactggttgttggtgttggattgtaacaggctcaaaaataggagaaagaacatttgaggatgccagcaacttgagttgtaatgagattagcataagtgtttttggttgaatagtggaagtgggtggagggttgtcatgttgtgtgataggagctaatatatagggtgctaaatctagttgtacaagtgttggagatggaggaaatcttgattgataatagatggaacatttggaataggaggtgtagggtctcaaatccaagaatagagccacagggaacaaagtttgtattagtagctgcattagtattgatgaattgaaagtagtagtgggacaagagtgagtaagagactgtacctaaggaggtggtgtagttgagaaaggtcctaggtaataagtgtcattgaatacaacatgtctaaatatgaacaccctgccttgagcatttttacaaatataacctttattcaatggagagtaacccaagaataaataccgctgcgatctaaaatccatcttgtgtgcattgtatggccttaagtatggaaaacatgcacaatcaaatggctttaggatagaatagttaggcttcttgtggaagagatattcaagaggagtattgttgtccagaactgatgtaggaagcccgtttatgagaaatgttgcacactgaaatgtataccaccagtattgaagatccaaactagctttggcaagtagggaagtcttgtttcaacaatgagcctatgcttcctctcttccctaccatttttctcatgagtatgtggataaggatgagaaaatcgaatgccttgatccctgagaaatctagcaaaaggtttgtactcaccacccaatcaacttgaacatctttgattggtaatccaaattgtttttccactagacacttaaatttgataaacatgtcaaaggcttgcgattttgtagtgagggaatatatccatgtaagtctactatagtcatcaaggaaatgaacacagtatttaaagccatctttggaagggaggtgactggcaccccaaagattagtatgaattagttcaaggggttgcgtggctctgctagtggacatgagaaatggtaatttgtgatttttgcctaactgacatgcattacagaactgaaaattggtgatggaacctgtatggtgcaaattgggaaaggattttttgagagttgaaagggtgggatgatccaatttgcaatgccaagtatttatatcattatttttagtagtattgaaaacttgaggggagaaatctaaatggaaatctttgtctttattaatatctgaatgtgtacaatctgtagatgacattgagtgattgaagttacattcactaatggaactacaataagaatcatactgagtttcagatatagttgcaagattacattcaaaagtagagtgagatagaagagcactttttcctagcatgtacagactatctctaaccttccccttgagtagaacctctcctgttgtcttgcccttgacaaagcatgcatcagtgtttatgaaattctagaaacacaatattatctccagttagtttagatacactaataagattctttttaatcgatagaactttcaagattgaatttaactgtaatggataagaagaagaaggaagagtagtgaagccaatatgagattatgagcaattttttaccattgcctacagcgagagtttcttggccattgtagggagttgatgcatcaagattgtttaaccaaaagatacatgattcatagctccagtgtcagaaaatcaggtaccatcatcacaaaaatctggtagagttatggaggaatagacttgagaatcgtattcaaattcttgctcaaaagagctagtcatgatttgggtgtgacctaatttttattgaatctatagtgaaaaatgttagcagtatgcccaatcttcaagtaaacttgacaaataggtcgagcagagttgggacaattgtaaccacaatcaatgccacgactaatagtgtaatgtccccatttcaagttttcattaggtccttacacccacagaataatgacaccaacacgaatatttccaatgtgctttgtcctaacaagcaaccatctcattctatccccattgaacttgcccactggccacttgtactattgtgtcaatcaaattttttaaaatttaaaaaaaaaataaagaaaaaaaaaacactaaacatgtagctggacacactactacaaaatagacttttggtgtcaattcgagatacgctttttttaaaaaactgacactaaagaccaccccaactctttggtcaatatattagttctctcttccacatcagcttatttttaagggcaacgccccttagaagggcaagagtcgttcaagaatatatcagtttctcattttggtgttgtcattcaagaatatgtaaagccatgttggctaatttatgtaatgtcctagtttgttttgttaagcagacagttaatagagtcgctcccgagtttgttagagcatttttattatatcctgattgtattttcagcttgagaaatattacaattgagttgttgctactattaaaaatcttacttttagtcacaacaaaacttgtgacttaaagtaaaaaatttgtgactaattataaattattattcttgactaattaaaaaattcatagc

SEQ ID NO: 19340 - DNA, 2541 bp, Cannabis sativa
tacaattttaagttgttagtttggctaattttcacaccaagcttaagctaaagttccattaaagaatgtttcaactcttatttctaagtttgttttataaaatccaagaaagaattaaccaaattttcgtagaggcaatcaaaaaagccacctaattgaatatataactaactattggatttattccgtttagaaagttttgtcttttttcttgacaatatttgactcaataagctgtgaaggtttcaatccaatgcttattttaactcttgactgaagcatttagtcgtttcatctttattcatatgttctaagttttggtttcaaatgtttacttagctatttttcttttagcttacatagaagatagaacctcatataggttaaatgcaaatttctattatcaaagctgttctttactgaatagtttgttgtagatgatactaaacaattgggaattgtattaagtttctttgaagaacaacaaatatcttatgagattattagttgtttcgaatacgaattccatgaacatggatttttctttgtaccatcaaatatataatgtgtggttttcttttgtgatgacagtctaaaggggatctttatggagcagaagattactattctcgggcttcggttgcagatcccgaagatggtgaaatatggatgcagtatgctaaactggtttgggatgtttatcatgaccaagaaagagcctctaattactttaaacttgcaacaaaagctgctcctcaagataggtttgtagtaattttcactattatccgaatctaataggaaatgcagaaattaattcaagtctcgaaacatagaaaatgtttaactgggttttgatggggttttttcttttttggtttcagtaatgttcttgcagcatatgctagttttctatggggaatagaggatgacggggaagaagatggagcgttcgataatcaaattcaggtactaattttcctgttgaaagaaccatgaatgatgagaatgcttcaacttatggagtcattctaactctttaatcatcaatgcaggttgaacagaaggaagattccaccccgcgcttgaacactgcagttgacccttgtcacactggaaatccagatgtttattataggaagatgatcgaagagaatcccgataatgctttgttcctaagaaattatgcaatgtttttgtatgaggtgagtcatgtgttctaactcatcgctcgattttctactcagaaaaccattcatagagaaatggagtgaataatagatctctgtagtccttcctgattgtagattatcatgtttatcattctgtgaattaagttggtttgattcgcttgatacagactcaaggaaatcttcaagccgctgaggagtactactcgcgagccatactagctgaccccagtgacggggaaattatggcacaatatgctaggctggtgtgggaacttcatcatgatggtcgaaagaccgaatcttactttgagcgagcagttcaagcttgtcccgacaataggtacaaacaaaattactggttatgttgaaaccatcatgagaagtttcctttaacttccaaagattagtgattctattctactggttaagtcattttctagatatttaagtagtaaaaagttagattagaggaaataggtctgatacattttactaatctattttgcttcactctctttgctttcagctctattcttgcagcttacgcgagtttcctttgggaaaacgaagatgaagaagaagaagaagaagaaaaacaagcttcggcgcctatttttcatggaatggcgatgactgctgcaagtgtctgaactatatatcatcaacaaaagtaatccacactccatagaataagtaggcaaaaaaaaaaagactaatgaggcatgcttttgcataaggctaaaagctaaattgatactatattgtagaaacaggatttggaatgttcttacacaagagaagtagaatttgtgttagggttttggggcatggttatcgatctagtttcgaacttcgactgataagcaagccactgtcaacatctaatgttctacattcaaagttcaacatctaatccatgcatatttaataatttatttattccactggataaacaagtggtaactatattaaagtgtcaagaaaatgaataaataagaatacaactcaaaataaatatcctgagctcaaaattgcaagcatatcattctttaattaagaatatatgtatgtgaaaaagcttaactttttgaagagcaaaaagaatacaaactagttacccaatatatctaataagttaaatcgactgtagggaataataaatcatatgctacttactaataggtgttcttctgagttgaaatgactggagcaaaaatttatgtagtaaaataatcttaacttgtaaaatctgtcccattccttgttggttggtaacctgagtttgctctgtagaaaccatttcctcttggtctattgttgtagtcacggtcgcctccgtcatgattgc

SEQ ID NO: 19341 - DNA, 10249 bp, Cannabis sativa
  modified_base (9981)..(9984): a, c, t, g, unknown or other
agcaacactttaattttaagtgtgatcaactatataaagaaataaattcacaacacttttttattaagtgttgttgattaggtgttgccaaatataatttttgtagtagtgagaagatgaaaaaatactcaaaaagtataagatggttttactgacaaccacattgggggaataacctctcaaagaagatactgaggaaagggtacttttgtgcagcaatgatcaaagattcaatggactatgtcaaaagatttgacaagtgccaaagattctccaaaataccaagagctgccccaactgagctaaagagcatgtagacttcttggtcatttgttatcaagtgaatcgatctcataggttccctgcctaatggaaaaggcgaagtccaatacacgatagtggcagtggattatttcacaaattaaatataccaaaacagagcccttgaccaccataacataaaagaaatttctcgacttcgtagtaaagaatatcatttgtcgctatgaactttcagatagtgtcaaacaacaacacatagttttatagagacctctttactaatttctgtgaaagacacaaaatcattaagagtttctgagcagtcgcttaaccacaagcaaatgggcaagtggaaactattaaccaaaatcttgaagatacactaaagaagtgcctggagcaagctattatttgaatattacacagttgtgaatagctcgcttttactaggtcaaaataaacgtgtattatatacgttataaactgtattgttgtggaatgtctcgctgcgaactgagcagaggcaaccttgatagcgagctggagcttgtcatattcctttccaatgttgataatgcaaatctcattgcttttactctggaaacctaacaccctctttgacaatcgcaacttttagtggtgaggtgatctttaacatgagcatgtcttcttgtagcaaggttgacacctcgctatcagttgcttaatttggttcacccgtcagctatacttagtttgtatactataaattatacgctaagtgtttttactgtcattatatcccctccacataacgaggtcagtacctcgtcttgtacacatgaagttacatggtttctcgttaatgcacaagtctatcctgagcgttctagggatacctttgggctgtttcctgccccctattctcctgtgccaccctgactgcagctatctctcgctctaattcattattacgctggtttgcttcctccaattggcgcatgagatggcagttttctaattcaacgattggtatgtacctcgttgcatcgtaagcgccatcctcatcaactagattaggaagagatcggtcgttgcttatcttaggcccttcaagtctgtttcccaaatcttgggttttcgcagagctagtggcgtgttcaaatcataagtcaaatgatccttggggactcaatggctcttttccaggacgatgattggctccttcatacggattattttcttcgttgtcagctataagaggaatattatttttttttgtaaggaggattttttctgagctttgtcacgaaggctctcaatgaaagcaccaaactgttaacccaaattgttgttaactaaatttgagccaattagtgataatctcacacagaaaaatacaaacagtaaaggaaaacacaaaggattttttacgtggttttgcagttaaaattttgcgtagtccacgagtcattcttattagatttctaattgtttttagggccttttccttatgatttttttgtccatttttcagtctattctgcctctatttataatcacatagtaggcagttaattacatggttgactgatatttttacaatgattaccccctgaaattatggggtctgattacatatcacgttaaataaatgcagttattatttgaatatcacacagctgtgaatagcccgcttttactaggtcaaaataaatgtgtattaaatacgttataaactgtattgttgtggaatgtctcgctgggaattgagcagaggcaaccttaatagcgagctggagcttgtcatattcctttccaaggttgataatgaaaatctcatcacttttactctggaaatctaacaccctctttgacaatcacaacttttagtgacgaggtgatctttaacatgagcatgtcttcttatagtgaggtggacacctcgctatcagttgcttaatttggttcacccgtcagctatacttagtttgtatactataaattatacgctaagtgtttttactgttgttatatcccatccacgtaacgaggttagtacctcgccttgtacacctgaagttacatggtttctcgttaatgcataaggcgacactttgtatgtctttatctcgcaaaagactatccagtcatccgagttataaacacactctgtgaattatgttcttaacgagttattcctcctcaaatgtaattatgattacgtgtctgggttcatactcttcccaacttgacacgtgtcttcctctgatgtgctagccgaatttcgggtataacacaagtatatgtatcattttcacaagtaatactcaggtaagtgagatcgttcccacgaagactgtagctaagtaccaatcaatttcattcatgtttcaatttggcaatcaaataaaaggattttgaaactaaataatctaacataaaattaataacaaaacaagcaaataaaaagagaattaacaatggatgtgaaattagggaactgatttcaattactttgattacccaattgttaatactaattaattattcttcttcctcttatgtgatgacagattatcaattaacccaaactcttttttagatcataaatgtccttaattgcatgtcaactactagatctcttagatagtacaataaataattttcattaagaaataatctaaaagttacataagttatgtgaataccctcttttcatatcaaaatctatgttgattcatttagagcattcctaacattcactttttagattttacattaggatcataaatcatgcataaggtgactaatcaaatacatgtaataagtacaaatatgaacaaatcacacaataaagtaagaaagaaaaattaactaatattaactcatgaaataatttcaaaaaatatccatcaaatccctaaattgggagtttaactcattatcaattccataatcaaactaaatatcaacataaacattgaaaataaaagaaaaatgagaaggaaaatagattgggattgtcatagattgctaacttcttgctccaatcttcttcttcttcttttttagggttcttgtttctgtctccttcggctcccccttattttcaaagccctctctcgcttcaaaacaaaaatttcagccaaaaattacgaacggggaaactgcccaaattgcatacgaaggaagtgtcgcgacaataccaagcctcaccgcggtgactggagctcaacgaaaattgttttgattttgtaaattttcgtcgtggcaaccatgaaccttgtcgcggctttaggcatatttttctactttgacatctctaagtaaaatgttcataacttttacatacaaccttcaaatgagttgatttaggatgcgttgaaaagatgaaaatgagatctaaaacttctatgttttgactttttccaaaatctgattagaatatagtcaaattcaggcttgaaatgtcagctttattttctcacaaaaatcttctctattttatagatcaccgtatttatgatatttgacaaatttatacattccaagtgtcaaaaacttgaaaccaaagaaaaaaagtgtaaatataatccaaaaatttacaataaacaagaaaatagttgcaaaaaattatccgaacaatagtctaaaattaatctaacaaattcccccaaattaaatttgtactcgccctcgagtaagactaagactaaaacacaagctagaactaacaaagaaacatttaagcctccatttaacaaactgttgctaccacctatagaacttcaatcaatttatcaaccaaaatttcgacctaaatactctgaaaaattaacttagatatctctattggaaaatagtgtatagatgcaaattaaagttcattattttgataaactcattcaaaatctactccttccaactttgtacaaaccaatattcacttacctctctctactaatatcaacaatacttgtttagaatcaaaaggactttcaaggttgtaatgtaatggcttaagtaataggtagatgagaaagtaattttaggctatattaaaccaaaagcacactataaacccatcaaccactcaaaaaaatgcaatatcctaaaattttgcccattttcagatgattgagaaggttactagcaatgtgtccaacatcacttttattcaccataattattacctttttgttcttttcttttgttttgaagagaagtaggaaatggattcattgtaggcttcaataagtggctataaatttttaaacatgcttaagcttaaataggtaaactatgtacaataaagataaaggtaggcttgaaaatgctcaaacagtccaaagaaaattgcttacattatattccacacaagcattgtcaacgatttccccttaagaaaataattaatgcaagttgtattgaaaatttgcaacgatacaaaattttcaaaaggcatccaaattaatcgaaagagcatacgagtcaagctcacagtttattctttttaattcatccaacaagggatagtgtagtaattattcaatcatatcatcggcttaattcacacacgaaaaaaaaacaattgctaaacaaaaacaaacacacaagctaaaaataaaagaaaataaatcccttccctaaactaattttcacattgtccccaatgtgacaaaaaagtaaaaaaatgagaaacttacctaagaaccatgccacatcaacaagcggtttaacacccaaaataagtatcatgctagacaacttgaaagttgttgttttaaatgccctcaagcttggcataatatgaatttgatccaaaagcaacaacaacaactcaagactttggatgatgagcttggggagaaacctttgatagctcgtagaggaaataatatagcaaatgcagtattgatggaaaataagggtccattggtggttcaaaatatagtagcattgatgacctaaaattaacaactacaattaattcttcagccactaatgacatatctttctcacttttctcaaataatttctcaattggtggttcattttccacatgatgatccacaaccttgaatgtgatttgatcttcaataacttcatcattgaggattgaagtttcttcattcaccaagttaagatcatcattggtcgagcaagcatccaatgtacacagcttttcagccactttaaaaggttcttgctcttcaataataggcacaatctcttttatgtattcaactaattgcatttcttcattattcaaacaactctcataacttttattatttgagttattgtcctaaaaacactcagaatcatgcaccattaagttatcacataaagatcttaccatgtctgccaagtgattaatttcttttgcaagcgaaggttgatactcctcttctttgattaattggggtgagttagggcaataaggaaggtatcggtaccctgaagtgatggattccaatatcattggtaattaaattttgctttgtcattcaatagattcattatatcatcatggattctcctataaaaatgctccagatatctctgctctaaaattcacctagcttcttgttcatcatcagtccattataaatgaacagagaaaaccacccaaataagaaattttgataacatctcgctacgagctgattaaatctccccaaagcataatagattggctcattgtgttattgggtagaactcacaaggtaatcttgatgtagcattttgatttaccatgcaggtcaaacacaattaaaagaaaccaaattagaatagaattcaaccatcttgatattaactaaaacagtccctgacaacggtgccaaaaacattttgtgataaatccaacatgcgagtatatgtatcgtgttaacaagtaatactcaggtaagtgagattgttcccacaaggactatagctaagtaccaatcaaattgaattcttgtttctatttgacaatcaaataaaaggattttaaaactaaatataatttaagcaaaaattaaataacaaaataagcaaataaaaagagatgtaacaatggatgtcaaattagggaactgatttcagtttctttaataacaaaattgttaatactaattaactaatcttcttcctcctatgtgatgacagattataaattaacttaaagtcttttcagatcataaaattcctaaattgcatgtcaacgactgcatctctcagataatacaacaaagaatttacatgaagcaataatctaaaagtcacataagctataataatactctcgttgcacatcaaaacctatgttaattcatttagagcattcctaacattcactttttcaaatttcacattaggatcatagatcatggataaggtggacaatcaaatacatgcaataatcacaaatatgaataaatcacacaatcaaggaagaaagaataattaactactattaactcatgaaataatcttagacaatatccatcaaattcctaaatagggagtttagctcataattaaatccataatcaaactaaatatcatcataaacatagaaaataaaagagaatgagaagaaaactagattgggattgtcacgaatcgccaacttctttctccaatcatattcttcttcttttctagggttttgtttctgtctcctttgactcccccttattttcgaagccctctctcacgtttaaaataagaattttagccaaaaagtacaaaatgaggaaacttctcgaattgcatatgaaggcggcgacgtggtgacaccacgcctcgctacggcgattggagcttcacgaaaatttttttgattcttaaattgtcgtcgtggtgaccatgaacctcactgtggtgctaggcacatttttttgctttgacctctctcaataaaatatgcataactttcacatacaaactccaaatgagttgataaaatatgcgttggaaagctaaaaggagatctaaaacttctatgttttggtttcttctaaaatctgatcaaaacatagtctaatttatacttgatgtttcagctttattttctttgaaaaatcttttctattttataaacaactgtatttccgatatttgaccaatttattgatttcaaatgtcgaaaccttaaattaaagaaaacaagcgtaaatctactccaaaattataataaagaagaaaataaatgctaaagatgatctgaacgataggctaaaaatagtctaacacctgatatggtagaatttggtgtcagcggatcgccacgtcagcttcagctatgcttttggggcgtctcttggaaagtccttccaaatgtatcccaaacgcatattcggaggatccttactacttcttcttatttgggtgagacacccttttgaacctagatatatcttgttctggatgtaactatcttatatttcagatggtcttgagtctcatccttctgagttgtcttggcccattaccttgttagggctactgagtaggccgtagttgattaacttcgaactagacatgccatgtgcactacaacaaatatgggttttaaagatgattaaagttgcccctaaaagtattaaaaattgcctctaccaactactagtggaaactttattcgtccttaaaaattcatgcctaaaagtattattaggggtgaaaaaatagtcgcccgtaaaaatatcattagaatcgacttttttcgcccctaaaaataatagctatattctggcataattattataatgtgataaatattttatatgttttataattaacaattagagtgataccacatgtaatatactagcaaacatattaatatgtaacataatataaatttgataatgttgatacaatagcataaatgctaatatgtaatataatataattttaatagtgttaaaacaatagcataaatatgaatgtcctttgcaggaacgatttcctctatcataagcgagtttcaacaccagccaatttaatacaagcaacagcatattttctagaccagtatcagcaaaaaaacaagcaacaaatctcttcgagatccattctttcgtctgcaacttcggacagtgggaattcatcttcaacatttcaattaaagctctctgtggatgctgcccagaatgtaacaacaaacaaaacaggatttaatatggctctatacaacagtaatggggacttgctattgactgtgtcgacaccttgggaaggaatacaaccggctctgttgatggaagctcatgctctctattatgctctttctttgtgccaaaaatacagcataaaaccatattacattgtctctgattgtaaaagacttgtggattatatttgtaatgatgctactcataatattctcttgaataggtttgcaaagaacataaaaagcttgttgtcttcccttcctaatgctactttcaggcacattacaagatgggataatgaagatgctcatcgccttgcaaagtatgcattaggcttagatcaggaagcttgctggaaagatcaaaatttcttatgtaatttgcatcctgtacgttgatgcttactgcaatggatacttgtttctttaaaaaaaaaaatatgaatgtcattatttgctagtacaataacataatttagaaaaacatagttctaaaaaaaaacattgctaaaatattttaaataataaagaaaaaaaaaaacatcatgatgttgctctaacgtagttataaattttttgaatctcacgtttggttgctaagctttcataggtacttctgaacttggacttcacactgctacacaaatcaaacaagaaaaagtttggagttcacatagtaattaagcaacgcatataacatttataataaaaaaaaattatgtaaacatataatctgatttacataatctgattttattacaatataaataatctaaaaacaatcaatttacacacataatcaaataaaaataattacctttaaagaaaacacaagtaaaaaatttttgttcttcaagcattaatgctctctgcataaaaaatataaaaacacattagatttttcaaaaaaaaaaaaaaaacagatatttaaagaagaataaataatacacaaataattattttttgaactactcaaatctgataagaactaaaaaaacttaccttatgatcggtgggccagtcaggatagatggtcggtcggagaaccagacgaggcggggttagtcggattgctttgtaatttattttttcacagagagaaataataaaaaggtggaagatgaagagtgagaaagagatgtgaaggggggttgtcgattagggttttaattgaaaaacttgccgaacttttaggggctacaatgtcgcccctaaaagttgcctctaatactgtgggggggaaaaaattccacctatttttcaacgaaaaatttcaatactttaggagcgataaatgtcccttctaatactaaactacaaagtctcgtctaaaggttttagcccaatatcacccctaaaactctctaaaaacagaaaaagaaatctcatcgttttagtggcgacaaccttattatgtcgcctttattatatcccttctttagagacaacaacttatcgtcctaaaaataaaaattattaaagtgttgtctcttctgaaaaacataacaaggattaaaatacctaaatattaagagaaatgctaaagggcnnnngtggtgcctagcactctcctatgtccaactaagtatcgggtcctacatagtttaatataatagcttttaggaagtatcgctagcgaatcgcaacgtgacatgtcgagaaggtgctagtcaccagttgtacctaataacaatgctcaaatattaattaactaagataaaaaaaagagctaataataattaatagaataattatcttttttaccccctgtacttatgacactatactattatgccccttaatctattcagcttgtta

SEQ ID NO: 19342 - DNA, 4037 bp, Cannabis sativa
caaatacgagcctccctaaaagttaattgggactgcatgcaaatacgagcctccctaaaagtttaggctagctatttcagtgttttttatttgatgttttatccaaccaattggcaggtaacatcacttaaaacacatttgctaaagtttcataagttgaaatttttaactcttcgcacttgtgttcatgacagttcatctgcaattttttagaaataaaataataataaaagttgtattatcaatttatcagtgtcatactgttataaatgtaattaagaatcgagttccatataacttaacaaaataatttttagagaatattgctaacctatcatgggacgctacctaaaaggtgctggacactctaaattattgacttccatacacaagtgtagatgtatgtatttggtgttgaaaataatgaataacttttcattgacttgtatacttagaaatgctaatgatttatcatcattccttgtcgttctacagtttcatttgaattttacttttctaaatttcatttaatatcgaaaacaaatttgaatttgaattttacatttcaactcatttctttttctatataagtgaatcattattacaagttgagacttaattaattcatatattgctcaaaatttgtgtttgtaaagtgttcaactgatcatcatggaactctttacaatgtttggattgttgttaaaaattgcttctttgtattattaggagattattatgttcatagttgtttggaatctgataaaaatgctcttcttgactttagaattggtcttgaagatccacaaaaccggcttggatcatggaaaggcaacaactgttgccaatggcgaggaataagttgcaacgaggtaggagcagttactacacttgatctccataactgatatccaaacaacaggtatgacttctggaaccttagtggggaaataaggccttcattgacaaaactcaagtcattgagacatttagatttgagtttcaacacattcaagggtatttcaattcctgaattttttggatccttgaaggatttgaagtatcttaacctttctaatgcagagtttagtggtctaattcctcgaaatataggaaatctttctagattacaatacctcgatttagatcatttgtactacttatctgtcaatagaattgattggatcacaagtttagtctctctaatgcatcttgtgatggatggaattgaccttttaatgtctaccatccttaacagagttgcatatgtcttcttgtaacttaaagggtccttttctctttgtttcttttgataatcaacatcacttgctgttttagaccttagttttaacaatttcaactcgaaaataccagattggttggtaaatatcagcagccttgtgaccgtcgatataatagtggcttgcatggagggattccacttggtttagctgatcttccaaatctgcaattcttgaaattttctcggaataatcttagtgcaaattgttctcagtttttcaaaggaagatggaagagtataagagtcttcgatttcgatttcaataagttggatggagaatttcctgctttgattggtaacatgtcatctcttacttacatgagattgaatgaaaatcagttagttggaaaattacccgaatcgttaggccaacttaagaatcttgttagacttagcataagcaataacttgttacaaggtccaattccaagatcattaggatcattgcaaaacctaacatatttagaacaatcatacaatagattaactgggaatcttcctaatagtttgggagagctctctgaattgtctttcttagatctttccttcaatcaactcactgaaatagtcaatgaaacacattttctaaagcttcataaattagaatatgcagatctattttccaactcttttataatggatataaactcaacatggatccctcctttccaagttaagtttctttacatgggttcaagccatttacgtccttcatttccaacttggattagatcacaaaaggtggtacaattcttggatttatcaaatgctagcatttcaggctcaatacctgattggttttgggaaactttctctaatctttcatggttaaatgtttcctctaatcaattgaaaagtcagctacctattacattcaataagttttcaatttcacttcttgatttaagctcaaaaaattttgaagggtccattatttctttctcaaataatgttgatttagtcttacttgatttatccaacaataaactttctggtcctatccccaaaaccataggttctaccttaccaaacttgatgttcatttctctttcaaacaaccaaatacaagggaaaatcccagcatccatgggaaacttgcttagtattaaagtcattgatctttctaataatagcttagaaggaacattacctagcattggaaattgttctcacctagaagcatcggaccttagaaagaacaatttgtttggaactattcctaatgattttggtaaactaatttttcttcaaaccttgcacctaagtcacaacaagttttgaggaaacatcccatcatcgacagattagtaggtgaaataccacattggtttgggaaaggctatttggagaatttaaggatacttaaattgagatcgaatgcatttttcttccatcgttgctatcaaatttaagcaaattacaactgctagatttagcagataatggattcaatggcagcgtccctgctagttttagatatttcaaggctatgatacaagtccagagagaaaatcattatctattctatggccgtttcaatggtaagaactatgaagatagcttggttgtgaaagtaaaaggccaggatcaaaagtacaccaagattctttcccttgttgttagcttagatctttctgcaaataattaacaaatttgttgggtttggtgaatttgaatttgtccaacaatcattttagcggttcagttctagaggacatgtcaaagttgggacaattgtcatttcttgatctctcaaacaataagctctcaagtgtcatttctaatagcttgtcatcacttttgttcttgggacatctcaacttgtcaaacaataagttgtccagcaagattccttacaatggccacactgcaaccttagaggcatcttcttttgttggaaatctaagcctttgtggccaactccttgacacaaaatgttcagatgatgataatggtgatttggataaagagacaacacttgatgaggatgataataatgatgaagacaatttgattgataagtggttttatttgagtgttggattgggatttgcagcaggacttctagttcctttttttcatgttggcaatgagaaaatcttcgagcgaatcttattttggttttgtggatagtgtactagaaagaatgccattcttggaacataaaaggcctgggagaattcaatgctgaaaatgatggttgcaggtagctgtgttcttttctcactctttttcttatttagtgatatatttatttttattttgtttttcttcatcctcaactatgtaatgcttgtaaattggaattttaatattaataccaaactcttttcatgattaacacgagctcataattgtagagtaatgaaaaactgatcttgttgtgcaactgatgaatagtctttaagattaagaattcaaaaaattaaattgtaaaaatacacaccacacacaaatcatgacttttattgcagctaagaaagataggttacactttcacttgtatacataagaactctgaactaaaacaaagaaaaaaaaaaacagaaatacaaagatatataatggcattattgttacattacacacaaacttgctaaaaataaaataggtgcaacatgaatgtatcattctcaatgatgaagtcccctaggccattgtcgtttcgctctcattcttcgctcaaagaatggatatctttctaccacattctccacaaagccaaaataagttt

SEQ ID NO: 19343 - DNA, 2346 bp, Cannabis sativa
  modified_base (191)..(192): a, c, t, g, unknown or other
aaaaatttagtttttgtggttaagttttgtggttaagtgttacaaactgtggttaagtgttacaaactgtaataagtgttacaaactgtaaagttcaggtggtttagccgccaatatcgcttaaaaaattgtcaaaaattaagctaaggttgtatttttactattttagaaaatacatggtctattttatnntttaacaaaacaaatagtctaatcagtaacttttacaaaacacagggtccgaaatggtatttacttaaattatggccaacaacattaattttcctagaacaataattttttttttcaaaactaagcataattcataatccataattttatatattttgttttattttctgaaaatataactccttttaattaatgtttggataattattgtattttttttatgtaagtgttattttcaaaatatttggatatcataaaaaaaaaaaatctattatgagtaaattagaaagtagataaattattctaattttagaaataatttctcaaaaatatttttttttagaagaaattacaaatcttaacttctcccaaaagagtcaaaatgtcatatgaattaacaaaaaagtattgttagtaggtactagtgatgtccaacaccacctaaaagtgacaccttacgattagttaacaatatttcataaaaattattatattaaaggacctaacacttacaaaaatattgatattacaccttagagggtgctaaacatcgtagcgccttctaacatttctcattaaagaaatactttttttatttttatctaaacaagactttttttaatcttacaagctaaaaaagctaatccaaactagaccaaaatgaaataaaagtttttcttaattatttttaaattaaaaaattagggtttctcgtttgtaaatttatagctacaggaaaatgtattttttctctggctaggcccgccaaccttccttgggcataggttgggcttggtcgggattatgttttgccattgcgattcgatttttgctactgtgattagtcttgtctctgtgacatagttttgagtattttagtcttgtctctatgaaataattttgagtgtttagccttatctgtgtgacattgttttgttttattttatttcgttgttggttcttctttgttctttgatgactcgccatcaaatcgtcgtagtggttgggaataataattcctttgcgactgaagatgttgttagtagtggagttacgaggttggatgaaccttctgcaatagtttctattgttgtatcttctgagcaatagatgaaactgtataggtattcttaaggttaaatctgatgttgcattctttttcttctgattttattattatttttttgttaaacaatatgagaattaggtgactgattttttggcatgtttttttaattctaattctagtcgtgtctctaatggaagagaattttcgattggattacaagctattattttaattgattgctatgaataaaattgcatgatttattaaaaaaaatagagcattctcaaaaaagaagactaataaaaaaggctaattaggattttgcatcccaaactttgacatgtaccaaatcatgttccttgaactattaagataattagatttaaggacttttgtccaattttagtaaggaaaatctaacatggatgaaagttcagggggcatgattcgatacatatcaaagctcaaggggcacgatttggtagatttcaaagtttggagagcatgatttggtagttatcaaagtctaaggagcatgatttagtgcataaacaatcaccgaattaataaaattgaatgaaattcgacaaaagtctttaaatataacaatctcaatagttcaaggagaatttttaatatcttaaaaagttcagagggaataatttgttacatattgaagtttaggagacaaaaattcaaattaaccataaaaaaatatttgtggcaaaaccttcttaacatttacaattattacatatgaccttaataaaaaaaagtagcggtaaaagtaccttattttacgattttgttgcagtcgtatctttttttggtcatcaagtgtcaacttagaaacacgtagcgacaccacgtattaagaaatatgtcgctacatgtttttgagttggcacttaacgagcttaattgagatttaacaaccaaaaaagagtatgactgcaataaaatcgtaagataaaggacttttgttataacttttttttattagagtcatatgtataacaagagtaatttgcggcaaaaccccctcaactatcaatttacttgcaaaaaaccatccaacctcatat

SEQ ID NO: 19344 - DNA, 1841 bp, Cannabis sativa
gtgctcaagctttgtaccgagttcttcgtgtcctgaaatcagcaccagcagcaataatattaaagaatgatgtgcttttatcaatatgttaatatgataatggagttttcaatttatatcaaatttcttgataatctaaaagttcaactgccaaaaaactaggactgatgataaaaaggaaaaggaaaaggtttaaagttaagtgctttttgaatggggaatttgcatttggcatgattcagaagaattcgaaattccccgggtgacgaatgcagtaaccaaattgctttgcatcaacaaacctgtttacaatgagctgaaaccgggtatgatggctcttctggtgtttcctcagggaagttcaagattttgccacctgaagattttaagggcgagtcaaaaagtcttatacatccaccaagatagtcctgatggacaacatatcgagcagaatgccttcttctgattgagtttcctctttcaatctgtaaggaaatataaatgcaactcttcattacaacataacatgcatcacagaatttctctgcacgaaaaggtcccatccaaaaacttcactaagtttcagttaaaggtgcaaaccttgcgagacaaagacaagctactatagtgtttcttaaacagatcactttcatcagacttaatggggcaggcatctatagctgtttgtaactcgccaccagctttatctgaatgcaattgctctgtttcaggaacactcccagtaacagcctcgttacatttgctcaaattatgcaagcggtattggccaatattcttgtagatagtaccagattcattggcactcgtctctcgtgtgtaactattactttcatccataatcccgctctcaagaccaatgaattgctgatcagtacaagcaagctgagaactgtggtttactgcaagccaaaaccccactacttattaacaaaaaatacacacatgtaaccaaaatgtaattgggatttatataacataaaaatttcaaacacacctttgtataacgtacgtacaatttataatgaaaatcacagactaatgtaaccagcaatctcatcaaatttctacactgttatgaaaagttaaatgggcaacaaatgttttgaccaatgtaaatatagaagcaaacactgatactaacagaaaagtgaaaggagatttacataggaacgtcatattgtggccaaatagtccaaaagtgaaagtggattcttccctgaaacaaactacttatcttacctgccgtatcatatgaacattttctcaccatttatctagcctttattcgtccattatagttacaatggtaagagaagtataagaaattagccttacatgtattttgggaagacactggcaaattggtgtatctcatatcctgcacctctggagaatttggcaaacatacagtatatacattgatccaacgcttgtccatggcaaagctactgcaatgcatagttactgtgagctatgtgacaacatgactgttaaaagtataccatccagaaattcacgaaacactaacataaattattgacaaaagaatggaatgcatacctaaaggttcctcgatgtactggagaatagagtttattattactataagaagaaaatgtggacgtgctactggggcattcctcactggatcccatctcatgatcagatcgcatatgagactcaggagaggaaagagagtatccttgagcatcagcaactaaaggaacatcattcaagtctactccctggtattaagcagagtgggtattagagattagataaataaatataaaataaggtcacgtttggttggatggaat

SEQ ID NO: 19345 - DNA, 2664 bp, Cannabis sativa
  modified_base (2577)..(2602): a, c, t, g, unknown or other
cctcggttatttgtttgtattgacttaagaacaaggaaaatggtttattttcttagagctcttacaatagtatctctgaatataaactcttagacaaaatctctccacccttggcgagtgaatatgaatcactatttatagggttgtaagcttggagaggaagtatttgccttctagttaaaattgatataagtggaaagattgcatagtaaatacagaataccctaatcgtgggatttggacagcttgccatatctctgtaatctaatcccaaatttatagggatttccttgatgactcacgatgtgaaagctaaattcgctaagtgttggcgtgctgcacggattgctcactgctcagtctagaggacttcgtgtgagcaaatgtatgaggtgtcctgttttgtctgtgtcttgtgagcaggtacccagagtccattccacgtgtcaccatcgtgtgatgccatgtcagagtgcaaaaattgggataacatttgccctccaagtctatacgggacttctcaagttgcgtgtagacttcatccgagttgtctttgcgtttggatgggtgacacgtgtcaagtgcgtctgttcgcgactcgatgtgaggttgactaggcgtctcttttgttttcggctaataaatgctctgacgcaattaattctttgaaatctgattttctctcaccacatttgacggttacacttgattgcttttgatttccaatattcgcttttgggggaaccgaggcatcataggttttaaaatgattaccccttctttgctgttttccctataaatacgactgagcattgttcacaaactcattttcaccaaccttctttgttaagaaagttcagagaaaaaagagaggtttctagcttcaagtttgttgaaaaaatttcacaagaactgttcgttcatctttgcgtaaattgaatccagacgtcgatcattgggtaagttctcgatttgttttacttttacattgcacatttactttccaaattcgatcttaactttggtgtagatgatatgtagaataccctgggttcagaaactctacgatattcctttgtaatgattcatgagacttcacctttcatgatgcttgccttttgactgcacaatgtctgtctttcatctggcttattcaaagcttcgtaaaaaaatttccctaactctcgaaaaattcaaacttctgagttttgactttttgtcgaatatttttattctttaatctgttgagtactcatggtcggcatattcgcctatttaatgatcgataccccaaccaaacactaatctcgcgggttgtcttttgtagatgaaccaaggtgagttttggggaagcgaatatcgaatcgataaggattttcttcaactcttgcacgaggattacccttgtctttgttctagtctgccctcttcaagcgacagaaattttagttcaatcctcccatccagccataggatgatggctcgcattaaacagacaatgcgtaaagtcaacgcgtctgaccctcatgtggcccaccacgccaccttgcccaccgccgaacaggatccactcgtgcaggaagaaggagatcatgaagggggtgctgaagtccaggagttagaggaacatggcgatgtctgtcttggtagtccttctgaggcggaaaaagaggaggctacaccccaaaactttgggggagacaatgaggcagggaagccagtagacgcggatggagatgtcctggtctaaagaggggactacgtcactgaggagcttactgctgtagttcttcaaaggggacaaagtgccttgggtgccaggtgggtgagtcctccgtccaaggtcactgaggcacatttatgggatctagatgagggcgagtttggatgttatgttcctggctcgaacaaccgagcctctcacccaaagaaggggatgtgtgtctggttgggtgcttattccaaagaaggggcactggtgcctttgcacccgtactttaggaagatggcggactttttccgtctctgtccgacccaattcactcccaagggcatcaagtatttgtctgcccttttcgttctctatgtcacccagaagtgggatgtgccttctcctcatgaggttagcttgtttttcgatttgaagtgtactcccaagcaagggaggtcagaatacttctatttttctcaaccggacttcaagtggttgataggcaccgaggacaagggtgtgaacaaaattgggaattttgttgacgagtattacatggtggatggcatgggcaccacctacactcggttccagcaaatccatatacatcaccgtccacccttcacacttgctctcagggatagagctcacagactcgctctacttctgggtgctgcccgaaatatcactttgttgacctcagaggacaactttgtggagtacgggctctacccgaaggactttattctccatcctgtgaaggagaaaaagaggaaatctagtgctggtcgggctaagggagctcatcaggagaagcaactcactcaactcaagcgtgaagctaagtgttggaattattttaccannnnnnnnnnnnnnnnnnnnnnnnnntttattaacaccctaaatatgaaaattttaaacgatgaaataaacacgtataaagtttaaga

SEQ ID NO: 19346 - DNA, 3465 bp, Cannabis sativa
attattattttcttaaaatttgattgtttgcacaggttttggatgtgacacagcagcagtaatcaacatccttgggcacagaaatgcagcacaacgtagtctaatccaacaagagtatagaatgatgtactctacagaactcagcaagcgtatttcctctgagcttagtggaaatgttaaggtattcactctcactctcaactcatctctctttgttatcatctctcaatgtttgtaatgctaattgtgatcaacattcatgtttcagaaagctgttttactgtggcttcatgatccaatgacccgagacgcaaccattgtgaggcaggctttgagtactgcagatgttattgatcttaaagctgctactgaagtaatctgttctagaacttacactcaaattcaacagtttaaacagatttattatcaaatttttggtgttcttatggagagtgacattgagtaccaaacatctggagatcacaaaaaggttagttagccaattctctctttccatttttgacttgtgttgttgttttagttagtaaaaccattgaggttgagtttggttgtaatgaaatagaatggaatggaaaagaatgacatttccaaagcaatttttaatggaaattctcctatggaatatggtgaaattgcagatcaatgctaatcataagttagatagtttgagtcttccaaatatgattatcttacttaaatcttcttttgtagttgctgctttcatatgtatgcacaccgcgttatgaaggtccagaagtcgatagatcgatggtggaaagagacgccaaagctctgtataaggctggggagaagagattgggaactgatgagatgattttcataaggattttcagtgaaagaagcagagcacatatggctgctgttagttatgcttaccatgatatatatggtacttctttagaaaaggtacattgcattacattatacattttaacagcatgattattgtatgtagtcccatcttcaacattttgtgatccatccaatccactaatgcaaatatttatacttgttgcattgcaggcaataaagaaagaaacatcaggacatttcgagcaaggccttttggctattctgcgaagcgctgaaaatcctgccaagtattttgcaaaggtattgatttattcttctcatatcatctctggtagaattggcatgtattattgtgttctatcaaaattggtcataagaaaacactgaaatttttatgcataataacttataacaagagacagaaccagctcccatttagtcctttttggctgaaattggatctcatcagtcctttttgtcaaccacttacctctttcggcttacacgagcgatttcaattctcccaagctcaggggggccagccctgagctaaggcaggctaggcctacacctaaagcccacccagggacccaaaagaaaaaaaggatctttttaaaagacattttttaagtaattttaaaaatataaccggggcccaaaaaatctattttcctaaggtccaacaaaactcagggccggtcctaactaagctctacgcattgatgacattgtcactttttccctcttcaaatgaagtatggcccctccctttctgacaatctacttattcttaggtcctagaatttagaacaccaaattaagttgtccaagttttcttaacatgtttggcaacaagtagaaatgacatgttatgttcctcattgtgatcttgtttgaacacatgtaacaggtcctacacaaggctatgaagggtttgggtacaaatgacacaacactcattagagtaattgtaacaagggctgagattgatatgcagtatataaaggcagagtacagaaaaaaatatgggaaaacattgaatgatgctgtttattcagaaacatcaagccattacaggacctttcttctttctcttctaggccccaataattagttattgggcattctacgagtttgaagcttggttagctggtactcatttagctctgactagatgctaccaatgtgcatattattcactttttgtaactaacttgaaatttatattttttcttctttgttatttttttttattatttgctttgattggagtttgatttaagtttgtctttggaaaatatgccttgttatgtaaactctcttgtaattttcaattagtaaatagtgcattgcttttattatccagaaagattagtgtagaccaaaatgccatgattgttggcttgttcagtattattttttgaattctttgtctatgaaggttattatatcatgttttcattagttggacagatattagaatcctaaaactaaccaagtcagaatcttgtttgtttttatacattaatacatatatgagtaagtgaaaatagcagtcatgctaaacatatgcgccaaaaattgtctggtaatattacgagttctgtttttggtattgtaaattacttttataatttcgagtgttataatataaaagattgtaagtagcattcctcttagttcatatttctattgttattaatttataaatgttctactaaatctaacaaattgactaagaaataatttgaggcatacgtattatatatacatatatgtacccttctacaaaaaacattaaaccaaaatttgggaagaattgaaaatcaatgaaaagaaaactatatgtacttgaaggttttgagaggtatttttgtcctaactcctaatactaatagaagaggggtcaatgagagcgtattagatgcagttaattttctccctattttaaaacttaaatttttcataacaaataaaattaggaaaatactagcgccacaattaaattttcaacccaacctgagttattggcaacttttaaatggtgttgaattgttgcgaagtattagtagtgtttaacactattatgagatgatattttatgagtaattagcgattaattttacttaatattgaattaaaatatgtagcacctgatattaattgtactaatactaataatataatactttaaattgttggtgttagatattataagtgcgacagttatttaaaatcaacccaaagcttataaataatttttttttcctaaatatatcaagtaatgaaataaaatttaagggccaaaataatgtaaactttctttcaaatttatgttacaattagtagatttttttgtgcaattccaccttattaatgaaaatgcaagtgatagtaatatacaaatgactaatattaaagcattattattagatattagtagtagttttataattagttacaatattttttaaaaattattacattacattatatgagtctcgatatataagggaaatttacatagtatactaacttttgccattttcttacaaaaatattgtcagacggtattttttacttttgtactgtgttttttaataagtttca

SEQ ID NO: 19347 - DNA, 3250 bp, Cannabis sativa
gttctcaaatcccttaaacgcctgaaacaaaacataacaatagtaaaatattcgaactttatcaaatctaaagatgattacagttgatttgtaagattcaacaaaccttatcagcaagcatttgttgcagaacacgaacaacctgggccccagccgaatggccaacaaaatgaatagggtgatcctcatcccattcaggataatgccctgtaaacaaaacaaagagtaataataacttaataagaatgagacaaaataaaaagtgaaaatgttaaaaagaaatggctgcaaaatcagtaagaagaagataccttgttcataaacacgaccaaattgggagtgcccacaagctttgctgtgttcttctccataatcaacttgcccacctttcaaataatagaacaattccctccctagccctgaaaatgacaaaaacccattaaagcttttgcttgaacaagaagatttaaacccagaagaatcatcaccattcaccaaagaaaagctagctttaagctcatacctatcgtaaatgcttgtcaaggaccccaaatcaggtaccaggactctttcgtctttcttctctgcaccggcaaagtaggataaacctcccaatctctataagaaaaaaccatacccatataagaaaatataattagaaacaaattatgacaacccagaaatgctaccaaaatcataattctctctttgtttttttctatatttttccttttaaattcaaacccatttcagataaagaacgtacccctttaccaaaaccaaaaatcccatgaaccaaaacaataggaggcaaatcctcaacatttccgggtctgtcgtgaggaacaatctcattcaactcaatgttgacattaggcttaaatatttcattcaaagcctgagaaagatcaccagccaccgctgagctaaatatataaaacccatatagaagatgaaccaaagagctcacaaacaattctgctaattgcaaagaagttatccacaatctaatcatttctttacagaccctcctcctttccttttcttcttcaaccacaaaacaaaataaagaagaagggcttgcttctctttctcttctttttctagacaagagaccttcaaaaaaaatgttccagaaacccctcctactcttataggggtctctgaaaaattacttttttcagagaaaaataaataaaaattagttttttattagaaaagctacaaactttttctcgttttcgatctttcagagagtcacaaccaaccaatcaaattcaaacgcttgctggtcattggtttttgtatttttcttttttgttcaaaaacagagaagagtagagaaaaccatattaaaggcaaaaatgttggtttgagttggtgacacgtgtcctactgaaaacaactccctaaaaaattagaaattgtatatttgtgatttttatttatttaattaatttagagacggtcccacatcgtgtacagaattttgcatcagattcaccgtttttcatatttttattttattaaaaaaaagttaaagcatctctaatcatattatcctttaaaaatttacatatcatttaaaaaaaatatataatattttatctttttcttatattattttcaatatttttaaaattttttttaaaaaaatactataattatcatctcacacattattattcaatatatattctaatttctaactataataactttttaacttcaattttttattaaaaaataaataaatagcatcaatgccacaatataacatccatgcaaatttctacgatgacatcattttctctttaatagtataacatctcaatattttatcacataatatatctatctcactaaatattttttaaaattttaccattaaagatattcttaagggtttgaatttgttcgattgaaactagactatgaaattatttgaataaaaatagaaaaatagaagttttttttatgaaatgatgattttattatagaaaaataaaaattcatataagtttgtttcgaaactacaggtattgtgagctggtagtaagctggaaggtaccttatcaaaccaacgcccaactgtgtgagtgaccccttatccacttcttcaatgattttctcattttttaattctttctaccctacgcgcctcttctttcctataaaccactgcttttgcctcttgcttcccaccacgtgctcaaaattggcatctcaaactataatttttttaaaaaaacaagaggtttataggtagaaagaaacgaaacataccgttcttcgtggtcattataaataatgttgtctggatagaaaataggtcaaatttttgtgaagcgctcacttagtttcattatgaattgtaaaattacaagttttcaaaataaaaagaaaattataactaatcaaaagattagagagtattatacaatgatatgcatagttatcagtcccatcttgatactctctattcataaatggttttccaaagctaacagacatcaaaatgagatttaaaaaactaaactctaaccataaaaaaatactctataataaaaggatagagagctgtttaaacttttgtaataatattctaatcaaaattattattattttttattattttataaaatttatatttaataaatttaacttatataatattattaaaataattaaatactaactaaaatagaaaatataatttaagtaataacaataaaaataattttttattttaacgaaaaataaaaataatattattagacacatttttttcagaaaattaaaaactaaaataaagtggctttgattaatttttgttcatcaaattaatccgcttaccaataaaaaaaaaaaaaactagatatcatcgaattcatataaagacaatggttaggtgggaaataaaacaatgccgtaagttagaggttacaacttacaagcaagaacacctctcatgtttcgattatttccatacatgagcacttctctatacatcactagtaaaacacataaaaaaataattgattgaagtaataatggtcattttcatttactcaaagccttatcatttttcaaatatgatctaatgtctctagtttttttaagagtatttattaattcgtattattctgctcatagtatattcgatttgtactaattaagtgtagattttatattttaaattcaatctgcataataattcaaatacaatctaatcaaatttataaaagtg

SEQ ID NO: 19348 - DNA, 5393 bp, Cannabis sativa
tccattctcccatctatttttaactttaccttatagctaatgttattttattttataataaataattttttttcatgcatgagaatacgtgaccctattaatacggatctctatccttgagaaagaggatgtctgtcttttccaaaaatatatatttatatacatacgcacatatatataagtgcacaagtattttatttatttatgcatcttgcccccacttgcaaatattagagtattctctcaagttaaaattttctaacgcgagtaaagtcacctgatcattgaccctttcaaagtccaagaagtcactcacaactcacaagagatcaaacaagtgccacacaagacacaactacaccaattataaaataaccaaacaataacacatacccctttgaatacatgtacgtatattgtaagtacgtataattttaattaatatactatggtatattctacttaaaaaacaaaatcagatgcaataattgagttaggtctacaatcaccacggtctagatagctgagtatttgttttaacgactaattgggtataatatatcaactacaacatacaacagttctatacatgttattattgatcatgttgagctcgtttattattttctaattagtgatcatgatgaccagatcccaaaaaaaatcgttaatataaattatcggaataacatcaacctttaaaaagtaaaattggaaaagaaaaaaaaacaaagcagaattttagtaggggacaacatcctggttattcattattattactactaaattgatattagaggttgttgatacgtaacaaatcaattttataacccaaacgtatgattgaatttatacgccacctaatagtggcaactgagtttatcttggtttcatcagtaaaaacaaataaaacacaagcaagcaaataaataaataaaataaaatagaattaaagctgccaatgcatttcactagttaaagtcataccaacgaacatgttcctatacgtaaaactgtaagaccacacacccacaccaaactgtaaaaccatatttcatgaaaggagtctagaaaagcataatttcccatgccacacatcttcaaagacagacacatctaaataataaaaaaaaaaaaaagctcatatacggctaatctaacatgaaatataaatgtacattagttttacacgtcatccaaattcaagggcaaacttttaagatatgaactcaaagtttgcactctaaaaagtcttaaccattatatacgatcagcttgcagtagtaaccacaaaaataagaaatatcacaaccaagattggtatgcaatgtgatccacattaaataaatagaaatattcttacacgaaaaagctacttcatatgagtcatatcataaacaagaagagtaggggtaaatatgaaatcatattcttctacgaaaagcaataagatatcagaccatgccacagctcaataaacttcaagaacagccacatatttcaacattccaaagggcattttattttcctccattttgatggagtaagactatgctttctcaattacagtcaaaggtttaagagtacaaaaaaattgtaattgtctatgacaagatgtttagcaaagcagcatagctgtaaacccattgttgagagaaaaaaaaatctttgttacctgaaatttaaaaaatttgtttgccacctcatggttgctgaatcaagtataagagttccagattctatgatggagctgacacgctaaatcgaaagccagacttcccacgatcgtcctcgtattgctttaatatatagtagtagttgcactgccaagaaaaccaaagttggcaaaattcaagacctttcttaatgattcaataggccatacagaaaaaagaaacaacgcaaacaattgaaaagtacttccatatgtgttggtcaaacaggttcatggagaaaacacatttttatatgatttccagaactcatactttaagatcataattataaatttcactaaaataacaaacacatatacagataaccagtcttgtattgtggaaaatcagtacaaccaagacagtttttttttagctggaacacaatcagacaaccaagacagtttgatttattccgaacacaccagatcaaactcaagcaggcgaaaaaatttaatagccacaaaaaactacaaataaaagctaacttagaaacagcaataagttgcagcaaaacctatcttataggtcagaaaaagaaaaggtatttaactcttattctagacgcaaacaataactcaaagttttatgctctcccatatataatctggcaagttctccttgccctaacaagcaaaataacacaattggctaaacaagtatgtaggcagatcaagaaactgttaagaaatagaattgtgacgattgtctctacaaaaaaaaaaaaatgattatttattaaattctacaagactactatttctacaaatcaatttgaagtttcaacagaaattctgggttgtgaaacggaatactctgtgatcaatcagcataacaaatccttgcacactttctttttggatgcatttcatttataagtggatgaatttggaaatttataagttttacctcaacattgaataatctttcagatggaaaggacacagtaaacaaaaaagtactgtttaatggtaaataaaaccagattatataactaacctctaggcggaagaatttggtgggcacaacaatcccagctccaactgaacttcgaaatgactgaaagaacttcggaacagagaagttccggaactcattctctgtcaattttgcgaggttcccagaacctgcaaaaatgtgtccatgcactccatgttctcttaaccagcgcagaggaagatcaaaggaaagatctgcaaatgcagtaagagcaaggtctccgccaacaacatctcttccagaagagtcggaactctcttcatcaggtttatcattattttgccttcttggctctgtaggacctatgcctcttgtcttaaatccccacactgttgttggccctcccacagtgcaaactggagagaaatcaccacccaagaagaacctttcaggcagggatgagggcttgttcaagaatccattcccccatgggaaaataacaccaccagatattccgaaattaagtgcaacgttataaaatccaaaaggcaaagcgtaacgaagatcaaattcctgtttgaaatttccacagaaaaagttacttaagcagtaaaaggcataaagaaaacaaacgaagggaagggcgtataacagtgtaattgtcatcaaattaacctaatgtccgatgatgctatgtaaactctacgaaatatatatatttttctctcaaactaacaaaacaagtaatcataattcctccaaataaggcgacaggtagggagaaaaaggaaagtaaaagaaaattgtcccaagaataacattttcttgcaaatagtccagaccaatttatttttacatatcataacagaaccaaatcaatttgactcctacccaattcaatgaaaaggctagacccttattctgtaaattctgttttaagagcttagatgtgatacactaaacataaggcaagtatacctggcgtagaaaccgtaaacaccgaggatcaggagataacccaccaacttgactgctcaaaacacaagcataacctcgagttggtctcacacctgaattccttctgtcaatcttaaacgtatatttaagagatgaaagtaagccatgtccaagctgccttcttattgtcctcgaggccatctgtgttggatctgtcaaggtacgccatccaagattatatgccaagtcgtggttcttggtcgaaaataaaccaagagatagacccaattgtcgctctttgtatgaagagtactcttgccaatcttgagaaagcaagaatgcccgtgctaccacaggagttaagaagcatttgaatctgggcaaaaacactccagcacttatctcagaagtttggtttggtccatacgccaaagaaccatcccacagatccccatatccaagccaattcttatacttaactgagccttcaagcgtccaagatctagcctacaaaagaatcatgtaatttcacgagagctatccacaagtaaataaacaactcacacacaataattcacaaaacttgacatcttgagcatcttaacttaaaataacaaagtcatataacttctaaattcaatgaatgctcctgagagacatgacaacaatgaaattatgaaaggcatgtgaatagtctaaaacttgttttgaacctttaggtcacataaatccaaaaattgaactgacctacttaaaatctattagtaagcaatacactacaaacttaattacatgactagaagtctttcatcttgtaaagcagcacttgcatttcaattaatccacttttactcagcaaccaaacatgtgaacaactaaatttgtataatgaaatgaaacaaacataagcagacgcataattaaaccttaccgcaggtttagtgtaggcgccgcattctccggagagggggttcttggtctcgacgacctcaacgaccacattagcagtcccaggcaactcaggcggaccagaatcgagtgtaatcctaaccgaatcaaagatctcaagtgcttgaagcttcgcattggccattccagcagcctcgagcagctcttgcatagtgccagcgttcttgataccttccacttcagcctcgatcagatagtccttggtcttagaattacctttgatgataacatcatgaaccctcaaaggaacttgtccggtggacattcgatgcattaggttttcaagcttggacttctctgaacgcaaccggtctgcctgggattggggcttctttggtggctcttcttcttcctcctcttcttcatcgttatcatcctcgtcgtcttcttcatctgcggcatcgtattcatcatcttcggaatcgtcgccattggagaatgggccatggtcttcgtggtccttagggttgagagtgttgagaccctgtttgtcttcgttggggtttgccatagccagggttagagcggcggtggttgtgagtttttttttttcagacaggacaatcgggcagacgtgaatgctcagcaaaaaaaatacctgtaattatttacaaaagattaattccacagttttatttatttattttattttttattattattattattattattattttttgagaaagaattacacagtttgtttggatagaaataattgcacagtaaataaaacaaaactaaaatatttaaaataaaattggattttttttggttgttgtttatatgccaaataaaaattaagcatatagt

SEQ ID NO: 19349 - DNA, 2054 bp, Cannabis sativa
  modified_base (1360)..(1382): a, c, t, g, unknown or other
  modified_base (1688)..(1689): a, c, t, g, unknown or other
atatcctcaatttctagtgaaatcgctatagatgatatgcaacaagaaacaatgatttccaaggtgaataattattctaaatttttaattaattcaatttatgtttttttaaaaaatacttttgtaatacaatttcaattttaagaacatattcaaatagttgcaaatttttgaaatccaactatatacaatactcaaggtaattatttattgtaaattcatttgttatttatttaagaaaaattcaataccaatagaaaatttatgtatcacattaattctttttgtatatgtaacttctacaatattaaatcaaggaacacaacatcaagaaacatcccactaaataaatttttataatccagctaaatacaatactcaaagtaattacaaattgtgtaatttattttatattatttatttaagaaaaaaatataccaatagaaaatttgtttataatattcttgttctatgcaacttctacgatattgaatcaagaaacttctagccaaaatatctaccaccaagatccaaatgtgcgtgataatcatactagcaacatataagaatatagaatgtactaaaagtctgaaacacatatttataatgatttaatattttgctaaaatagttttatgtttatttttaaaattataaaattatcgtatttatatttcttttagtagaaaacacttaacacttaatacattttttttaaatgatatttatacatttaaatgcattatattttaaatatttgttgatgaattgatatttgatgctattataatttacttgttagtcagcattataatttactttttattaatacaaagttgttcttgtctttttctttcagctaaataaatatgagttacacagtttcatatctcactttacttttttattttattttttgatttgatggctagaaaatgaatgtgagttaaattacaaaattagaacagtataacaaaaattgaaaacaaaacaaaataataataaaaaaagaaaacacaaagaataaaatattattagaaaagtatagaagcaaatagcaaaatttaaaagaatattctttatatataatatataaaaaaaaagtaaataaaagtttgttgtaagttctcaacataaagaaaagcgcgtgatttaaaaaaagtggtgggaaagtagtggggtcttacaacatttaataaataagaaatattaattaaataatgtcaaagaaatgacacatatacagccacctagggaggtgtccggcacctgcaccagaggtgccgagcagcaatacttcaaaattatatatactactattaaattatatatacttaccaaaaaatttatatataataannnnnnnnnnnnnnnnnnnnnnnaataaatgatatattatagacaatgaaaattatgtatcatacaacaaaacatatatacctacaataaaaaactaaaataaaataatataatattattaaaaacaattgtatatactatattaacaaaattatatacaaccataaaataagtatattatacttacaaaattatatataacctttatatataataaaataaaattaaacatgatccaaaatataataatatactatacaataaaacttatatatcattttataaaaaatatataccttataaccgaaatatatataataacaataaannaaaataaaaatatataagatgctaatgtcaacaaaagtacaataaaaaatagaacttaaatattattttaaaaaaataatatatcgtacaataaataatacatataccgttcacaaaaacatatataccgacaataataataaaaaaaatatttattactaatatatatatactatactaacccaataatatactacaattgaaatatatatacaatgacaataaaattatatgtcaccattgtatataataaaatagaaactaattaaatattagagaaacgattcagtcacgcttattaaggagagtaacatgttactctcttttgatcataacgattgagtgttgtataattatatccaatg

SEQ ID NO: 19350 - DNA, 4141 bp, Cannabis sativa
ggcataaaacccaacaccaatatatgcaagctcccacctctgaacattggggagcctgcaaaagagttttcagatacttggctggctcaattgattctggtttagtcttcaaaccagctcacagattggaccactgcctattctgatattgattgggcagggtacttagatgatagaagatctacatatggctactgcatttttcttgggggaaacataattagttggtgttcaaagaagcaaactgtagtagctagatcgagtatagaatctgagtatagagccattgctttggctacctcagaaatcatgtggattcaatctgttctctctgaaatcagtattccaactcctcaatctccaatactctggtgtgacaatctcggagcagcttccttagcctctaatcatgtgtttcatgctcgaacaaaacacattgaagttgacatgtattttgttcgagacaggatcttggcaaagcaacttgacatttgatatgtggaaacacaaaatcagattgtagacctgtttacaaagcctctaccagcaatgtcctttcagttcttttttaacaagttgatactcagcaatgatcagtatcacttaaggggggatgttagaactaaaaatgattaggttacattgctttactgtacactaagttagttaggtctgctaatgagttagttattttgcttcctttattttcggttgtcaatcattgtaatcagttggatcttttgtctatataaataagaccttctctgccaactgagttcagttgagcttttcacttttcatttcatcttcgtcctccattgtttcttttctttcctcaatcttgagtactgagtttcagtactcttacttaactagtaaacatcctgcgcttcgcggcggatgtataaaataatttaaattatatataaaaaataaattttgtattttaattaataataattacttactaaaattatattaaaattttatataactagtatataatacgatgtaatagtaatacggaatactaaatgaaccctaaatgataaaaaaaacaataaataaaaatgaaatagaaaatgagttgctattttgttctaaatggtaaattagttataatagtatttgaaaaaacgtgtaaaggattagaataaaaaaaattagtaagttaaagtggttacaagctgccacatacactgaatttaatgcacttaaaatgctaattaaatgatagaaatcaaaacaaaacactaattaaataagggaaaaattaataaaaactaattaaatttgaaaaatgaagggaatagagattagaagataaactcactataaactaccaaatgaaaaattttgtgtatattgtttttaaattggggtatgaatatttggttatatatacatatacataccagggaactaaacccgctacatatagttgttcttgtaaaatttgttatacctcaattgtatttagttggttgtttatatagcttctttataaaatgtagtgtttattcataagaatagatataagttaatggtactatattgttccaatcttgaaatcaacaattctaattattcttcgttgttgttttacaaattatatgtctattaatatgtgtgtgtgtgtctatatttaaatggaaaaaaatacattttgtgggtattagtgtgtaaaaagaaattgtgtataaagaaaagacaaaacaattttacacataagtctctagttaagtgtgtacaaggaaaagacagacaaaaagcctaaattaattcatggtttttttagtcctgtatttaagctgtaaaaattttcaacttctctgactagtagggagtaaaatagctttaattatacttgtaaaagtgcttgcaaccaagatcaactgacagattctactacagtgcggtattccatttctgttatagaccttatgccattttcatcaggaaccacctcttcttccataccctctttcggagggaagccacgcactcgcccaagggcccattggtctatgaccccacaatcaattgcatacctgattgtgcgttctaagtatcctttatcagtaattctatctggttggacactcaacattctcaagaaagctgcaaacaagtgacaatgagattaagtatctttctatagttttcatatcataaataaatgctgtgctactcatttttttaactatttccaactatatatttagtcatcaaaaccacaaacaagaacaaccataaatacaactgaaagtaataattcttatagtacctgcaacaatgccatctccagatgctgacatatcaccagtaaaaggagtaagaagagggtcttccatcccattaatggcaccgttgtgctctgcagtgtagtagtggatcttggaagtcccgtttgtcacaaacaataccttgagattttcatgccaaagtggtgcaacaacttctggtttgtaatgagcaaatttagatttagcattgtttttggtgtcgaattcctctaagggtgttatctcgcatagaaattcaagttcttgcttcgtaacttcaataatatctgcaagattccacacttgttgtatgaaattcttggcttcttcactagagtgccaaaggggcaatggaagatttacgtcatagaatataactcctcctaatttctttgaaatcttaattgcttgcaatgtagttgatctcatgttaggatcgagcaaggaatgtgtgctgacatagaacatctttgcctgcacaatatgttgtcaaaagtcagagaaatcatagggaaataaactctgtaaagcgaatgaaatttaaaaataaaataaaacaaaactagccacatcaactaaaattggaaagtatttacatgtaaaaaagaaactccagtcttttggaagatcatgagacaaataaaaaaatggataactatgagaaacagttattttgcaattcaattgtacggatcatggataaattaaatcctgaatgatctagttagagcacatatatgtcagataattccaaattccaagttcaattcccagccccgaataagaagaacagaaacaccagacaattggaagcagttatgaggcaagaaccaaattcttaaaatcttttacctccttcagaacatcaatattgatttcagtctttgataaaaaatcctctgcacaaggtttaacattagtcattctcaaacggcctcttttgctaattttcatatgcgatattgcagttggccgtttactatcaatacagaccgacctggtttgtacattgttggcattcatataacacaacatagcctcaccatagtcatcactaccaagtttccccatgaaagcaactttaccacctaagctagcaagagcaatcgcaacacttcctgcagatccccctggagcccttacaaatttttcaggagcccaaaaggcttgattcattctttcgtgtacttcataatctataagtctgttggctggtcttcctgccggcacaaaagcatgttgtgcagctccaaagcaacaaacaagaggtggccaaccataagtgaagctaatatcctctccctcatcaattttcaactcttcctcactttcatcctcaacatttgcaatgaaggttgactcctcagactcactcatttctgagtcactaaccaaatcatcattatcagaatcatctttctgcttaatcttcctcctcctccttaccttcttctcagttatcacatcctccgagctactagtagcagaagaagctggaaacaattatgctaatatatttaatgctgaccaatcgaggttgaccaaaacacataggtacttaaaaagcaagagttgcacaaaacaaaaagcaataccttacacttatgttttttggtctgaatagaatgtataacaattaaaaagattatgtatatagagaggggggatttcttcccacccaaacaaagctcattctctaccctaagggcaccaacgcttagccaatccacagttacttaaacaagcaagagtagcacaaaacagaagacagtacctttctttcgagtcttccttggagacttcttagtgtccttactagacgcagaaactacgttatcaacactctctccatcact

SEQ ID NO: 19351 - DNA, 8040 bp, Cannabis sativa
  modified_base (59)..(59): a, c, t, g, unknown or other
  modified_base (4150)..(4152): a, c, t, g, unknown or other
aaattttattccattcctattcctattcccattctcattcctattcttatattttcatncctcccaaccaaacgcctccttacttcaggccaactccattgagaaagttactatgatatcaagcacccaaagttgtcttcgtaaagccaatcacccaaaatatactcaatgttcttaaaaacataacaagtagaaaaaatgtaacacaactaataacatagtaaaaagaggatttcctcaagttgtgatgaagcattaggatgagattttctcaagcaatatgaagtttctaaggtgaatcaaagttccactaacgttttaaagagcttaggatgaggtcttacataatttaatttaataatttttttaaaattattctaatttccattttattttagtgaatgggccattaatgtgaaagaaaaacattaaggactaaaatgcaaacattttgacactttattgccacaaacacaaaccctaaaaatgaagagtagaagaaatggaagaaaagaaattggagtgatttgagttttcttgtgcaaagggaaaacaactacccacacttaaaagagtcgattcttccctcacttcttcgttctcacccaaaaattgttctttcttcatctctcgaggtatggatctcttactctgcttttctctttcatctatattctatatcataatctatacaccattacacttttattagggttttctgtgattttttgttctttcgtttatatctcagaaattataatcaactatctattttccatgaaagataataaattgatgaactgggaatttgcttttgttattgtaaacgccgaatcacttagatctgatttgcattgagagttcaaaatgtgttttttatttaaaatccaaatggttcaattatatataaagagggatatttgtcaatggtgagtgttaggttctgttgagcaaagggaaaagagctctagacttctgagccttatttttttttcacctggactcatttactaacttttgcactttgagccccaaaccccattgctactcggaatcaatcctcttggtatttctccgagtttcgcagcttctcttctggggtagggactctgtgtgtattatttgagatcatctgagaaagttttattcttttcttcaattctataaatgggtttcaagtttttgatcgaaaagatttaggcataggcggatttgggttcctgactatttttctcaccatttgattattattgttttcgttgggagttgtggagatgaatttatgcttatttgtttacaaaaattgaattgtcttttgcagtgggaagctagtaatttgctgaagctgttttattttgggtttcacctgagattttggaaaatgagtgtaagtttatattttcaatcagtagtgtttcatagctggtattgtcaatgtgatcctttgtattagctccttgacctcattgtgcttatgtatgcagtctgtcgaattgaaccacgccaaccttatgagctctgattctcagaggacacagtaatttttcttttcacttgaatctaccttggttgtatatatttaagtatgtgtgtacaaatgtatcttagggcttaaaatgtttttttttttcgtacttgttatgttttaggtatccatacgtgacgggcacatctgtggttgctctcaaatacaaagatggtgttttaatggcttctgatatgggaggttagtttgacctttcttccatattttatataagtttcttattctatttatgtttatggtctccacttgagataggaggtcaaatattgttaaattttaactttttgatattggtaatagttaatttatttcttctttcttttttttattattgaaatattctgtcttcaagcttgaggagcattagtaaggattgaatgttgatgctaagtctgtttatagtcatgcaagcacattataagtcagttgtggttgggttcattttgtgtcattgtttcggacaggttcatatgggtctacactgcgatacaagagcgtggagcgaatcaagcctattggaaagcattctctacttggggctagtggagaaataagtgattttcaggagctaatgcgtactcttgatgaactcgtgtaagctttagtttttgaacaatagaacaataataaataatttagttacaagctaaaaacatttttctcttctatttgagttttgcttatctttacttcctgaagctaattttcttgctagtattattgctgtcttagtaagtttttcattcctggttctgattgtagcctatacgacaacatgtgggatgatggaaactcattgggacctaaagaggttcataactatctgaccagagttatgtacaaccgacgcaataagttcaatcctctttggaattcacttgtccttggtggagtgaaaaatggacaaaagtaccttgggacagtaagcttctattgattactttttctttcatgttcagttgcaaactatgtgcatgtactaagctgcactttttagttttttcaatcgagtaagaaggatcacttgtctcacggatcatttgtctgctttataatttctatacaattaggtaagcatgatcggtgttcattttgaggataatcatgtggctactggatttggaaatcatcttgcacggccaattcttcgtgaggagtggcatgaaaatttgagctttgaggatggtgtgaagatactggagaaatgcatgcgtgttctcctttatcgtgataggtctgctatcaacaagcttcaggtcagtttttcttgcaatgtgtatttttcactctgcaactcccagtggctgataattctcttcttctccctttagttttcatatttttcaactaacataactgtttgtaatatcaatgtcaatgtctgatttgaagcattttggatttggcatatactatatatgaattgacacatttcccatatacaattgcagatagctaagatcaccgacgaaggtgtaacaatctctcagccttactcgttgaagactttctggggattctccgcctacctcaatccaacagcgggtgctgaaggatcatggtagatgtgtggctgaacatctttctagagttcgttatctgaattcagatggggtaattgaacatgaaaattgtgtcaactagagtacaagtttaaattctatgcccaactagtatataagttttaagttcaatgtgctattcgttcgttggctcttgtgaaattttatggctgttgaatcactacaagtttaaaactcgcagcacatcagttcctagttggcgcttgatagaaacgatgacttttccgatttacccctgcaatttgtctccttttatgatgtttcaccaaccagataaatttcttcttactaatcaagtattaacgttttttgactgagcaaaaaaatttgataatatgtccatctatagtcatttgagcttgcttggaagggtgtatgaagctctgatggttagtaccatagaaatgaagatttaactcactttttatattacgagtttttctagtgtaatttgggtaaaataaaaagctgaatttcatctctttttgtaattaatgtgaataaaactataaaacatcaatatattagcatagtagatgatcatgataccacctcaaaatcaagtttccttgtgagacaatcttcttgggttcttgcaacctttcccaacctaatctatctagatacatttaaattgctaatatatacttaagttataattttaaaatttttgtagctacgtgaattttacatgttaattaaattgtcatgtgataatttttgattgatttaagtgattaatatctttttttttaaaaaaaaaatagtttaaatatactattaaaaaataacacgtgtataatgactttaactgtcattgctaaaaattaaatttagttatttatttacaactagaaattaaacttaagtatttatgccgtaaattactttatataatgtataattttttttttttgagataaaatatcaacttcattgaataaattagcattctgaatgcaaaagatataagagttcaccagaaataaaaatatcaaaaatgctacgatcagattgatannnagaatgtctagcaacataatgtgctactcgatttgttgatcatctaatgaaaaattaacatctggaagggtagataacaacagttggcagtctttgattaaaaggccgaaagtggacttcatttcttggttgcttaatagcttgtacagaaacaagactgcacgtcttaatttgaacatgttgccaattattagtctagctgagggcttctttaatgtaataatgtataattaataattaattaaaagaaatattttcctgaatacatttcacatttcattacattctcatgattacaatgttaattcaaataaggcaataataaataatttccattacaattcttattcacttctattatgattactactattattatcattctagtatgctaaaccaaattctaccttaaggctcgaggaaaataagtgagctcaattatgtgaggaggactagaaaatagaaggtaaaataaatttttcattttttctatgccaaataaatacgagaaattgcttctttttttttttccacacaaaaatttaaagctctttattgattattttttggagggtaaatttaaaaggagataaatgtaaaatattggcaattatgatttaatttattttcctttaaatttctataaaagaaaaatgtaagtccaaataattaaaattaaaaaaagaatggagcttttatatttttacacttcaaattagttttttttttttacatttttatgaaattttacatgagttatgtgacaaaattaagtatataaattgtctggtcaggagaaagtctgttaaatattttctgggtttctgtcagttttgctcagaactgtcttcttcaatggccactcttaacatttcaaccagaatgtctctcctcaaaccaaccacccctgattttctaccttcttccaacaccctaacccacttccttgcatttcaatccagacccagaaacattcgtccgccccacaacaagaaccataaccatgcatcattcactgttcgatccatgaccatagccgaggagaaacacaaaggccacctcaactcctccaatggccctctgaatagccctgtatgtttactttcctttctgggttttgttttttctgtttgattggttctttgacttttgtcattcctttcgtttttggaattgttaattttcactctatttggggttttgttatgttatgaggaaatgttttatatatggtaattgtacaattctaagggattgttagaaggtttcatggttatttatgctttgatttgtcgttttggtaattcttaggctatgttatgtttgttttaaggtaattgtaatcttaatgaattcaccattataatttcatttcattgtttgatttggttttgaaaacattataatgtctttacactgtaatcactattacaccattcatataaaaataaaattacattaccaaaataattattacaatccaaaatgaaccaaacgccacagtttttggaaaagaatatgcaaaacgtgaagtaatgattaattatgtttcttgtttttcaggaaaagtactctctttatgatgatcagtccattgattattactcaatgggccaagcaagggtgactccaaatagtagaagaaaaactaagatagtttgtacaattggcccctccacaagcacacgtgagatgatatggaaactagctgaaactgggatgaatgtggctcgtttaaatatgtctcatggggaccattcatcacaccagaaaaccattgatcttgttaaagagtacaactctcagtttgatgacaaggttgttgccataatgctggacactaaggtttgttgccccctatctatataattaaggctaattaggattattttcaactgaagcagtttgacatgtatcaaatcgtgccttgagtttttcaggccgttaatttttttttccaaattattgaaatttttggatttaaagaactctgtccaatttggcaactattgcccaagtaccgatcatgtcccccgaatttctgttcatgttagatgtctgttagtaaagttgaatgaaattggatagaagtccttaaatctaacaatatcttaatagttttggggagtctgaaaagttcggggagaaaaatcctaattagcttgtaatttttgttcagaaatacagaacagctgttcatataaagcatatgatttattgtcttaacaatgataaatgtgataagttgttagaattaatttcttttctgcttgctatcatttcttttactcttatcatctgaatccgattcttgcttcagttgctatgatagagtgcacccttttctgtattcacatagtgtgcagtgtcgtaaatgctgaaactatgattggagtgacagttgaaaccattgtgccttttatgattaacttctttttaagattagtgtgtctttaattcaagagagtctcatcctcatttatttttatctttttttgtacatgcttgtgaagttgtaatgaatacaagatagtctgagacaaccaacttcttcttgcaggggcctgaggtccgaagtggagatttacctcaacctattatgcttaaagaaggacaagaatttaattttacaattaaaagaggagtcagtacagaaaacactgtcagcgtgaattacgacgactttgtgaccgatgtggaggttggagacatactactggttgatggtaattagataccccctattctgtgttctaggttggtggatcagtgatccagtaaatggttcttctgtagcatgtaagattttaaaaaatatactttagatgtgaataaatagacaagataggcatattaatttgtgtaattggttgaactgggtctggtttttggaacatttctcttgtttgtatgtcctatttttcacttacttcccttaaataggaaactctgtactagaggccttaactagtttttataatgacattgctttcttagcctcaagtttggttggaacaagtgtttcttaggcaaggacaaagctacaaaattgccaattcgccatagtaagttgagagtgtttttgttgtcatatgtggaattaactgttgcactgctcaagcaaaaaatggaaactagtgttgtttctatgcaactactgtactttcttttcaaatggttgcatgtttcattttttttccattcatcaatattaagcttagttagcctttatttattgggtatttgattgagttacagtaaacattatttgagagcagatacaagaaatatcatttttattattattacttataaaaatttgacattttcctattgtgttaggtggaatgatgtctttagttgttaagtcgaagacacatgatactgttaaatgtgaagtagttgatggcggagaattaaaatcaaggcgtcatttaaatgttcgtggcaaaagtgcaactcttccttcaattacaggtaacaaggagtattaggtgctgatatgaagatttttatatactttcttttggtatactaaatggggttagtaaatcaagtacatgatctgttgtatctgtttattttacagataaagactgggaggatatcaagtttggagtggacaaccaagttgatttctatgctgtctcttttgttaaagatgctaaagtagttcatgagttgaaagattatctcaaaagtaaaatattatttctctgcttatcgagatcatcttaacagttattcgacttcagttacttgtttagaactaaatttttgaaaactccttttgtaggttgcaatgcagacattcatgtgattgtgaaaattgaaagtgcagactctatcccaaatcttcatacaattattcctgcatctgatggggtt

SEQ ID NO: 19352 - DNA, 6868 bp, Cannabis sativa
actaatgtgtataaatataattgtgtattattaatacagtgcaatacaatactgccggtcccccaaagtgaaattacatcccatcatcatctatcctcatacataagtgtaattaattcaacttaaatattgcttttaattttctttgagctcacttttgtgaaatccaaacaccaattactcctccatccaattctgacctgctgacacatattgagttttaattatgagtttgtaacttaagcttttccatttcattgctttagtttggttaattggtttagtactatttacatttgaatgataaccctttaataactttttttcccctaaagcattgctgaagtttttatataattcaatcaatggcacttaacttataaaacaatcttaaattaacttgacctctaattcagaaattttgttatttaacatggcagcttctctcaaacggtcaatgcaatagtaattaaaacatttggaaatagaaaaagaaagaaataaaaagtggaaagtaacattatttaactaatgtagtcacatgtccttggacaaaaagaaaagaaaatggtattattccaaagaacaatactaatttagaataatgtctttactttgaatttaatcactttttatgttaatgttaggcatctcctcacattgcaaaaacaacaaaaacaagtcacaaccaaacattgtaatactgaggtagctgcaggcaaaaagggcaggatttgttgtagctaatgctaattagagtggttagtacttttcttcttctttctaataataagataatcaaattaattacggtctgatcaacgaaactaattaagccggctaatgaagattattgaaaacaaaatggccggcaaataaataatccaggtgatcatcatgagaagttttgtcaaagctgtgcctagttttggtggaccttgttaaactaaacataaactaacatccaaaacacaccttgtcttataataacaaagcatccacaaaccctcacagcttgtatttatgtaccaattgattatttaatttttatcatgagcttaatgattcttttaactaatttaagaagataccatactataattaataattaacaataactattgtaggctcttttactctggaaacttcttgtttagatttatatggtcatgtctacactatgttcttttcaccccctttaaatattggaaaacaagattaaatgaaaaatatttcaggaaaaaagaaaaaaaaaagattaaatgaaaaatatttcaacactaaattcattattttcttagtacctaattcccatctacagtgatttttctttattaaaacttatcactactaattaattactagggccagaaagcttcatcagtatgcaacataataaaaatgcctttttttcttcaataatataaatatatatatattttatataattatattatatatattatggttgaataggatatgttgggctgccagccaaatatgctagccaagactgtgaaaggttactaacctgcccaattggctttccataggcaaagtgaaaagtttcattagagcctccctaatcatcattaaatatttattttattcaagtccatgataaaagattatagctggaccatattggatcttggagaaaattaagatgattttttttaacaagtggaaattttggtgaattgtagagacaatccaagaaagagtcatatacatattataatgtaatgtaaatgtaatggtaagcactaagaaatcaaatgaaagatgccaagaattagcttcactatgttgccaaaaataaataatgagaatttggatgagagagagagagagagcttgtattcatgggagcttctcattgggctgaaaattgctcacaacaagtagttgatacccaatatacatcacccaccaatcacacttcacagcacatcaaaaaagttttattgatacttaaattactaaattgcccttggactttcatccaaaaatgaccaaacccctctgcatgctgctatatgctttggtttgtaaccaaaggaactagataaagggggattgcaactactagagaaccaactctaaaatatcttctaaaaactactaagcaacttacttacattagtaattgttaaaaaggaaaaaaaggtgagtgtttttgaaggtcatatcatatcatatcatattacataaataattaaataaataaatatatacaaaaaccaaaaatcgaaaagaataacggccggagagtggaacctttcacttgggttagtgagagagagagaaattccttaatagcaagacaaaggaaggaatagttaaggaaaggcagttagcttaagtagaagttctctctcagccattgggatgctcatttggacaaaatctcagccgttggattaaggatggcgtagtatactcagttgagtacacgtgctgctctctctctctctctctctctctctcttttatctttgcttccatgcatggatttctcctccaaatatagtcaagtcctgaaagagagaaagtagtgaaagagagagaaaaagaaaaaaaaaagaagagagaaacaaacgcttgctcactcacttttaattctctctctttttatttttggcttcgttcatctccacttcataattactaaacaaaggtacaacagaatttttttcttctttacatattgttttctgcaccaaatttgagctaagagataaacaaagaggtactacttgtagtagtagtagtaatactagtacttgtagcagtagtagtgaatgagaaaagaagttaagtgacatattttactataactactcttttttctttttcattttctctctgcatcagatcttttttttgtgcttcataattccatgaaatctgagattggttttgctctttatagtccaatgagtaaagggtatccgtgatctgattcgatttttctcttgaagctttgagctttgctctttcatattctgatctgggttctcttgtttttttgttattttttttcctttttcttttctgagatcctctgtttcatcagaatttcgacttgtcttagtgtaatgagatcagggactcgaagcattgtagtctgactctgatctctttatctctctctttgttctttatctgtttggtaaattgtctttgaaaaccgaaaaaaaaaactgtaatcaattcaatggaagatggtcgagaattgaaacatgcctgtaaattctgccacaagagttttccttgtggaagatccttaggtggtcacatgaggtctcacttgaccaacaatcaagcagaaactgatgagaagctcaacagtaacagaagcaagctctcgtctgtcaacaatggaggaggtggaaacaataccaaaaccaataaacctggctgctctgaaaccggtggtggtggtcctcatcaccttaattatggccttagagagaatcctaagaagacatggagaatttcggattcgagtactgaagagacactggtttttgaaaacaagtcctgcaaagaatgtggcaaaggatttcagtcctggaaagctctttttggccacatgaaacaacactcggagaaagaaagaggttcttccattaataataacaataacaattttagtttggaggaacaagattcatggactagtggtgaccagaagcagctgctggccatggatagccaatctgataatgaaaccacagctactcatcccaataggaaaagaagatctcagagaagaacaaggtacatgggaacaaccaactcttcttctttctctgttgttaacaatggttcttcttctgtttctgagattgaacaagagcaagaggaagtggctatgtgtttaatgatgctgtcaagggatgtaaacaataaccattgggtggggggcttcaaatcagtagctgagtcctctgacaacttttctgaatcctcaaaatctccatcttctagaactgtttgcaagactcctgctactaatggctctgaggttcggaaatcgaggaaacgcaatgccaggaccagtgagccagccaagatggattctggggttatgaaatcttgttctaggatgaatgcgagtgaagttaaagacaagatcaagatgaagcttaagagtgatgagactgagttagctcaattgggttccaagaagtacttgaattcaaccaagagaagtcttaatttcgatcattatgatcctaacttgagagtagattctttgaaaaagttaagtcctgatgtttcagatcctgagatgtttaagatttctcataagaggagtaaatttgagtgtaccacatgtaacaaagtcttttattcttaccaagctcttggaggtcatagagctagccataagaaaagtaaaggttgcttcgcttcaatcattgatagctgtgaaaacagcattgaaactgataatatctctccagaaccaacagcagaagatgatcatgatcatgatcatgatgacaagagccttattgatgatcaccataatatgcctgctggtgatgataaaaaagcccagagagaagtagttgagaaaattaaagtgtccaagaagagtagtaaaggtcatgaatgcccaatttgcttcaaggtgttttcctcaggccaagccttgggtggtcacaagagatcccacttgatcaatagttcttcagatgccaaaagcagccaaaccattgtgatcaaaaagccaattccgggtatccgggacttccttgatttgaatcttcctgctcctgatgaagaagacagcaatggacatgttgcctccctaaagccatggtggggtggaagcagccacaaacatgaggcttttgtgggtctaatatcaaactgagtttgtcccctttttttggtccctcccatggattttcaataaaataaaaagaaaaaaaagaggttcaaaacagtgtacagacatactatttctggacattatttcattgattcttttgcagattcaacaactagctgaggtgctgcttctcatagccttcaattaggccattgtcaactttcatatcacaagttttttttttatctttctttctttttttgctggttattatacttgtaaacacccagtaaaagaattcattctcagtagtttttgtttcattttgaaacttgaaaaacactgtagcagcacaattgatattctttttatcagaaagatgtactttcttttacaatacatacagaaaagtgatctgttggtttttgtaggctaattattttttcttggcacaaaagtgaaaatgagtgatgttttgaaaattgggttttgctatatgaagaatataaatatataaataaagaaaaggaagcaattttttaattttataatattgtagcacaagagagcatgtgaactgaaggtggttgtttagtcacctaccattaaacatgacaacctatctcacttcatctttcttagtagtacttggtattgaagtgggtgctatgctattagtcattttggctaaatcttattgctaagtgtgaaaaccataattgatactttagaaagagagaatggaccacaagtactttacccccatcttattatcagattaactatcaatatggtatggcaatagtatctttgatagttcattatttttagatatctcatttttttgaaggtgcttttgttagtattacttgaccactaataaagaatacaacagaaggatatgagtatgggatagagttgtatactcttctctagctcacataaaggggcttttcggtcatcaagagagttgtagtgcaagtgaaggtgtggagctcttaaaaagagaaaataataagatatttattattaaatctcgaggactttccttctaagtccaaagtcaaattcggacaagttgagtaatgatatgttttgttaattgttattgtccatcctttttttttttgatggaagaagtggagcaaatatatgtaggtgttttcataaaataaaataaggaaaagaaaaagtaaagataaaataattataataatagtttcaaaaatatataataatacgataacaataataataataatacttgatcacaaaatatagtcaacactaagacaatgtcaagtagatcctaggaaatgggttttagttttggaccaggctatatgaatctcaactcatcactataaaatggggttagttttccactttgaatctcaccacaataagtgatcaaatcaatagacttggtttctaccacatttctcaccttttaatcgtgatattttctcaaatagaaaaggaataaacttacaatcttttttccaaattaaaatattcatttgcatgcttaagaaaagtgtttgctgtgagaaaacttaaaggttttatttaattatttgatacataaacaagattttaagtagcaactaatcaatggtaagtttgaattagatggcctactacatatacatgactacatgaaaatgacccacctctactctacacatagtatagtagggcaaatctttttttagtccccttccttaccaactcaaaattaaactgaactagtaataaatttgtattaatttttttttttaaaggaattctatagtgggtgccgtggccacattgttttttagggaaatttgaaattccatgcttaataaaccctaatattatttccctaaacctatatgttttaccatagctaatatatgactacatttcctttatccccataataccctctccaattacaactactcactccaaccctctcttctcatcaatttcacaccctttcccacccgaattcctatcttccaccaccaccaa

SEQ ID NO: 19353 - DNA, 3878 bp, Cannabis sativa
  modified_base (1778)..(1784): a, c, t, g, unknown or other
gtgtaagtatattttgcatgatgcaaaatatgctagcatatttttagtggataaattaattttaagcctataatatcaaattttccttttattttaattttttttggtcaaacaatctaaaaattagacgattgattatttatttcgattttttatttctaattaaagttgtatatctaattagaagatgttcccattgaattacaaatttaattgatacatagttatagcaaaatacgttaaaaaatataatataaaaaaattcatccatttgaactacgaacagactaagagtgcttaaaaaattgaaaaacaaactaataatataattattaattatttactaaaatttttagaaactaataaaatataataaaacttaaaagaaaaaaaattataaacaaagaatgaaactaatttttttaagtagttagggcgttaacaagtcttaatccacgaattaatattattacgatatgactggaaaaactttatgatttacacaaccctagaatttatctgagcactcaaagattgagcttctaactatttgcatgaatgtgttttcctacatttatagtgctagaattcttgtccctaatggggtaaatataaatattataatgacatttgggccgatttggcgaggcccaacccgtgaggctttaatgcttggtcgtccatcattattttttcatattgggaagatatgatcctcgaacgagatcatgcgaattaagttataatatcgcgagatggggtgattaatgagtatgataatgagctggatgtctggatgctggctgattacttcttcaaacgctctgacagaggtcatttggatacacgttgtgctggagggctatctcgcctgaacgagtcatttgtccaacatctagaagacatgacttcgctaatggacctagtccattatcttgtttgggcttacttttgggcttgaagtaattgagctgtaccgcttttcaaattacaatgtccaatttcaaaaacatggataacatttatctccaagttttcagaactctaggggttatacaatcttgcatacttcctcccagatgatgtgaggacatttggaggcgaaaatgaggaacctttttgaattccaaacaaaactatttgtggttgacaacttcttattttttgaaatgaagaaacatatggcattatgtctttgtctcgtggagattactttcccaaatggagcgtgtgcaacatggctttgcgaaatgatggttggttattaggtcagcatgagtcttgaggaaaatatatcatcatttagatatcttggtttcaagcatcgcattaaatgcatgaccgacaactttctcgaactgttggatatatcttgtgttttcttagacataatcatggtcattgatttgagctcacgcatatcgccacttttacatataagtaaggtgaaaattgctcatttaccacttttgcccaaatttcatcttgagctcaattttttagagagaacaggacgacgatcgacatctggtgaatgaaccaccatatggatcagtgacttcatcttcttctctgaattcgtgtgtgagagaacccagaagcaccacccctagacttaacttctgatttttcatcaccgtcaaaaccaatggatatccatggtctccagatcgccaccttgaaatactgtcaacgggtgcaataaaagttgtatatggaaattcagaataatctattttgaattatcaaaattgtaattatttattttgtaataaatnnnnnnnttttcaaattaattaaatagggaaaaaaaacaaaatttgtcaagagaaaagccacattccttgtgttaatttagacagagggaggcgctacatgcactgtgttcagacacagtgcatgcgccccacatagtagggtctttattagttttgtctttttgagttaattaattcaataagataaatatgtgaatttaaaaagtagttgagatattctctcaagtggttaggagattctctcattcggttataagatataaatatctataatcgaatttggttatattatttattcaaataattaaatataatttaattaatagatttgaatttaaataattaattaaataaaatctttattgagtttatttaaatatattgtataacaaagttttgaaaaagtttttgaaatagaacttttcacgtaacttttatgaaagcctaaaaagattttaccagtaaacttttttttttctctatcactaaagaataatttttgctcatgtgttgagatttaatcaagaacttcatacgattatcatactagcccgcattactccttgtatgtagtgaaaagtctgaaagatcaaggtgtaattttgtcattatcgttctaaggatacaacttgcgaaaagaatcaaggatactctaataaacatcaagaggtaaatattctttttatctatttactttcaatttaatatatatatatatatggtgatcttcgacatatgatacaatgataatcaaaaatattttaccattgcgtaccaaatttagtaccataaaactaacaattggaaccagagcagttctattataaatgatgtgtgattttttttttttatatatatatatatatatatgtaacatattgtgaatggatgatattttattgtgaatgtatgtgatgtaatgtaatacctaagataaaaaaaaaatgaattagcaaaccctaactattaattgtgtaatattgaggaattatattattatataatttattataagtgaattaatttgatatatgatatgttaagaccccgttggtgagcaaggcattttagtaatttttacctgagaagggtaaatttgtgaatttaatttaattacgtgcttatggactgtattattatatattatacttgtcttgtccttttttcatgtgtgttctgacaagtcgacgcagtatagtcacaaccgggtatttcggaccgaaccgagttcagggtcgaaatacaattttaggattatttattggcattttattaacatgtgattaatctaaatctattgaatggtgtgttatgtgataatgacatttttaccctaacttgatgcttatgtgtgaatatggccctaggggcattatggtcattttgaccctttgcattgtcttgaacaaaaaggaaattttaaataaagaaaatgaatttttcaatttatttctcatccctcttgaccgacttcccctttctttgtctcatcttttcaatctcaaaacttggaaaactcctttgagaataagcttggatttggtggcttttgtgctagagtttggaaaggatttgaggtagctctttttactgatttttttatttaaaattgttgctgaataaagttaaggaataaaattttgatcatgtttttgcttgattgcatgtatgtgggaattgacacaatcttaatgattataacatgattgtgttgctaagttgagaagtatgttcttggttgtttaagataagattttagggtattttcatgtgtggaacttgttgttatgctctgaattttattgttgaatttgagctgaaatatatggtttgatatttggattcttgagtatgaagatatgatgattttgctcaagtttggagcctatattatatattgtttaaatctaaattttgatgcatgtgagctttgattttgagctttaaatgtgtgtattagctctctgttatgatagttatattatgtgggaaatgattttgagatatatgcatgattggggtgtgtttgagtgagtttttatgcatttttcgagctgctggaatggagtttttgttggaaatttattttacaaggatctt

SEQ ID NO: 19354 - DNA, 3911 bp, Cannabis sativa
tttcttcttaaactgattgctctaataaagagtagactgaagatgacacaaatcctatgagttccatccgattaaatgtcacatttaagaaaaatggccatttttggacattacttaaataaaacttgtctctcactattaaaaaacaataaaaacggaactgttaaactagaacaaatatttacttttcgaaatctcagcctaataaaaattattttgaggaatttaaatggaatttcttgtaagccaagttcaaatcaaaaagaaaaagaaagaaaccaggagaaaataatgcagagaccaaaacaccttgtatgggtaacagttcagtagtaatactcaaccagtctaactcccgagccagaagaaatcaattataaattcctctgtaccaaagatcaattagtcctataaaattcaaattaaacataatagtcaacccaaaaaaaaaactaggcattttactctttatctccatatttttttttcccaaattgtatgcctttatgataccacaccccttgcttatgtgctactgtctacagtcataggttcaccctcactcgccccggcaggtttctgtaaaatcaaaagaaattaatagtcaattttacagtcccaagtttccaggaaatttgctaattaattgctactgcagaaaactcacattggattctcgagagtctggtttgctcatctttgcaaacatgttaccataaaacttggcttctttcttattgaactccttcattttctccttcaaagttttgtattccagtttcacatccctaccgagcagagtgagcagcaataagatgaatatgaacaccaaacacacacacacacacaccatgattgttgtaaaataaaaacgacatatacctgttgttagggtcaatctctagagctttcttaatgtcaaactcagccaagtctaagtcggccaattggatatatgcttgagcccttctgtagagagcttttacatttttactctctgcttctagtacctgaacaccaacataaagaatcattaagagaaccaacttataaaaggaaaaacacatcttccgaataaccggcgtgacaaaccttagtgcacaatttttctgcctctttgtaatctttcagcttcagcttgcaagctgcattatttagattgcatgcgactttcaatgcctttgcctgctttttctcttcgtcgctgaagttagtatcaaattcaataaatttcacagcctgcaagaaagagcacttaataaatacaggagataaggagatgaaataggtatgctagcaaattaatcatgcaactcaccttttcatatctcttggaagctctgacatatttaccagccttgaacaagatattaccttcttcctttttcttacccgcagcactaagcttctcctctgtgttcatatcccatgattccttatcctgaacaaaataaaaaccacccaaatataaatttgagacaaaaccatgggaaaattgattgttcatagatataaatcaagtgaaatgttgttgaatgatgactcaccttcacaaaggattccagctcaatctcatagtacacagtagagttgggaggtaccaccgccaactcctgcttagactctgatgaaccaaatgcatactctggtcctacagtcaagagtgctacctctccctttttcattgtcaacacagccttatcgagcccctgaataacttgctctgttcaaagaaataaatcagcacacgagtatataacaaaagacggtaataaacagagaaaccacaaaacattaccttcatctgttttgaattccaggagttcttctccatcatgtcccttctttataaatacagtaccatcttgcagtttcccaattaatttcactacagtatgcaaaaatccaaagtccagttaaataaatgtatcaacagatgaacaaagatccaaaagtccacagtccacctttaatcaatatacttacatttgacaacagctccttcatttggacgctcatagccctcaccatcagtaaggacctttttaataaccttcttgtcatcagttatttctgaaacagttttccatgataccaattctagagtaatctgaagagttgcgtttggtggaactgcaccttctcctccagctgcaggcttacccttctcaccaaacccatctgtagcaaataaccaattaattaccaaatacaactgaaaggttttatttacacatcactctaattgaaataagaaacctacattgtggcttcactgtaagaatcaccttctctcccttcttcatagtcttaacagcctttgacaacgcagggcagaagtaacctgttcaaaggaatcaacaatgtattgaattaaaagattatatatctttgaagtaagaaagttggtcactgacacacaaaaagccttaccctcatttactgtgaactcaactccatccgattttgcaacaaccttgccgtcctcaagccgagcctcaaatttaactgcatcaagatatcaaagaaaactatcattagaggccgtttagcataatatccacgccaaagattatcattggcagagatactataccaaacacttcatcagggtcttttgggttatcccatttgtctccttctgttagaatcttcttgaatattccaccatccttgcaaatgtccttgacactagtccatgaaagcaattccacatcgaattgcaatgtggcattgggaggaatagtatctggtgatccagcctcaccataagccatctcaggaggaattgtgaatagagaattttctcctttcttcatcgttttaataccttcatcccatcccttaataacttgccctgcatttttacacacaacattactcaaagagacatttctccttcaaaatatattttcactatcccaaagtttctcttcatcaatgtgagtaaaaatggtataaaactaagaaataatctgaaagcagagaaatataataagcttccacaatacgaatcagctcatttcttcctcttatcttcctaccaaaatcttatcatgttaatccaccaacaaaagggtacaaaactaaggattaatcatgtaataaatatataaaaaagaagagatttttcaccttgtccaagagtgaacttaaaaggagtccccctatcacggctcgaatcgaacttagttccatccaagagagtgccagtgtaatgaactgtaaataaaaaacacaaattaacaatcaaaattcataacaacccaatgcattagaaaatgttcaaacaaagaaaaatgaaaaaatacttcaccttcaacctcgtcaccagtctcaggggtatcccagccttcaccttccttaataagcttcttcttcaaaccttgtttaccgatctccttctcttcacctaccttgaaaatggcgtccgcaccaggcagatcaaagtcctcacccatctcttccggcggcggcatattcaaattgaagtcgtcatccattcttattgaagatgatgatgatgatgatgatgacgtgaagccctagatgaacagagcaggtagtaatttgtagagagagagaattgaagcgtgaaaatggtagtgaagctctgaagtttgaagaaagtggaaagagtttagattctagagacttctacaagcaagggtttagacattagagtgagctgaaatcaagggctgagatgattttgtttcttttctttatttggggaacactgagatcaacggttgaaatttcgtctggacgtatttcgataattaaatgccggcctagtatatttatttatttatagctgctaattaatttgttttattataagctgttatttttgttgggtagatatttatttggtgtgtttatgaactaataactactgctactttttt

SEQ ID NO: 19355 - DNA, 2899 bp, Cannabis sativa
ttttaaaaaaataaataaaaaataataatattatttacctgacgcctttccgttggagtaccacttcgagtttgttggagcaaaggcggtggtgtttcggcgggaatcaacggttgaggcggcggcggcgaagaagcaccggcagctgcctgagcggccggccaataaacccagttgttcacttgatgagtgcaattattactattattattatcgttattaaggcttgcatgttgattattactttgatcaacttgattctgattctgattgtgttgatgatgatggtggtgatggtgatgatggtgtctttggtgatgagataagagccgtctttgtctagccattctcttcttcctcgcttctttagtcgccgaagacccagacctaatcaccaccgtctgatcattattactcatgatctgatcttgatgagatgaagaagaagaagaatagtattgataagggtattgactcccgtaccctgaaaaagcttgttgaaacggcgtcgtttggagattattgttctcaggaaccgattggtggtaattagaaaattgtgaagaaggccaagtttgagaagagtcgagcatagtgttgtattcaggggtaatttggtaatttgatggagtggtaacggtgggggtattagtattacccgacccgttaataaacggatctgtacccgtgaacccgatagggaacgaaggaggaggaggaggtggtggtggtggaataacaaggggatcgtagttccaattattttgaaacgacgacgtttctttgactaaactacgtcgtttttgaagatgattagtcttaacccattcaagaacaagtttcaataactgtttcattgcttcttttccaccacccaatcgcttagccgcggcttcgattgttgattttttgatcttcacacttctcaaatcttcagccgaaactgtctctttgttattcttcaaccaatccaagaacaccatagccatatcgtctggtactgaggaagacgacgtcgtattagctaaatcttctttattactattattattattattttccaaatcaacaacctcttgatcatcatcattatcaatcatcatcatcatcatctcatgatcatgatcattattattagtactcaccaaaacgctgtcgttttcattattattattctccaaaacggtgtcgttttggaaaatagaagaagggtcaaaaaactcgttactctccaacaaatccatgtacccaaaagtctccatcatatcaacacagtcgagtaccccactaccgccggccccggcgacccctggctggtcagagaactccatcgacgccgtggaagaaagcgtcgccggctgtttgtacccgccgcctccgccgtggtgatgatcttcttcgtctgcgtctgatttcagaacggcccaagaagaagctgatgacgtggaagaagaggaagaggagcaggtgatgggtttgagagtggccgccggagtagtaatagtagtcgaggatgaggatgaagatgacgaagatgatgacgacatgcatgaaaaatcaggaagagatggaaaatcagtgtagaatatagaatcttcattaacatcaagtagatcttgatgttcatgatcttggtgatgatgatgatgaagccaaatctcttgttcccttggatccatatcttcaaaccctagccctattgaagtagtagtttcttcttgtgcatgtagtagtagatctcgataagcttgatcttggtgatgagtatgaatatcgacagtagtagtgttcttcataaacaaagaaaaaaggttttcagagagaagaaaataagaaagaaaagtatgagttgtacggataagtattgaaaaaatgaaacaataatataagcttctcttgtatcagattaaggaagcagatagatagaaatatagagatataaagagagagagtgaatatgggccctcaaaacagagtgagaagcaacataaagcatctgtggtttttgtttatttgatttttattagaaaagttattaggtctaattgagtgtggattatataatgtgttaacgtcggtatatgatgttaaatattgtttggtattttaataataatgctcaaataatctctcatatagtgctttagaagaccccatgtgtgtttctggtattatgctggagcagttttttttgttttctctattttaaagtttgagataattaagttgagaaatagttttatttttcttcttaagaaagagagaacgtgtgggttaagagagagagaagacggttttgaatagagaggagggagagagagagagagatttgaaaagaaaaaacaaaagctcgtggcgctactttctcagccttactccggattttgtgccacccgccatacgttctaatttgaatggttactataagcggtggcctcagccttaaggaacttacacgaaattacatcataatacaccaacttttctaaatattcatcaaagcctaattaagatttttgtgcctgaattttaacgtactaaattatgtttcttgaacttttaaggatattgaaaatgtttcgtgaactattgagattgttagatttaaggatttttgtctaattttattcaattttactatttcaatgattgtttatgtactaaaccatgtttcccagactttaatatctaccaaattatatcctttgaactttgacatgtactaaattatgctctctaaaatttcatccatgttagacttttttactaaaattaaaaaaactccttaaatccaacaagcattttcaatgaccttaaaagttcacgagatatgatttaataatatcaaagttgagagaaaaaatcctaatcaacctttatgaaaatacgcttaactatt

SEQ ID NO: 19356 - DNA, 3591 bp, Cannabis sativa
ttttataatgggcttcgaagtgcttgattttaagattgttaacttgccccgccaatttggtgtcttcctctttaagaatcattttgacaagctcaatctaggaggtcatggcttgattgaagtcctccctaattttttctcagacctatttagcagcatccctctccttcctggccgtatccaagtccgccagagcagcctcccattacttgattgccgcattacactccaatcaagcggtcctaagctccatatatgttttggcaatagcatctgcaattcgatgaactaagatggaaacattgaaagaagaaaagaattcacttagtcaaattatcacatgataagaaatgctacaagacatgaaagtaaaatctagaatctggtagcctagtgacagggagcttgactcaagaacattacattctcactcccagtgatggccgacctttttggtctaatctagcctatagaggtcccgacttgcttgagaagattatcagcaaagggagtaatatcgcttcacaacgtcctaatgaatacaaaggtagtagtggacttgtctagaacttttattgaaaatttgattgatgggtctcgcgctgctaactcagtgattcgtctcgaggagagtcgacaagacattaggcggatgttgctctcgcctgtcatcccatgtctagtttatcatctagttagcctcatctctaatgcagctttgtaatcatcggacattacatgcttgattgggaaagaaggagcaattggattccttttgtattcatcatcaaagtcactaggagtggtactcccagttggatctttacaagccatttttttttcactaagcttccgaagcatatagtctggccttcttggtagtatgtactgctgcgtttacagacctcttttcgaactacaggttgaattataacttcttctttgcataagtcaatgacctaatcaattcccgttgtcgtagcaggcgctgaagtaatggctaaagggacttagttgagtgggatagccaaattgatggcagttggattaataagggtgtcaatgagtgagatggctttgcctgagggggagccacttctttggccttaggctgggaactagaagctttttgagtgacccagaagccgaactcagtgtcttagtccttttcaccacgctggcccaaaaattgacagtcgtcttcactgcgtcctacactacaaaaataaaataaaggcataagtaagtaaatcatgcaagttaagtaagacatgaaaactaaatataaacaaaagtgatagatctgagaccaactctcaaagatggagctggagccttcaaaagtttccatgaaaaatccaagataccctgacagctggtaaagctatcaagttcgaggaatccatgatgatacataagtgtaaaagggtctactgagaagtacgtgtatcctatgtttatattcgagcattgttattggataccagtagtattagcaccatctagctaggagtgtcgtcttacaattggttagcgatactctctaaaagttattaaatcaaattatacagaatataatacttaattacactaatagcgatatgatacctaacaaaagtgcaagacacggatagtgcattttatcatttcttgtctatactccctaataataataatataagaaacatttcagaatcacagtaagcattgtttgtctaattaaagcacttttttgaaaatagacagaaatacaattaatatatacaacctttcacaatgagtagtttaattgtctaagtcttcattactctttaaataggtttttgtttcatgtaatctacttgattaatcgaattccacagttttaaacccaaaaagatagttaagaagtagtcccatcccataattatactcttcattctcattagtcattacggtgtaaatatattagtgtaattactaaaaagctttttatattaattattaaatattaaataatattattcttctcactaattacgccaatgccaaaaaagtctaaagacttgcatagaaatcggtaattctagccaccaaacttttgctttttctaaagagagttattttggccaaaatcaaagcgattacaaaataaaacttaaaaacattaagcattttactaagtaataaaatatcactaagactgaactataagttgtgaaataagaatcttttttacttaaaagtattatgacaacttaataatctaactctatcttaatgttgtgatatcttagacccttacataattgaattccaaccaatatagccatcacatttgccatctgagaagaccaagctccattgtcagatacgcttccgaaactatacacaactaccatcactaattgcattgttaaactaaataatagatatatattatatctaaatacgttttgtattatttaaaatatgatgcaaatattatactgtaactaatcttccaaagacgggagtgatttttcatgccatggccactatgtgaacagtatttattccaaaggaaaaagaatgttaagccgtttggcattttttgctatataaaaaccattatgtaatataattaattagtcactacgtatgtatgtatagtacacgtggttttatcaatttatagaaagctggtacgtgacatatatatatatagaaaccctactatttggtacgtatacccaatagcatagacactcattagggcatctaataataataatgaattagataataatgtatatgtaattttgaacaaaaacagggtcgcataatgaattgatttggagagcacctagagaaagacatgtcatgtcagtattgtaatcttttataaaattttctattggatttggttagttgggctatgatttttccctagccatataaatataaacaaaagggttttggccctccaaccttataattatataactgccccattcgtggggatatatattgtgtcatcaccaccagctaccaaatattttcggatctaaatccttactctcctcaaataatcttaaaaacattatccagtcatgagttttcttcgaaccacaattatatatgtttgtttttatctctattatatattattaaatatatttcaatatttctctatataaatatatattattagtacaccacaacacattaattctatgcggctttcttcaatgagatatttagaatatctttttcgtggctgtctgtctcatcttgatgataattatagacacgtacttctacaaataaatatattatatatttatatatattagatgagtttacatgtgcaattatatgtgtatagcttttttttcttatattttaatttttattttataattgatcgtgagaaaaaaaaatgtaattgacatttaatatttttaattatagtacatattctaaaatatatattgtattatcatgcaatagtaagtacaaattgaaattgaacattttaactataaatataaggtattctatataatatttagatacattttacatactgtttcttcataatttatatattggttcataatattttgtaaa

SEQ ID NO: 19357 - DNA, 4983 bp, Cannabis sativa
  modified_base (4933)..(4950): a, c, t, g, unknown or other
aatagctttttctgtttggcttggtttggcagcaccacctaacctaacatggaagaatattcaactcattcaacattcttgtcatgtatttagtagttttccagaatgagtagtaaaaaggttgattaaaggggcaaaactgccagtctatttttatgatgggacatctccttatgtattgggtggtagtgactgcagttcttgaccttgggtggagaaactaagtacatgacaccccatgttaccatctcattactaagacatactaaatcaatataatgatgcatgttattaagaattagctacgtgtatccacttttactttttgataagtaacaaagattctacattggttgctgaaaatttgaatggaaacatatgtgtgtttgtggactctagagagatagacataatagacatgacaaaactcaaaggttaggacattggagaaagggaacatgtgataaaagtgctcttgtagtggggtcagagtatacaaagcaccaaagttggatgaaacagaaagtcaagcaaatgcattgagtcttttgaactgaattgtctgagtcgaaatttaataaaatttgaccaacttattaagaataatgaaagctgaaatgttctttttcatatgcaggtggttatgggactcttgaagagttacttgaagttataacatgggctcaacttggaatccatgataaaccggtaggtttcttcttcatgtttatggtgatcaattctgtttttaaagtttatctacttcattactaacaatgtttataataatttccaggtgggactgctgaatgttgatggatattacaactctttgctatcgtttatcgataaggcagtggaagaaggattcattagtccaagtgctcgtcacataattgtctcagcacccactgcaagggagttagtgaagaatttggaggtagtttaaactctacagtaatatatcatactaacatttctgatctatttatgggttttacattgctcaatgtttttgtattttcattttcgataggaatatgtgccctgccatgaaagtgttgcttcaaagttgagctgggaaacagagcagcttggctaccctcaaacatatgctatctctaggtgatataagaaggaaggcttgccagggttgaattcaagttggggtttgggaagttggagcagttaatttggagaattattaactatcatgtgtttgtggggaatggagggtttttctttttttcttttttttttcttctctttttctttttttcccttgtaaattactgaaattaacctactacaatatgtgaaagcttcaacattccccttttgtggaagaactttggtatgtttttgatagttgtaagtaccagagaatcagagattgctgaatttatccctgaaaaaatgtcaactaatttataacagttattatctactttcctctaatttttttttcataacgttatgtttttctcccaatgaacaaaaaaagcattatacccaacttttcttcatataacaagaacagttcaaggatctaattatggctcgaatgatatctacctgtatatgattgttacctagaagaagagtttggcatcaaattgtatagcactattcataaaatgaacaataataaacatacgtaaatgcagtttggagtttttgagtgtcagatagaaaaagacagcagtcaactactaactaatgctctttcacagagacaatgttaccccatgtcttcaagtagtctcccacttcatcgaaaaggaattttaacatgtcgagacaacaaaaaaagaaaatgaacttaatttaactatacctaactataacaacttcacttattatagatcctaattataacaacatcaattattatagattttttggtaaccatccaacaattaattcccactaaatatctcttgagctaagcctttgatcggaagtgttgaacatgtccatcttccattcaagttcttataccattaaacaaaattacattgaatttgatttgagacgtggggattctaccaatcttttttgttcctgaaaatcaaaaagaaaaacaactaaaaccgcacaaaagcaaacaactgagacaagtggatattgattgaactgcaaaagggttgggtcctcatcagaatgggacaatgggggaagggggtggagaggtgttgccttgtataccgtccaacaaaagggacaatgccacgtgtcaaggaagggccatgtcagagaggaaaccaaaaaaaaaaaaagtaaagggttattactgtcgtggacatttaggacaaaaacataatttataatagcttagcttatttcttggtcccaaaaaacaaactctctttcattatagttgatttgaaccagtactccacacaggtctagaatatcaaaaaccttacaaagaaagaacactttgtgttttagatcctatcagatcagattggtcataatgtgaacagctagctattataggaggctgtgttttttatatgatgtaaatggttttgaaagaagatcaccaaaaggaataaagagctacaatttctttttcattgtcaaaaagttttaaatcacttttactgatgttgtagacagaagacataagaatttgagaaagaaaatagcccaagaataaagaaaaagaaaatcaatccctaacagaaaacaataatgtttttatatgcattaaaacgtaaatattattttggatcttctattttgcaaaagttattaatttgattttctattttgttaaatgataaaataaatcctatattttctaaaatggtaaaactagaacactaaactcaaattttaacaattttattttttaatataacacactttaagataatttctaacacgaacatatataggaaatgtatctagttttgtcataatatttttagattaaattattattaagttttattttaacaaaaaaaattagtttaggatcctatttgtacaattttaaaaaatatagagtttattttatcatttaataaaatacataatttaattaataattttaacaaaacagagagtctaaaataatatttaaggtgcattaaaatattgaattaatgtttttaacaattggtatttaattaggaacacttttattatttatgtactcacaacaaatttaatgtgctataatgtgatgaaggcataaaataacagagatagacatgtgacgatgtacaataggttcttttagcaacaaaatattcaaaaagtttttagaataagtctcataaataatactactactaataataataatattttatttgtgaaagcataataatatttataagggacataaatttaaagattttttgttatatgataaaatagaccctctgttttgtaaacgacataaacccaatgattttcttagtggtataagtaccaaatgtttataaaactgtaatttttctctattttcatcaatataagctctgttttaaatttatttaaaaaaaatttgaaagcaagtgatactacatattttcgtccaaactaaataatctagaatttgggtcttatatgtgccttgtttaagataataacagagtctgtaatgataaaactagaagaaaattacagttttataaacattgggtacttatgccgctaaaagaaatcgttgggtttatatcgcttacaaacctaaaactttaagtacttataccattgcttaccctaatatttataatacgtacattcataaattcaccttttggataagaactatttcaccataaaaattaaatattaatgcatttttataacaacaaaacatccatcaaatcattttattttaattttatcttttacttgttatgagttgcgattccacatgtccttttccctttgagaagttggtttttttttctcataaatttgtcgataaagttgccaaactaactcaatttttctttcttcttgtttttttaaataaaattcaaaattcatttagaaaaatccagtgcaagaacttaaaaattgaggacaaatatctgttcaaacacaatctcctaaactagtaatagaggttaccagtatatgggcaacaccattcgctaatcgcagaatgacactacaagaacgattaccaacaacagctaataaagaatagatatattctaaaatagactgaaaactaaaattaatgtaaaacttattaatccaaccaattatcacagtagaatcaatattaataatggagatattaaaaaaaaaaaaactgatgcgcaagaaccaagcccaaatgaatggcaagcagctctgccacattaaccgagaaattacctaacacacctgatgaccacgccaaccaaaccacaccctctgcatcccgtatcactcccccctcctcaaagttatcgaagcatccatcactagagcaaaggattcaggaggaggtggcatccatcgactaaatcagtttacaactgggtttgcaaggcccaatcccaaatgaaggcctcgccgatcataccccttaaactctaccagctcgttattgggtaagtttggaacaatatctaatcttgactgcttgttgccaaataatactgagtttttatcatgccacgaccactaaacggttgtcatcatcaattcaaaagcctcacgagatagcctctcaaagattaatagctgaatttcctgcattgtcccatatgcactcgacggagtaccaacggagcaccgaccacacccccaaccgatgccacactggaatcaaaccagaatagaaaagtagagcatgctcaggagtttcagcttcttctccacactgagaacaacaaagaggtacccgaactttttgggagataagtggtgttgctactggtaaaggccggccaactgatacacagttccttaatannnnnnnnnnnnnnnnnnttcataaatctttcttgaatattttctaatgtt

SEQ ID NO: 19358 - DNA, 6049 bp, Cannabis sativa
  modified_base (66)..(82): a, c, t, g, unknown or other
ctttatatgtgtttatttattattttagaattcatattaggatatgttaatgaaacatacatggtnnnnnnnnnnnnnnnnngtaaaatatttccaacagtaataacctactccccttttttgtattcacttttgagataataccatgcagagcataggtgaaaaccttatgatttctagttgtggttcttttcagtattacaattgtgagaacaatgtgttacaaataaggctggtgagatcttgtgaaggacttaagaagatacttgacttagtgtctaggaggcattggtgaaatgtgatgattcagagagagaggacttatggagactctttagtccatgtagaatgacttaggtttgagaaagtgatctgattccctttatatagtgtagggcttacaaaagatcctaattcaaataggtaaagatatccctttaaatagggatattaacatctttttatctattatttaaactaccaaaaaggatagttaaatccctatattatatgactaatatattaagggtatatccctatttttgtaaactgttggacctatcccgcaattcgttaacctgttcagagttgtttacacaagttgaccggccaatcctatttttagggccctactggcttgtgaccttccatgggcggtcgggtatggttcgaccagccttttccacgttgtttagatttccttgtaaaggtcgggcctccttggttgaacaggcctctttggtctaacaggcattcttggtcaacaagcttgttctcaatacctagcctacaagcttcccttggtcggccagacatgcttcctttagccggctacacatggtcggccaaggtcttaatggcctgcttaactttttttgcttggttgctttagaacccttgactactgacatgccgtgtaaggtaacttcgtcctattattaacaagttgtattccacgtgttctcagttttgactatgatgtggcatgtctcaataatctcctacttgcagtaaaagtaaatgctattaactcttatagacgtcatatttcattcaactattcaggctaagttatatgaacaagaccctccacataatgaagtttaagatcctggagaccaccacattgttattggacaaatatacagaatttaattctagtatatttaatttattcattcttttatttctttcaagttcatcattaatcatttaatattctcaatattaaatattattgtttaatcaaagaaaaaaaaaatcctaacaataaccgaaatgactataataaataagaaaattagtattgttggaagatccatcaaatcaaatggtttatgatatcatacaaagttataaataaccagaaaaagatcataactataatgatgagtacatggtttttgttagcgtgaaaataaaaataaaaccataagaatagaatgggagaaataaaagtataagaataagaaaagaataaaaatagaaattaaatagaataaaatttaaaatgtataaaaaaaattattaaattttttcttatattacatcaaaataatatctccttccatttcaaaataaaatagtcattccaccaaaatggtagaaaaaaccttctattgaaataatatgcagccaaacaaaaaaaaaaatagaatgaaaatcacttcctttccattccatttcattacctccaagtaacgccacctaatattattactatatactaaagttaagaagctacctaatacagcaagaaaatcaatcgatccctcaccccatgcaactgaaaaacaaaatgtcaaaagtatgcgacttcaacgggaagtgataaaaagattctccatcttctgccggcaaagatggtagtatatcatctctttccccccaaataatactgattcctataccctcttgaagaatgtaatgcaattcaaacctagcaaacaaacacaagggtttgatttgcttgccatcttatggctgcagctaccatcagcattacctgaaccaatttgacaaagacgaattttccctcacattggtcccctgaaaccagtaatctcaagcatatagtatcaaggatcaagtatatcgtatcattctttgaccattcttattttcttccatttaacatttagccccacttggcatcttgaaaagacttcctattctgacttttctttttgctggtcttcttcaagagcatcgacatgtgatccacatttgaggaggaggaatggttctccccctgtaaccatagcaaagcctgggaggctgcatctttctccgcaagtttcttactgctgcaaggactccccgcaaaatctaacccattgaagatgacagttgaacggaactgattatttttcaattgttttgtcttgtaagtgggtgattcatgtccagctctggctaacaatgtctgcagatgatttttggaattattaccacccgaaccattgttacttccttttacaacaggtggtatctctttttttgcctttttaggggttggtatctggcgaccaaagacgaattttccctcacattggtcccctgaaaccagtaatctcaaagcagaaaggagctcaggatgagattgtatatctagctttggatccaggagctgcatagatggaaaacatcaacacattaacgtagtgacacaaatgcaaagaaccataagaaggatatagaatagaaaaaattcagctattaattaatgctgtcacaagaggttggatgggtctgcacttttgtaagtggttcggggttcaagtccccgtgtatgtatgtacatcatataataaggagggaaaaaaaaaaaaagaattcaacataccttcatctgaataagttcatcgagctccttcttcaaatagatgtatgtttccgctagggcaggtttcataaaaaattccaagtatcctcctaacatttttagatgcccatcctattaaatcaagtgtagtattaatattgtgtatgagcaaaagaacatttaataattggagtaaatgtagaaacaaagctagggaacgtactaggccacccctagtgatgctccctccaaatagaagaagcacagaatcagagacggcagttgaatctcggaggaaaaccgagtttactttcaccttttcattgaaaactaaccatggatatggtatcttcggtaccccagcattcacagaattctatttgatggaagttcattatttaacacagaaaaataagaaattgtatcgtgtttaacagtcagtaaacacatccactcacatacaaccatatgtaagaacatcatataaaccatataattagtagaagacaacaaacttaccgaatataaaagcacttggccatcctccattgtctttagcactattgatctttctttgttctgtgaaaaataaaaaaaaaaccattatatatatgtactcccatgaagaaaacatccaccatcaaaacagatgggaaatacaaaatagtaataaaaacagtgacaatttacataaatttcattatgacaattcccaacataaaattcactttggaacttttgtgtacagtgatttaagttacataagaacaaactagaggagcgcagcaagttaaatgacaaagaaagagagacaactttattttatacactctgaacaaagccatacaagatcaaacacatgcaactcaacttaccataacagagcataacccagggaacaagcctgcacaaatgattgcacggataagatgctcatcatggctccatgtgttacagctttctctatcgcgatcaaccagaccagtatccttcagcaaataaaagaactgtttccgaagagagtcaattgcttttaaagtttgtgcagaaagaaaatttcgccagcaatactcataaccagattgctctctttcagcttctttccaaccctcataggcgcgaaccagtgccagatgatcactgtactcacgagctgagaactgagcttttgctgactctgctaactgaaaaatgtaaaaaaaaaaaaaaaaaaagaacagaagaaacaataaataaattcaaactattgtacaacagcaaatactgagttaaaaaatgtgaaaataaatcatagcattcttacatccttcttgtcaaaaggcatcaagaatggatctctggaactaaggcccgcgacaacagtcattacaggatcgagacagttaaaaatagcccctaatatgagcatctttccaagtttaggctcaactggaagcattgacaggttgcgtcctgtaaagtaccaaatcattggttttcaaaaatagaagaatagtattacaataacacagctgcaaaattaaaaggcatttgtaactgtaataacagtacaatttcctcacctaaacttgttagattttcatcttcatccaaggctccaatgatcttcaaatattcaacagcattttgaacctgcaaagagaaacagtaacgtaaattcctttgtagaagaacataagtagagatatctgaaaaaaaaaaatcaaggtaattaaatgatatacacaacagtagtgatacatgaaaaagcctcaggtattaaatctggaaaatcacaaatctagcattcaagaagctagaaaactctccaacggaatagctcaaatataatattccaagataagtttctcctcacacccacagcactataactactaacatttcccccaatcccgaggcctaaaaaattctggactaaaaccaaaaatacccctcaagcagcagaaaaagaagttcgtagtaagatataaaatgacaacagacctgcctaagtggctttacagtgaacctgataggagacatatcatttaaaaacaagaaagctgaaaatcaaactttagaaaggagatatcaagctatcttctcaacaggtggtagttctatactgaaacatactgataaaggttctggaggttgcagggccttagatagaaactcggaaatacttccaagccgtaagctcttgatttgcaaacacagcgattgcaatggcgttctcaaaagctccggtagctggtaatcagaaaacgcatcataaacacatcttggatatagatggtaacactctcctggctgaacacgaccggctcttccccttctctacaaaacagaaatattattttggtaagtttaatgttatcactatcagatattgtacaactataggaaaaacaacgaaaactcatagagaactttataaggagtaaaataacaatactagtatagtatggtagaaaaatattttttctaccataattgatagaggaaacaccgtaaagaacaattcaaaaggttttgggccgatacaatatctaattgatagaggaagcaccgtaaagatcaattcgcaagattttgggccgatacaataagaactgcttatttatatcatgatatgacataaaagttagggatcaactaaaaaatagatgaaaaacacatacagatttgagagagttgatcaatttaaattgaaagttcgatgtaaaagaaagcgctgggaaaaaaaaccaatgaaagttcctccaactgcaacattgttaaaatacatattttataatatgttacggtcataggcataacttagtcgcactacatctctcttcacaaagaggaggtcccaagttcgaattcaaaacaaaaatattatatttaatatgctgaaggtataatttgctatatcaagtattagaaaagaaaaaaccattgtttatggaatcaatcaatgcaacctcatttctgaggtcaagaaagaaaaaaccatttcattaatatattcctccccatatacactgcaccttaagtgcacagtgcactcacaaacaaacatgagcactgcaaacagataggccttagataaataaaaaagggtatatgggtcattgtaatggggtattaagatagtatatacatgagagcattagaaggtatttgggggtagagaattgtttggttaagtaagcattagctcttaggagagaactaggtttcttgaatacccaacga

SEQ ID NO: 19359 - DNA, 2800 bp, Cannabis sativa
  modified_base (48)..(64): a, c, t, g, unknown or other
aacacagtaaaaaagtaaaaaatttccgcctgacagtatttttgtaannnnnnnnnnnnnnnnngtataccatgtaaatttctctatttacaaaggatctgaggtcaaccccaatttccgacctagatcgaacttgaatctggattcaagacccaaacccgaatcctagacccaaacctgaacccgaactcgggacttgagctcgaacctcgaaccctagactcgggacccgtcactcagcccggaccctggacctcgatcttagaccccgaattcgtgacccgaacctcggatcccaaacccggaccaagaacccgaatcatattcgaacccgcacccagaccgaacaagacccatagtcgatgttggggccgaatttattgaaaatatattataactttacacaacctattaatacaagtcaatgtgaaacataatattgtattaaataatattaatataatataattcaacacaataaaatataataccatacaatacaatacaataatttaataatataatatagcataccgaacgagatccatatcattaaactatcattaaacaattcaacttacaattcagtgctaactgtttctaaacacaaataacaatatttgttactataaatatatactaataaaacatcatctataggctggatcccacattatcagactcgtcagaaggtggaggtggatactgagatcctgggatgatagaattagccctaatgtatgcctccaattgttgaacacgctcctgcaagtctgcaatcacaggatctttagatttagatagaggttgaggctgaggtgcagaaggttgggcatatgaaggtggatcaaacatctccctcgtgctaataatgcggccatatcctttttggtggcctcgacgctttccgaagaccgtttggactagacacaagtctttgtctccagcctctgctatagtgcttggtggttccgtactctcagactcggtagactctgacgacgaatgtgtttcacgtatggctttcattttttcctgacatacaatgataaatttaattgaatagagtaaaaaaactgaaaatcttaaaaaaaaaaaaacaaacatacccaagtttctttggcggtttcagacacccatccaatgccatgtttatggtgagttgcttgccatgtttctgggatcggtgctagttgcccagtctcaggattgcgctgttatggtcaatttttttttttgtaaaatttaaaaattaaagataagagaataaaaattatgtattgatttaacttactcttttgtaacgcaaatcaggtatagattgagaacccccatagcttagttctttcaattttctcctgtttgctgagttaatctcagaacgtttctataaaaacaaaatgtgttattgtaaattaagaaacttaagtaaaaaattcaatacaatttacattaggataccttcacctctggttgctcgaagtactcgatagccttttcccactgatcagcagtacatccatcatattgttttgatgtcccatgccttttcatatgattatacaattcatttttgaattcagagtactttttagcacaggatttgtctatgcctctcaaaattcctggaatatactctgctccgtatctttggcgaccaatgtcaaatagttcgtcctatgaaacaaacttttattattagtgaatatgatataaataatgaaagaaaatcaacataaatatatagaaataattaacctctatatttgataatatccttctcttgacggattgagggacttgtgcccaatctttgaagttgggatccgtacatcgtcgaaccagtaaccctaactccctactaaaatcggagctgtaagatcctacctccttatatgtcttccctttcacgtcccattcgagaggtaatggacgtcctaagtctctccttttttctcgtgtactcaatcctttatggcgtccacgtttttttgttggagccgctattatatttaaatattcattgattatttattagtatgtaaacagaatggccaaattaatttatatagttgtaaaaatatacaaataattaaaatatttgtaaccttgcacacaatcaaccccaatgtgtgatggtcctggcggaggttcagctcctccatcactctcacgagaacgagcaacatctctcatatctgatgaatacgaacattttgtatataaaaaaagttattataagattacactatttgcagtggtaaacttataatttaaagtgagagcaggcgttatttttttttttttgtaaggcaattaagtaaaagtaaacttaaacaaaaaaaaaaaatgttaaccattatgtatatatcataactaattaaattaatatgttaccttggcagcagtttggtggagcttcgactggactacgggttatagcagcttgggcggagcttccgcgccggtgagagaatgagggttaccaaaatgcaaagagaaaaagaaaaaaaaaaaactgaaaaatttaccttcaaaacttaccaaattagtgtgagagagagagagagagagagagatagatagatttgacttcaatctaacaaattagttgacttcagatacgtgcttggaagttgcagaggaggaggaggaggagagtacggagattaggaagagaaaggtaaaggaggagagagagagtatttaggcagatagacagtacagagagggtttgctgcgatttgagggttttgaattttgggggttaagaaactgaagaagacggaggagaagcctg

SEQ ID NO: 19360 - DNA, 2372 bp, Cannabis sativa
  modified_base (2301)..(2301): a, c, t, g, unknown or other
tcatctactttatattattttataacacccatatatataataagtgaaaaaatgtgattaatgtgatacctgtgtttgagctgaatgataaaattacccattttatatgtgtatggcaatatatgggctttagagcattttcgtctttttaaccaattaatctattttcagcaattttcaaaaatcttttttcagcaaaatagacttttcagccaaataaaccatatgtttttctgggtttcttcattccaaaccgtctctctctcattccctccttactttcaatcccaaacacaattttttttgaaaaaaaaaagcttgaaattggtggtaaatcatcttgcttgagaacttggagaatatagctagcttaatctttttttttttttttttgctttatttctagtgtttaaagctttctagttgttgttcttggtgttcttaatgttgctatttgttcttccatgcatgatgatgagatttaagggagattttggtgattgtagtgtgtttgtgttattaggttcatgtataatgcatcttgattgttttgagagattttagggttgatatatgatgtttaatttctaggaaatactatgaatttctgggctaagctttgaagcttgtgtaattttgtgcaactatggtatttgtgatgcatacttaattttgtttgatttgggttttgattttgagcttagtgtggtgctcaattgtgaaccaatgtttaattggtttgattttgatttaaggcttgatttatatatggttttgaataagttttggtatgaaattgggttacaattgagtgtgtgttaaattggaaaaattgggattttgtgtggaaatagggactgtcgtcgcgaccattgtttggctcgccgcggacacggtttggcttgccgcagcgagttgtggtcgccgtggtgagggctttggtcgctgcagcgacgcgagggccctgttttcatggttttttgttttctcgtttttaccataacttttgacccaaaactccattttgggcattctttatattgttagaaagctcgttttaggctctatatgttgatctataaatgggattcaaaatatgtaaatgtgtgaaaatgaatttgagattaaccttatttgtaaaattccgagattgcgtgactaggattatcgacgcttgctcaggaacacccgaggatttgaaatctccacatacttggattaccaggtaagacagtaaactagcacatagagattagcgatgtggtgcccatgtatgttattttgtgtatgttatgtgagaaaccgagattagggttatcaccctaaacttagcggttgtgtgatctagggttattactctagaatttaaatgattatgaatacaattttatattgtatatgttaatataagtattgtgcgattaaaacataattaggttagactcggtaatcagaactgagataaaggccttattataaatagacatgtgtgcgtaacacgtgagtctatgctatataaacattaatagacgtgtgagtgtaacacatgagtctatgctatatagacattaattatagtgacattattatatatagagtaatgtaatataaagtgcggtggcacaatatatacgcagtggcgtactgtatgaagtgtaattattattatgattataatactataatattattattgtattactgggccttggctcacgggtactctattgtgcaagaaagagtaaatttgttgttgatcagccatgagatcgagggctttgcggtgtattgtacatgttcatggctaagctctcgaccacgagggttgggtctactaaggaaaaaatatcgggtttctctacttttgccgcttaggtcggcatgtataaatagcttgtaatattttgaaaaagttttaaggatctcgaattaaaatctgtatttttggatgtttgtaaagtttattattacaagttattattttgaatctttatttttttaaaagtttaattttctagcttagctctaataaattctggtttagcgaaattaatttatgttaagtcactgtgtgtgacgttcctattgttagcgcgttacactaaagtcgcccctaaaaagccttatcagaaataaatttttaactttaaaggtttttaaattaaaaaaatatatatgtagtatttgaaaattttatttttagtttataaaaaaataattataatactgaatattaatacaaaatataaatttcttcatttcaaaaataacacaataacataattgttgaccgaggttttnggcaaccaataaaataataagagtttagacagttgtaagaaattaagagagagatttttccgtggttgggg

SEQ ID NO: 19361 - DNA, 17880 bp, Cannabis sativa
ttcaaataattatactattttaattattaattaaaataaaaaactaaaatattaaataaaactaacactacgcttggcacgtaacaatcacctaattttttatgtcttcattttttgcaatatattaagttttaatgaatatacgataatataatataaatatttacataaatgttttatgcttaaatttgattgtttacattttattaccttaattgaaaattaaaaataatcaacatttagtaaacataaattgatattatttattaaacagataatctgtataatttttttgtctaattaatttttagtaaatataatattatataataatcacaatataaacataattgtttatatatttagatttatttgtttattttttagtaacttaattagaaattgaaataattaacatttttaaatactaaacatacattgatattgtatataacatgcatatggtttgtaattttatttgtatatttttattttaaaagtgtttagttttaataaacatgttatagtaaggttattatagtataaatgtgtttatattttgattattttaaggatgtatatttttaattaataaacatatattgacattgtttattaaaagtacatattttataaatttatttgtataatttatttataaattaatttttaataaaataaatgtttatgtgaaaaataataaacatttatgtttatgattaatttgtttaaaaattacttagaaatacaaatatcagtttaatataattaaatggttagcttcaattaatttaaattttgaataataatatgaatattatgcaattaatataggatgatgattatttctttttaatatattatatagatggtaacttctataaataagtgtattaatggacacaatacattatttataataatggtacatattttgtgttagactgtaaagaagttattttgcacatatattatatagtaaatttagttgtacattgatgaaaaatgcccttaaaaaaacttgcttcttttttattttttttcttttcttttttggagctttgagataactcttacagaagtatgataaatttatgtactaatgtaactatgcagtaattgcaggatttttaaggcatttatgtttcatttatgcgtgtatttctgtcacatgttttgattttaagatattataatggttgtcagacatttgccctcttgttgctgatatttgctcatcttatttttcttccagaggctgcgtaaatgctgtcaaacatgtggttttgacgtcattggtattatttcagctgatattgagaaattatgcaaggtaaacttggtactttgtaacactactcgttacacttttgagaattttgttttatctatactatagatcaatcttaagacttttgttttgaactgacaatgtgcagtaggttcttagtacttgtgcaaattaatcttagtacttgcctaagattaattttgtatttttagaagtttgtgcatttgtagatcaatcttaaaatgcttgtgctgaactgacagtgaagataattttgttttttttattgttgattgtaattgattcgaaagtatgacaattctcttggcctcatattgtttcaatagtattcttgtaatcacttgataatgtttgagttttagggattacttggaccaaaggggttgatgagtgccaatccacttgcacaacaagcagcaattttctcgctatcgactttgatgtctatatctcctggagaaacatacatagagtttgaaaaggttaacgcccataattgattacttacccaatattttgatgtttttggtttagtaggcccatgttattatctttaattgtctctgattggaatcttgtgactattccagcacttgaaaagtcttccagacagacagtcacatgatcttctttctgaagatgacgttcgggtaatttttgttttatctctatataatttaaggcaaagaattcatccatcctttttctttttccttgctggtggcaacctcaagtttaattagaatatttttagtgccgagggtggggacaaatattcaacaatattcttatatcagtttactaataattgtgaatttgtgattagttttttttaatcattactaaatgattagtgaaaattgtagattaacgacatgatcttggtttgatgctttctttgagggagcctctttggcattctacctttttttttttttctaaagtaatactagggaaaccaacttttatatgtctatcgtaaggatatcatcctataatattggttcatttcggcatgagcctaggcatgggctgtctgggtcaaggtttcatggctgttggctccttattaataggcagcttttgcatgttgaatatacataaatttacacagtttaacactttttgatttaaatctaaagaatgaaattaaaacactttgaacattgaaaaaaatattctgatgtatatgacgtatatagcttgttttaatttgtcattagatcaacttgtgtgatattatgtgaaaatgtgtccatttaacctatccttcatgctattaaattctcttattgtctgtgtataaagatgttcatacattactgtgtgggtttctcctcattttccttttgtaccattatatgcatattgccttttttttttttaccctctgttcaccttgtttcagatttttcacactcctgaagggatgctttccaatgaacaaggtgtttatgttgccgaatctgttgctactaagaacatgaagcaagctaagggccgttttcggatgtatgaagatgaagatgatgcagtaatttcttggcccttatattttttcttcattgttttcacaaatacacccccttttttgtgttgcttctcttatttttatcttcttgtaattatctgtcacatttgtatcgattttcatcttaggggaatggtatttccaatcattctgtgaaaagagagcaagctgctgggaagagggagcctgtaaagtcaacaaagaaagctggcatgtatctttacatttttctatcttttaaagaatttgttgttctgaatgccatttatctaacatgtatttatttgttattcttagacaaaggcaagactgcaaaagaggaggcacgtgagttactacttagggaggaagcatcagtacgtgagagtgtgcgaaaaattcaaaaaaatctctctctgattcttagggctcttggcgaggtggcccttgcgaatccgatattcgcacatagtgaactagcttctctggtttgtttcatgctacatttttcaatcaagttatattggtatctttaacttgtctgaaacttatttgttcttcatgcatcttccatcagttcaagtttgtcaatccattgctaaggtcacctatagtaggtgatgttgcctatgaaacaatgatcaagctttcgagatgtactgctgctccactttgtaattgggccctagacattgccactgctttacgcttgataacaactgatgagattcaggttcagttggatttgattccttcagttattgaaggagaacaaaaggcagtaccttctttgggtcttttcgagagaattgttactggcctttctgcatcttctaaatatggacctcttcctgtagattcttttacttttgttttcccagtaagttattttgcttcttttggactaaaataatgttcatcggggcttccttttcctaatattttgttatactttacatcagataatggagagaattctgttgtcctctaagaagacgggtctccacaatgatgttcttcgtattctttacatgcatatggatcccttactcccacttcctaggctcagaatgctatcagtaaagattctaacttttcagtgctacttacactattcatttttgtatttctatttaccttggggatgtgcttattctccattgtttcttgttcttctactcatttcttgcaatataggtcctttatcacgttcttagtgtcgccccagcttatcaagcttctattggctctgcgctaaatgagttgtgtctaggtctgcaaccagatgaagtggcacctgtatgctccttaaactttgcatctcaagttatttcactggacatatttatcttaatatacgtttttacaggctctgtatggagtttatgctaaagatattcatgtgagaatggcatgcctgaatgccattaaatgcattcctgctgtagctggtcgatctcttcctcaagatgttgagatagctacaagcatatggattgctttacatgatccagaaaaggtttggcttttgaacttttttcattttcctggtatgtaaattatataatctttatcttgtcctttcattgtgatgcttctagattgccagctagcattttacttttttttttttctatttatttattgtgtctatgcactttctcattttcactgcatacctagaggtgtcttattttattgtaaaaatcaaaatattgcatttccacgttttcccaatttgtgcatcatccttgcacaggggccatgcctaatcttctttgtattgttccgatttttccaaatgtccccgaagagagtattgcaatttcatgtttggccatcaaatgtctgtctattaatttagtgacagtacttcataggtttgtcatttttaacatctgcacaagaagtagacattcattaatgcactgtgaatttgctattattattatttttaaaacaaaacattgctatttttattatagatataaaaccaaagcctgctatctatataattatcagggaagcagagaacaagataaaagttcctaaatcacagcactatgaactaaacataaagcatacacaaagcactgatatctctactttagtcagtcctcagtgaaatgaaaattcataaacgcttccttgttgtagtggctaactaatctctgtcccaagtagcttctgtactatctttaacatcttcaatgcctcactatgaatttagattctaaattttcaatgtgttacataattacactgtcatgtatgaggattggtttggcctttatattgttctgtcattaatagagtaatctatatcaaatttgatttcaagttttttttttttatcattcaagtatctgtttcctacattgatttatggagagttcttaatattgttatcagctcatcaataatcagggtgaggaaattttgtgtttcctttccattgctttattttattctcttaaattttaagatatgagtaggcaacatagtgggggaaaattattttcaagtcctttattgctggttttggtttttgtccctttattatatcgctcttcagtcagttgcagaaaaagcggaagatatatgggaccgttatgggtacgactttgggactgattattctggactttttaaagctctttcccacattaattacaatgtgcggttggctgcggccgaggcattagctgctgctttggatgaatcgcccgacactatacaggtgtgtttatgtttgatctgacatacttcatttgccttagcactgtagattattgaaagtcttttattattcaggaatctctgtctgccttattttctctgtacatccgagattctggtttcatggatgataatcttgatgctggttggctgggtcgacaaggagttgctttggcgttacatgctgctgctgatgttttgagaacaaaagaccttcctgttgtcataacatttctgatttcacgagcactggtaggtgtttcgttttgttttaatatttcattctcttatttgaaaacttttataggtgaacaaaaaacaattttatgctttgtgtttatactagttggtgtgcttttttcaataaccttgaataacaattatttcaaccgttgattctttcctcgaaaaggagaaaactgacggcattaacattctgtatgcttttgaatgtgcaggcagatcctaatgcagatgttagaggaagaatgcttaatgctggcatcatgattatcgataagcatggaaaagaaaatgttcccctattgtttcccatctttgagaactacttaaacaaaaaggtaggtcctcttttccaacaatatattctgttttcaaaactacctgttaggtagctgctctcatttttgactggaaaaagtcaaaagtggaggaataaagtgttatattttgcgaagagtgtgtatactttcctgtgtatgtgtttgtataacatatattttttaatgtttatattttacatcttctcttctattaggcatcagacgaggagaaatatgatttggttcgtgagggtgttgttattttcactggggcattggcaaagcatttggcgaaggtgttgattttttttttattcctcaacctcattttctgtctgtcacttcctgctatttattgatgaaatgatcctttttgttctaacatctgtgtcttgtcacttctttttattgatgaaatgatctttttcttctaacatccgtttcttgattcaggacgaccctaaagttcatactgttgtagagaaattgttagaagttctgaacaccccttcagaagctgttcaaagagcagtctctgcatgcctggctcctttaatgcaatcaaagcaggtatctaccagtcaatgtgtacattttttttttttttgcatttaagcctaattaaattgattcctaaaaaaaaaaaaaaaagcctaattaaattgacatctcaacccaacgattcaaagctctagaattcgatcctatctactgattgttgatctttaaattaaagatctgttagttgcacttgggtagaactcactctcaaaagctagcctaagagagaagaccaccaaccaatcccatacttagtcgatgtgggatcctaacaagatctcaaaaagaaacttaatttaatatctcatgtggagtaatttaaatcattcctgctgcacacacagatataactcactggcttttgttctcttattactttttggccttatttagcagaaagcttaactttttttcaatgttttttcccgtgcatcaggatgatgcacaggcactcgttactaggcttttggatcaattgatgaagtgtgaaaagtatggggagcggcgtggagcagcttttgggcttgctggagtagtcaagggatttggaatctcttccttgaagaaatacaacattgtgactgtactacgagaaggtctagcagacaggtttgcttccatcttacgcttcaagcagacatgttaaagatgtagtgttaactattatgttaacctccaaacagttcgaagaaactttaaaacatttggttattggtagagatttgtgtagttgttaaattattatctaattgcaccagatgtttggctactttctgagatttgagaggaatatggttgggttgatgtttcaaaaaactttcttctactaaatataattatctcatcatagtggttctggcaacttttctaagacgaggaaagagaaaggggggatgggaagttgcttgtgtttttgatttttgcgcctacattttgtttaccatttttgcaatagttaacttaccattttgatgtttcataaaaactttcttctactaaatataattatcatcatagtggttctagcaacttctctaagattatgaaagaaaaaggggggatgggaagttgcttgtgattttgatttttgcgcctacattttgtttaccatttttgcaatacttaagttaccattttgattttattttaacaccacttaataatttatttcatctgaatatcccttattatttttttaataagactacgtcaatgtttaatatttgtttctcttttcatataaggaactctgcaaaatgtcgtgaaggagccttgttgggatttgagtgtctttgtgaaacacttggacgattatttgagccgtacgtacaagatattgtaatggctacactattatgcttttatattttatgatttacttgatgtttacttttattctttatgttttcagttatgtgattcaaatgttaccattacttctggtttctttctcggatcaagttattgcagttcgtgatgctgctgaatgtgctgcccgtgcaatgatgtcgcaactcagtgctcagggggtgaagttggtccttccatctctcttaaaggtgtttaattttcacttatcatatatatacaaacattcatataaattaattttttggagcatttgtttacttattatgcttgtttattttcatttacaagctaattctttgtatgaaacatttaatttaatgcattaattttgcagggtctcgaagataaagcttggcgaacaaagcaaagtagtgttcaattacttggtgcaatggcctattgtgctccagagcaattgtcccagtgtctccctaagatcgtaccaaaactgacagaggtctgtctctctttgggtttctgaatttgttttttattttgtaaaattttttatgcttgtacttaattttgtttcatctttgtccttaaacatctatgaatgaaggttttgacagatacccatccaaaagtccagtcagctgggcaaacggcacttcaacaggttattttttttttctttctgattcatatagtagttctttgttctatagttgttgtgattttctttttcctttcatatttaggtggggagcgtaataaaaaatccagaaatatcttcccttgttcctacacttttgatgggtcttacagatcccaatgaccatacaagatactcccttgatattcttctgcaagtaagattacagattaaaatcttattttgtaatattcggagtttactttgttgattgacttgactaacttatttcaatcatatggggttgttttgtttattggctgaaatgcttaatggattcgctgcagacaacttttattaattcaattgatgcaccgtcactagcattattagttccaatcgttcataggggactaagagagagaagtgcagagacaaaaaagaaagctgcacaaattgtgggaaatatgtgttcattagttacagaaccaaagtatatgattccatatattgggttgcttctgcctgaagtgaaaaaggtttgtttcataaatttctgcatctttccttgccactggtgtttcataagattcttgcaatctagttgtccatgaaagcctcttacttttcatgtcaacaaaaataggttcttgtggatccaattccggaagttcgttcagttgcagcaagagctcttggatcacttatacgtggaatgggtgaagaaagattcccagatcttgttccttggttattagatacgcttaaatctgataatagtaatgttgagcgttctggagctgctcagggattgagtgaggtcagtttctttgtttgaggaagatttagtttcaagtctttttagatgcaacttttgtctgttcttaatattgatgtatgaactgcgttgaactgatttgaagtaaccctttttatggacaggtcaattggaaatatttttttgattactgtgtattctcaacatttcttattacttatgatgtctctgtggtcaaattactttctaggttttggctgcccttggaactgagtactttgagcatttacttcctgatattattcgaaactgttctcatcaaaaggcttctgtgcgcgacggatatttgacactttttaaggtgaattgtagatggtggcttttttgtttttgtgttattggaaagagacatggtcacttgtccatgagtgagctcctcagtcctcccatgtttattaagaaccctcacttacggttaattgtggatggtgacattaccagcattatattcttgttggtattcagaaagttaacttggtggtgttgtttatgtatgtagtatttcccgaggtcattgggcatccagtttcagaagtatttgcagcaggtcttgcctgcaattttagatggtaactaaatatctcgaaatagtttcattataaaaatgtcttttgaattttattattctcttttcaagattctttctcaatctaaacaaaatgtatgtttcttgcaggtcttgctgatgaaaatgagtctgtacgtgatgcagcgctaggggcagggcatgtactggttgaacattatgcagcaacgtgagtggattactcatttcctcagtcccaaaactttttcctttataaattttatgttacttgattctaagatggatagtgtctgaaattattattactttttgaattttatgttacttgattttaaaatggtttgtagtgtctgaagttattattaggttattgtggagcatatattgcagaaaatatgcccgaaccttatgaataacaagtgtttttacatcttaaacactttgagtgttttgaattcttttctgaatcattttatagcgccggaaaccttttcaaaatcattggattatgagtggttgcagtggtgttttactttacatgtcagacttttctctgaaatcataattcatcagatttccttttttttaaccctattttccttcttgtttgtcactttctcaggtctttacctttgctccttccggctgtagaggatggcatatttaatgatagttggcgtattcggcaaagctctgtagagttattaggtgatcttttgtttaaggtaaacacttttttcccttgtccatttttctttctaggagtgttgtcacacttacattctttgatagctgaatctcatttcattcaggttgctggaacttctgggaaagccttacttgagggtggaagcgatgatgaaggtgctagtactgaagcgcaggggcgtgctatcattgaggttcttggaaaggaaaaacgtgatgaggttctcgctgcattatatatggttcgaactgatatcagtctgtcagtgcgtcaggtagggagaaccagagaacatgagaaccagttatttggcgacattttcttatgtatctgaatattgacttcatacccaacatttttacactgatttttactgtatcaggctgctttgcatgtttggaaaactatagttgtaaatactccaagaactctgaaagatattatgccagtcttgatgaatacactcattacttctcttgcttcatcatcatctgagaggcgacaggtttgcattgtctggttgatctggtcagttttagagtcctcattgaacatttctaattcaagttctcacgtaggttgcgggacgagcacttggtgaacttgtccgtaagcttggcgaaagagtgcttcctctaatcatacctattttatcgaaaggactgaaggatccagatgcaagcagaagacaagtcagttttttttttttgtattgctttaatttttgcatcatacagaaatattatatcgtgataaaaattataagttaatttttgttaagagtccatgttttggagaaaaaccctcttgaaatgcagtggaaataaagttaagactgcaaatgtggttgatggaaattatatagaaagggagtgcaatatatatatgtgactaattaatgtctttgttttcttatttgacactttcagtgaccagcctgtttacttcattttctggcatcatttttcacatttttattgtatgttacgagtaattaatgtcctagcagcttacattataccagaggtaataattgttttttcttacttaatgatatgatttatagggagtatgtataggtttgagtgaagtgatgggcagtgctggtaaaagtcagttaataagtttcatggatgagctcatcccaactattcggacagcactttgtgataggtttgtgaatgtgtttatggtctactgtttgattatcatattattttatgtaaaggagttagttttaatttttttttctgctgacagcacacctgaagttcgagagtctgcaggccaagcattcagcactctctacaaggttttttttttgtttcctgattcatttatctttgcaatggactatgtgattttcttttcttttcattgttcattatctaatataatcatcattaaaatgtttcgatgtagagtgctggattgcaagcaattgatgaaattgttccaacccttttacatgctttggaggatgacgagacgtctgatactgcacttgatggccttaagcaaatcttgaggtagaatatacatatgatctttctctccttgttttcaatcttcatcctttcccctgcacagatgtgttgcctccaaaaactaagcgattctgtttgttgttttagtgtcaggacttcagcaattttacctcatattttgccgaagctagtccatcttcctctttcgtatgttttctttcttaactttagtatgttttgcatgtttctttgtgaggacattcatatgaattttggttaattttagtgctttcaatgcacatgcattgggagcttttgcggaggttgctggagctggtcttaattctcatcttggccttgttcttcctgctctactctctgcaatggttggtgctgacaaggtatgcaagtagcattccactttcacgttttatgggggttttttattgctcaaattaagtttcaattcacttcttgcttacttttattcatccattgatcatatgatgacttttacttacatgctgtatgtaatattcattaaacttgtatgttatttgtggacacggtaggatgttcaaaatctggctaaggaagcagcggagactgtggtcttagttattgacgacgaaggtatcgaatatcttataccagagcttctcaaagcctctaatgatagccaggtatttttttaaacctagacttgtatatacatgtgagtaccatcaagaagtgaaatctttcagtgttcttagttactttttatatgatttttagccatgcagttcctgattaaagtatttttagtgtcagtaattttctaatcttttggtcttttttctagttgtctttcttaactgcagttttcttgtgttactttaccaagagtacaagggttgttcgtttttgaacgcgcagttcctgatttaagaaccttgctgatgttatctttctctaattttgttctctatatgattttttttcaggcttcgataagaagaagtgctgcatatctcattggatatttttttaagaacagtaaactatatttggttgatgaggctccaaatatgataaccactctgattgttctgcttagtgattcagattcagctactgtttcggtattttctatcttatacgaataagtcacattttcttctcaattattgatgcttacagaataaaattatgctgtcaggctgcttgggaagctttgtcaagggttgtgggttctgttccaaaggatgtacttcctacctatattaaactagtacgagatgctgtttctacatctagggataaagaacggaggaaaaagaaggtgagagagtaattaagatattatgtgtctgttcaggtttgattgatgctggttatcatatctgtgaaacgtaagctttcctaatcatcatgtttgttaacttgcaggggggaccagttctcataccaggattttgcctacccaaagcacttcaaccattgcttcctatatttcttcaagtatttttttttcaccctttatctcaaagtacatatgtgacactcttttcttttttcttgctactataacattaacatgcttttttagttttctttttgtaataaaataagcaagaaacataagtttttaagtaaattgttgggtttaactcatttgcatcagtaaatttgagatttttttcttcttcgttagggcaggttaataatctgtttcattattctgatgatgtctctgtggaaggctaatgatatcgagatgtgatttgatatcttctttttagggtctgataagtggttcagctgaattaagagagcaggctgcgcttggtcttggggaactagttgaagtgactagcgaacaatccttaaaagagtttgtcatcccaataacagggtacgtgcccctgaaattttatgcagttatacttgagatattgagagctaatttcatttatttgtaattgtcgatcgcttccgatacttcctctttatattccattagtagctatgatgatttagtctctttctttctttttcttcattttacaccaatatgttggtctatataatgtatggatttgttaattatgtacttgataaattgtaacctatgcttagtgtatatattttgattcttaatctaatcatcttgcacccaaatggggaatcttttactgtgatgacctaaactgtctggggtgagactgagagtgacttttagaatttatttattaacattcccacatagagtgaagcatgccattgattctttttatgtcatgactttcacgaccaaagattattattattattatttttattttacattggcactgttaaattaataaacactacatcttttatattctcatgtctgaaatccatagtcagtttattgatctgattttttgtttcttaaacaccaggcctctcattcggataataggtgatagattcccttggcaggtcaaaagtgccatcctttctactttaacaatcatgataagaaaaggtgggatggccttgaaaccgtttcttccccagcttcaaacaacatttgttaagtgcctacaggacagcacaaggtaggtgcagagtacatggatcatgtctgtagattatagtggcctagtgggcttgatgtttgtacttttttgcatctcaaactaactatagtcataatatgctattactcatcccatccatccacccacacctgaattacaaattttgctgtgcattttgtttatgcatagatttcattcatcttctcttttttcttgcttttgcttactatgttagataatgagtgcaggactgtacgttcgagtgctgcccttgcattagggaagcttagtgctctcagttccaggattgatcctttagtgggtgacctcctaaccagtttgcaggtgattattatttaatgtcatcaagaaagattgcttttaaccaggaaatacttgagttaatggatttgactgtacagacatcagatggtggcattcaggaggctattttgtttgctctgaaaggtgttctaaagcatgctgggaagagtgtcagcgaagctgttagaacacgtgtgtatgttactcttaaagatttgattaatcaggatgatgagcaggttcgaatatctgctgcaagtattttgggtattacatcccaggtatggtttttcttcttccacttttcttttgtctaagagtatgaatcggttgtggttcctatcattcttgtaaattgttcagctcttattgacctggtttaacttcaattttgcagcacatggatgtagctcaactgggtgagctgctgcaggagctctcagatttggcctcctctcctagctggtctgttaggcatggttcagtactcacaatttcttccatgctacggcataatccatcagcagtttatacttctacgttgtatccttctattttgcgtcatcttaaaagcactttgaaagatgaaaaggtacttaattcttgagacaccttttacaggtttttttttttggtgggggactaattcttaaagacattttccttcccaaacagtttcctcttcgtgaagcttcgaccaaggcttttggaagactactgctttgtcaaattcaaagcgatccttcaaactcttccgcacatttagatattatttcgtgcctagtttcagctcttcgtgatgattccagtgaagtcagaagaaggggattatctgctcttaaagcagtttcaaaagtaagtagcttttaactcttgaaatttagaggcaagtacagtacacagggatcttatttgtgtgtttaatatttttcaggcaaatccttctactgttttgggttatgtgaatgtgattggtcctgcactttctgagtgtatgaaggacggaagtactcccgtgagacttgctgctgaaagatgtgctttacatgtcttccagttaacaaagggtaattttgttcttgtggttattctcaatcattgttttggatgtttgtttgcatgaatgagtgtagatttttcaatgtccgtggccaaattgcaagagttgttcaccatcaccatcaccatcaccatcagtttgacatgttatttttaaattctaaaaagtaaagagatgaaacagttactaagtgtttggctttggtttattttccaggcacagaaaatgttcaagcttcccaaaagttcatcacaggcttagatgctagacgattatcaaaatatcaagagcataggtatattccacacaactccttttttagtttcttgctatcaaagatcattacatggcctttcaatagaaacatggaaagggatcacagaaaaatatctctatttatatcaaaagtacctgttccttttttatatatatatttatatatatataattttcactctgatcatttaatttattattcctggaaatgcagtgacggcagtgatgatagtgaggatgagttgagaagtggttgagaaagttatttattttttttggcaacaccataattttcgatcagagacaaatgagtagataaagaaaatagaggcttttgatacccaaattttcggacctgggtgttctcttttaaatttaaatgtcattaaattaatttgaggatcatgtatagaaatgatttatcgctttttgtaatttattctcttgtgactatctcctataccattttttgaagtttaatgtattaaagagctcgtttatttggagaaaaagttatgtagaataaggccttcccagtttttaatgttgggtatcaagttgtaacattataatgagcaagtacgaattttcatttttcaaaattatctcaattcttatttttaatttatgaaacgtaacttatttcaattctgtgtatttttctgtgtcagaaatcagaaccttttttccgcaggtgttatatcatgtttacattaaagcaaatatgtatggttaatatttacatggaaattctctacagaaattatttggtataatacaaataaatgcgttgtctaatagttttaccgtattttaatgtcatcacttaccatgaaatttcggtcttacaagcttctatttttacagttaatgtcatccacagtggaaaccgaacttaagcgtcatatcccaacaatgtactcataaatagagaaaaattcacagttaatcttattcttacgtattactcagcaatcagcctcgctttccaaatgcacaagtttgtattgtttttctatttaaataaataaataaatgaagcccggtataagttagagtgtggcaagaataagctgctaacaaaaacagaagtaatttcaattttttttttttttaatctaagaaataattggatagtaaaaaagtcatttatgtcgagattatttcgcaccaggaaaaagaagagaacaagttacattcatgtctactctttttttctttttctctttccgttgaaatggttgcatgtctagtctactcaaatgccactactggccttgattctagcaatacaagactattcatcttcatttaaaataaggttaattagtcattttttcctccgaactttgacatgtactaaattgtgcccgaacttttttggctgttagaaattcccccgaactattgagattgtt

SEQ ID NO: 19362 - DNA, 3371 bp, Cannabis sativa
taactttgtctactatcttgttccttgacttaagctagaaatttgattttataagtttcaagatcactatttcattataaaatttcacaaggtaagatgcttatctacaacctctgctgggacgtggttgaactaaccttcacaaaaggagcccatttctccacatacaaaccatggccaaagcccccaagagctgggaaacaggggaaaaaaaaaggagttaaatgcaaggtataggctctattcatccaaatgaaacaaacaacagatactattatttcctgccaagcataataacaatacactatgaaattcgaaagtaatttttaaatttaattaatattttgggatcagtaagctaaccctagaagataaatcaagaccattaatcatcatttaataataaataaactatgttaccagcaatagcagcagaaagctcctcctcacttttagcaacagcatttccacgcccatcataggctaaccttttactcttaatcataagaggataaccaaacagttgccctgctttcttggcaccttcaagttcatctatctgcctttgtcatagattattacaaagaaaaatgtcacataattgttacaaaaaggaaatgcatagcagttgtaatccttcacaatcacatgaatgaatcatgagtaaacacctgcataaactctggaagcggaatatcatgctgagaaaaatgaaccttctgaagatatttatcctgccagatgcgtgaaaacaaagttaagtgcagcacctaataacatatcagggaatgctcttctcatatttcatattttgttatctactaaacagagacaagggcttagcatttcatggatggtaggctattataccatattctcaaaagtatttcctaaatgatgatactaacactaaataagatgaaaccaacctggattatgcgaatggtagaggctttgggttggcaatcaactccctgtagctcaagtttctccaaagtggcaacattgacatgttcaatctcaaatgtcaatactccacacctaactaccaagaaagaagattagcaataaaaaaaatcattgtatagtacatttatataaataaccgggatttgtgtgaacctcttagcaaattcttcgactgcagcactatcatcaaaacttccaatcatatgttggtaagagagagcactggcagggcaattctgttgagggtccaaaaccacaactttaatggccatttgagaagctgcttggcatagcattcgacccagttggcctccacctagaacaccaacaatggtctcagacgaaccatgaacagccgaatcatcttccctatttaaaaaataaaataataacatgaatataatatagttcaaatgccaaactttcttcagttagaactaataaaaaaaatgctaacctgggtgaagtgtcaggtaaggcccggcaagccaagacgggattacgattctgcggaggctgttttaataaggaagaagaagaagaagaagtagtagagagggtttgtttaaatgagttggtagaggagcggtccatgaaaatagtaaaggatgtatgttttgtagaagggaatgatggcctgtagcatcgaaaatccaaagcagtgtgggatgagcgaagcatctctttcttcagactcaaccaccaaaagtgcgagctctgcgttggggtgttactacaccggagtggctgggctgcgagctgtgagttgttaatggaatggaagaagataaacaatgaaaattaggttttttcctcttttctttttaattaaccaatatatatacctgcggctgcgccacttgatgttcattattcactgagcactcttcgcttcagataatagctatcataaaataaaataattcacaaaaaaaaaaaagttggagaatgttataagagcattctccaatggtaagttggagaatactataagagcatcttgatcttcaatggtattaagggttctttattggatcacatccaatatttttagacccatccaaatccaatccaatgtttttagacccattcaaatccaatttaattatacattggatgttggatttctccaaccaatccaatccaatactgtacgctcaaccgaaccgatttgatccaataagtcattggattggatcggttcaatccaatggatgaatccctgtactggatcgaatctatccaatacttttgatccaatatttttagaccggattggatccattcaatatttttaatccaatattaattggattgattggatctatccaatccaatccaagagtaaaacctaatttttcacctaaactgctaatatattagtcaatgtttaaaaaagcgtttttgaggcgcgaagttgaggcgtttaaaaagtacatcaaggcgtgcgccttgctgaagagaagagaggcgtatgccttaagtggtgaggcgctgaaatgaggcgtaagaggcgtgcgcctcaaattttgaaagtaaaatgggctatttgagccctaaaaaagcctaaattgttattttaaatttacttttctgctgcccaacttaaaagacttaaaaacattaataaaatggtccaacaaaatatttaagtgagcccaaataaaactaaaaaataaaaaccctagttctatcttcttcctatctcacaacagctccctctcttcttcacaacagcacacagctgcttcttatttcttcaaccaacaaaaaaaaagcttgttaccttcttccttcaaattggtgccactgcccctgccttccttctcactgctcatccattttcactgccttcctcaaccttgctgctgccttttccctcttctcatcacagaaaaaaaaaatcttgttggttgctactgccttgtccgagttaggtgcttgttcaactcttctaaagtttctgcttattcctttctttgttccatagttaaacatttgaatatcatttaatttttttaattcataagccatatttagttgttcttaggttcattaggcggtgatttattatttggttgttaatttgttttgtgtagattagaaaattaatagaaaatcaaaattgagtcatattggtgttggagaagctagtggcagtggtagtgttgatggtaataataataatggtcttggaaatagaaaagatctagcttggaagcatggttttgaagttgatacttcaggtgaaaatgctgaaaaaaaaaaaatatatatttacatggagtgtaaatattgcagaaagcttatcacggatggtgttgcaaggttgaaacaacaccttgctcatactaggaaaggtgttgcaccatgtaatgaggttcctgttgggttttatgccc

SEQ ID NO: 19363 - DNA, 4456 bp, Cannabis sativa
  modified_base (4414)..(4430): a, c, t, g, unknown or other
ctgattagacgatgagatatattagtgctaggttgtggaacaagctcacctgattaggtgatccaattatgtaataggcgtaggtattggcttgtctgattagacaatgcgatataatggtgctaggttgtggcgtgggctcacctcattaggtgatgcaattatgtaccgaacgtaggtacgggctcgtctaattagacgaagcaatatattggtgctaggttgtggtgcaggctcacttgattaggtgatgcaattatgtaccgggcatatgtacgagctcgtctgattagacgatgtgatatattggtgccagattgtggcacgggctcacctggttaggttgcaattatgtaccgggcgtaagtgcgtaagtactggcttttctaattagctaattaggtgattaggtgattaggtgatgggtgatgcgatatattggtgccaagttgtggtatatgggtgcaggttttaggcacgaggtcacctgattaggggatgtaattatgcaatatatgggtgctaggctatggcacgagcttgcctgattaggccatgtaatactggaatcagattaaacgacttgcatgattaggcaacgtgatgtaataaagatggttactttatgaggtaacatatatgtaatttcatttgatctagtgctttttaccaccacttggaatatgcctccctatgaatatactattatgcatgaaaatccaattctcaaatgtacatatctattcaaaaacattcgttgcttctgtccccatcgaacctcagtatattgccatctatttcacccaatcatttgatattattgagtgtaaaagcctttagaggaagtcctttaagtttgacccaacaatacattttatctaatttagcatcctctccaacatcaaaattctttccttgaataactcagttgtttcccaagcactattcttgcatcttgacgagacttgaaggtgatacaaacataagagttgtccccatgtaccttaaaaatactaacattccaattggtaatacttttctagatctttccaaaaattgtcataaaaaacttctcattggtctctttacacgaaattagtatccctactagagacttctccttaaatgacgatacagcttcatcattatcctcccattcctcctccaacactacaccaagtttacgtgtcattgatacaatgtctacgaattctctcgctaaaccactagtaaccattaataccaaaaaaattcaaaaatcattcatcatactcatactcaatcctatagactatcgcttaaagtttacttttttatttttaatttctaatataagtttttgctctatataaattcatagattggtctttaattttttaatatttactcgttccataatattcttataattggttagaatatctaactatttataaatcatttaaaaaaatattttaacaattattgaagaaaaccagctatcagatgcgtgcgagttctcagtctctctcttccatagcaaagaagaggaaggtgaaccaaaagccaactatcagatcggggagtgttgagtcagttgccggcaatgatgaaggaagcgtgatagtacagaaactgatttcagatgtgattaatgagaaggatgtaaggcttgaagaggtgaaggaaccaggagaaaatgaggcgcatattggggaagagccggctgatttggagcctatgtcgaacatcagcgagagattggaggaggaacccgaacagttagaagccaatttgtcttgggctgataaggttgagattgaggattatcaagctcaatcgcaggggcaatggaaaagcttcacaagtggtaagtcctttgataatgattcaaaattaacctatgaagagcctatgattaaggaaggattgaagattgctcaggtggatattgaagaagttcaacttcaggctgctaattagagcacgacagtgatttgtttggtgcttagggaaaatcccccttttgctgtttttgaggggttcataagaagagtttggaggaatttgggaatagcatagattgttcgtatgaatggaggcttcactattttcaaattcaataatgaggcaatgcgggatcatgttcttgagcatggagtcattcaatttgatcgaaaaccagtaattactcgaccttggactacagatttagatgttattaaacttttcaaatctatcccattatggattagattacatgatttaggccttcattattgggggaacaagagcctaagtgctttagttagcactatagggaagcccttcatggttgataaggtgacaaaagagaggtctatggtgaaatttgcaagggttctagttgaaatggaaattacagactcaccccctaacattatccattatttcaatgaacatgggagacttgtggtacaaggagtggactatgaatggctcccagtgaagtgtaaaaattgtgggggatttgggcataatatgagtgagtgtaggaagaatgaaaaagggcagtgggttgaaaaagacaaaggagaagtagggaaagacaataaggacatggggaagaagtatgttaagaagaaaggagatattgaaagggatatagtagctgaatctaaaactacagctacatgggttgtagttgaggaggataatggaaggaaagggtcagatggatctaaaaagagtgttttaaaggaaaaacaagggggcatggagtaaatagtgcagctggaagaaaagacattggtgattggcatactccgaagaaatccttaaaagctactcagcaggatagggggaaaaggtagtagttcaagaacataacttgtttgaagtgttgcaaggtaaggagggggtcccaaatgatggtaatcaacccgattgcttgcatgagttgcaataacatattgtgttggaatgtgaggggcctcaataaaagtcataaacaagaggcggtgatggaggtttgtcgaattaaggaagtgggaattggtgctcttttggaaacaaaaatgaaagggaataaagttcaagagatggtggagaatagctttaggggttgggatgcctataccagccctacaataggagggagattattagttatttggaagaaagtgtttgctagggtcgttgttatagctgaaacttctcaactagttcattgctatattaaactagcaaaccaaacagaagctttttgtgctacctttgtttatagaatgaataagcttgaagatcgaaaggagctttgaagagacctaggtaatttaaagttcccagttaaaccttagattatcctaggggacttcaatgttctttttcattttgaagatagggttggggggaagccggttgctagtatagagcttgaagactctaatgcttggttgatgacaggaaaagcagacatgttgaaaagagtggggtcagtgtacacatggactaacaatcaagacggaggagatagaatctattctaaaatagatcatgtgttcaagaatgaggattggcttgacttgttcccaacttctcaagctaattttcaatgggagacgatttcagaccattgtttgattttagtttctttggctatcatggtatacataggagtcaaaactttcaagttctacaattactgggctggacacaaagattttaaaaatctagttatggagagttggaaaaaacaagtgaacttttcaggtttattggggctttccttaaagctttgtcgagtaaaacatgttttaaaagtgtttaataaacaccaaatgggcagcgtggaggtgcagtttcaagttgctaaagctgagcttcaaaaggctaagcataaaactcaggaacatcctggttctgttgagttcttagaggcggaaaaaatggcagcaaccagatttcatgcttagaagaaaatgctgcgaagtttgttggttcaaaggagcaagctcacttggataaaaaagggagatgataataactcttatttctatgcgtgcctcaagtaaaggagggaggagaatcgaatagccagctttatggataaccaaggtaatctgattgaaagcaatcctttggtggttgatcactatattaatcattttaaaggttatatggggcgtgatagcaatgtcaccaggaggcttgatcttgattgtgtaagaatggggaataggctgaaccatgaacaacaactaaggttgattaaaccgttcagcaacaaagaaatcaaggctgctttattcagtatcccgagcaataagagtcctggtccagatggttttaactcagaattttttaaagttctctggtctcaaataagtactaaagtttgcctagcagtcaagagtttctttagtacgggagctatatgttgggttttgtgccctannnnnnnnnnnnnnnnntataatcagatttacttatttataaa

SEQ ID NO: 19364 - DNA, 6042 bp, Cannabis sativa
gcctaattcatcaactactttcactactgctactactacaacaacttcttcaattgcttcaaccacagctcctccaaagaagagaagaaatcaatcagcttcaagcaagtcatctctctcttacctttattattatttgttttattattattggcgaattaaataaagaaaaaaagaaaaccctaattttaaaaatatatgtgtgtgtgtgtgtatagattctgatgcggaagtggtggcgttatctccaaagactctaatggcgacaaacaggtttatatgtgaggtttgtaacaaagggtttcaaagggaacaaaatcttcagttacacagaagaggacacaatcttccatggaagcttaagcagaagaacaacaaagatccacctaaaagaaaagtttttctttgccctgaacctacttgtgttcaccacgacccgtctcgggctttgggagatctcaccggaattaaaaaacactattccagaaaacatggtgagaagaaatggaagtgtgagaaatgttctaaacgctatgctgttcagtctgattggaaagctcattctaagacatgtggtactagagaatacagatgtgaatgtggcactctcttctccaggtatataattataataataataatatttacatatacatttcaacccagaatttgtttgatgaaatatttgtattttattttgaattacggttacaagtgtagtcttttgttttttaaaaaatatttgagagttatttttcgaattacaaagtgggaaaaggaagtagtgataataagaaaaacaagaaaggttattattattattattattattattaggtttttaattttgttacctcgaaaacaccgctctcttttgatgttttctgaggttcacgtgtgtagtacacagatatatatatataaattaaaaagagagaaagcatattgttgctggcttttgttctcatatggattggacttgttcttgtggggctttgtttctttctgggttgcctatatacatatatacatatatctatatatatagactggacttgatcaggaactctttcagttacaacctcatctatcttcacacacaacattaattaacctcatcatctcactctataaaaatatatgacatgcttttcatccatgacagttctattatctctctctctctcatgtgataaatcttattttttttttcctttttttctgggtgaagtgataagccactctgtgtgagtagttactaggtaaatattcttaattggtacgataaaggccaatgattttactactagcttttgaagtcactttttgaagtcatcaccattagcaaattgtaatgattgacttttgaaattttacactattttcctttgtagatattaactgcatagttacctagtccgtgctatgggaattagtactagtactactactgctactttttttttaatttatagacaaaaaataatgtgatgagttggactattcatggttctcacctaattaactcagtgttaaattctaaaattagccctgggttattatctagagttcatatatgtcaatgtttcgaaattaatatttgttacatgcaaatatataatattatatttatcagtaagtacgtacattttataattagctatatatatactctttttaagtaagacttagctagttttttttattttgatgagtaaattttcaacgaccacatgcatggtatactttattatatatgttgtacaattaaaacaaaagaagaaaattccttttagtatttattaatattagaatatatgttatagtaacaatataattgttaagaatttgcgttatgttataacaggcgtgacagtctaattactcatcgagctttctgtgatgcattggctcaagaaactgcaaggcatccgacgagtttgaacaccattggtggtcaccagctctacggtaacagccatgtgaatttaggactgtcacagatgggatcccaattttcaagcctacaaaatcacccatctgccaataacatgttaaggttgggacataatattactactccaaaaatagaaaacctcatttcattatcctcatcaaaccctaataataataataataataataataattcttttgggaaccctactcagaattattctccttccacatttttcctccaagatcatcatcataataatcaagcttatcatccatttttgaacaaaccatctcattcccttacccaacttccagatcttcaatccaacaataacaacaacaacaattcatccgacattttcaacctaggatttttctccaacaataatggaaacataagatctgatcagttcaaccttgatcatggtggtggtaataacacaaatggaatgccaacaatgttctctagcatagccgatcatatggcagctggtcatggtggtgccgccatgtcatctctttacgggggcggtggaaacaggcaagataacaacaacaacaacaacagcaacaacagcctctcccctcatatgtcagccaccgcattgcttcagaaagccgctcaaatcgactcgactacttctagtctagtcgacgcgccttctttgcttagaagcttgagaaattcggcagctagggtttcaaataataatcatgatcatcacgatgatcatgatcatgatcaccaacttgaagggttaatgaactctttagccaacagtaatggtggcggcggcggcggctcgtccaatcttaatgttttcggaggatttatgaatgccctaggtggtggttcaactactacatcgcttgatgttgatgatcaacatggaaatttgtgtgatgatcagctggatcatcatcatcatcataatcatcaaaccaacaattacaataagtttcatcagaataatttgggggtgagttttggatcgggttcggataaattaacgttggattttcttggtgttggagaaattgtgaggaacatgcatggtggtgggattagtagtaatggtaacaacaatactattactgcttctcttgacgctcagttgaagtcaacgcagcaaagtcaactatttggtgggacaacttcgaccttgcattaacaagaactatatatatatttataaataattataataataatagtaataaagtaatatttatatcataaactttagataaattaatcagactgtttgtttaaatattaaggtgagtatacatgaacttgggaaactagctagtctagccagcttaattcatttttaatgttttatgatcatttgtgcaagccttaaggcttacatgtttagatccattaatttcatattcagttataataattacttgagtgatgatcatatatatatatatatatattgattaaagtatggattgaatttgaggcatatattctttgttctatgtgcattattgataagttgatgatcaggataaaatatcgagaaaacttatagtaagatattttaaaataaataatattatataatatttatatatgcatgcagattttattgaagtaacttataattatatatatcatgaagtaagccatgttcgaaagaatcaaaacgtcatatatatagacatggatcgatgcagagccatacttgaaaagattcttctcaatcactacattccaacatgttcgacaagcaaagctttataatttattattatttgtctcgacctgaccctatatatacctccatatattatattaattctggttattagttgaacaagatatatataaatatatagatatatatatattaatatatatattttgcataacctatagagaggcaggggaagaaatgtacgtgttgtaaataattcttttaagtataaattaatgaagagttgtttggtctcctcctaataatttaataatattacttagaattaattttatgatttgcaagtttgattttgttcccaaattttcacaataaataatagaaatatattaatgtcttgtactctcccatatatagatttagctattctaactcctgaatgaaaagcttgtgtgtataatttataaactatatatgatcatttctgttttgcacatgcattgaataaatacattgcatgaaaaaacattctatatattgactttttagacttgcaattgactttctagacttatatgcattggattatacctacacatatattatttttttaacatcaatattgaattaatttttgataaatttttcctaataacaattaacaccacaccaataatacagagtctacttttataaccagatttgagatcatttatatcttaattaattaaagctagctgagaagcttgcaattaaagtggagatgtgtgttcttgatcagtaaacctaaaaagattacaaacatacaaaacgaaccaagaacagtacatggaattaatgaaaaaaatgatcaataatgtaagtgcagaaaatttaaagtaaattatatataacacagaaatattttccaatttggagctactcctctcgaatggggattccatatatcttcactatattaatggtatgttacaatatgaactggacttttgatgaattacacataacaaacttttcccttaaacaaagtctttgaatgaatgaattggtggagaacaccttggaaatccattgaataagcacagcccatcttcccttgatcaataactttcttcttcctctcactcaattatctcttcgatcctttcatcaatgcagtatattgaatgccatgtcatcaatccgtataaatatttaggatttacttaagatctgatacaacaaattccccaaaaatcagtattaattctaagttctaacactttagccttcatcaataaattccaagcatagcacaaaattaacttgctaagtgttagaagtttagttcccattacataaattaatttttgtaaactacccaaaccaagtcgaaaagatcatgataaaaaatgcaaacaaacaaaaaaaggacaaacccaatttatatatatatacatgcggatgaaaaataaaaccaatccacataacaaacccgaacgactaacttaattaagagctttctttttatatttttattatacataattatatattatatattatatatagagcttttggtctgctaacaaagccgcgcagtgtatggcacgtgatgcttgttattggtcaggtcgtctatttactgagagtgaggtcccccttgctcttcagcgccctttgttttagcggatatttctgtctaataaaaattattttcattcaaaaaaaaaatatagatttatatataaaaaaccatttaaattcattaatttaaaatttagattaaacctatattttttacattaccaaattgaaccgaaaaaaataactattggtggttggtttgaaaggattaatccaactaaatcgaccaattcattagacgggttactatttttttttttgacaggttatagtgttagagttttttaacccgctctttatattagattgaataaaatatagttgctattacaaaaagtactattcttgtcgaccctcaaatcggtttttttaagaaccgtcgttaataaaagtaagtgagtatttaaaatagtcggctatagttgagtatttataacaattttaaactatcatttagtatttctgacggttaaaatagctacattattgaaatagggtacttctaaaaatggaatctctgacagttttaaaatgtcagttatactatagccgacaattttaaattatccgctttagtacaatcgatattttaaaattatcccctattccctattcacatgttatataaaatctaaaaatctcatatttgatatttaattgatcattccaatatcggtctctctcactcctctctctctctctcaggcaaaccagtaccaaagctccaccacctccaacgactcgagccacgaccaccatctccgctctctctctctctctctct

SEQ ID NO: 19365 - DNA, 4432 bp, Cannabis sativa
  modified_base (4113)..(4116): a, c, t, g, unknown or other
ttttttagctattttaaaacacctgttaaaaatattctattgaaacataaactatcttgatataaataaagattttttatttgttaaaagataattcatttaattccattcaaccgttaaaaaataattcatttagttccctaaaatggttcttgatattactaattatagattaacttttatatattagtgagcagttatgttaaaattgtaggcaaaaaaactctgtattttggttatgcctatcctatattgataagaagctgtcgttcataccaaccatttctagtacttgatagcacatgtcacaattaaaaattaatttagtaatcttcggtttttttttttttttttttttttttgaataaagatttcattaacagagcaaaactcaaacaggattgggaaggtcagcacacaccgctgcccttacctcagagggacaaaacctcttccaaatagcattagctttagactttaaagctgatttagctagaacatgtgccactttgttagtttccctaacagcaaaacataaattcacacaaccagaaatagaagacaacacactaacatctgctactaaagggtcaaggtcagagcaatgagcatcctttctattcaccatgttaattgcttgtctacaatctgattccaagagacagttagagaaacccgactccaaggccagcttgatcccagtcttcatcgctagaagttcagcccctagaggagaagaggagttcgaaaaaaattggcgagccgccacaacaatgctgccattggagtcgcgaatagcaatcccaactcctactccaggatccttgccgattacactagcatctacattgatcttaagaaagtttggagggggaggggtccatttaacacttctgtcttggctcgggcatgtatggagggttgtctcaatcttaagctcatgagtaaagtctaggcaccattcgacaagagctgacggagaagggatggcatgaccatgataagccccaccattcgacaaatatatttttcaaaaataattctgattctctaattaataaactatttaaatatttgttaccaaacttacctttaatttatgcacaaaattacaaggttgttaaatattatttaaacacgtttgtaaattattgctaattaatgattgattaatatagagattatatcaggcttattatatacattttgataacagaactcattcattaattctcaaagcattcgacgagctagcatgaataacaatggaaaagtaaatcattacaagtgagtaattacaaaaatctgagattaaacaatgcatggatgataattaaaggagtatatatatagttaggatttataattgctaaattaatgattaaatagccaaaaaaaaaaaataaaataaaaatatacaattatatatataggatctaagattaacaaatgatgaatgagctcaaatctctctggcaagtcacagttattataacttgagttctaattgctctgaacattcaccttcactagcactcgtactagtactactcctccattgatttccttcatcagctggttttggggaagccatattaactgggcgattattattcacttggtatggtgcttttgctgccaccctaaaaatttataattaattaaaaaaattgattttattaagaaaataataataatcaaaaaaactattaagaagagtacttaaacgaacctgtcttttctcttctccaagaaccgatgaagtgagtttcttctggcaattggcaagtctgtataaaaaagaaaaagataattaattcattaatcaagatattagaattcttaaatgttagaattgattaagaaattaaaggatatataattaccagatccattagcggcggcttcagcgttactttcttgaattggttcaagagttgggaattttttattagacttgggaataatgggaacaactgaagttttgtttttaatgaccaaattggaattggagacttcatcagtgtcagcaggagactcattaatattaattataatattggaagagtcagtagttttctccttgaaatttagagtagtaacagaagcagcagaagagttattattattaattaagtttgagcttgaagagcatccttttctagccaatgccaacacttcgttcgctttatcaatcggcagatcgttaaaagttaggacttggccagcgtaaaatattgtcatttgtgaacactcaacattcgtacttgtcgttttcctataccaataatcaacaaaaaaataaaaaaattaaaccttttagtttagtttcatcccattgttgataggaatttttttatttttataattcaaagcagttattttttctatatttttacaaacttaaacaataaattttttaaaaaaaaattaaaaaaacaataaataaggtaattcttcatattaataatagggttacacataaataacctaaccttccgtttgtaataactaatttcatgcgatgatacagaaaaataacctaattttccgtttttaaaaaaactacatgtattgccgccggccggtgaatttatgtcgttttcttatttccagcagctaggggtattttggtaatttcgttaaaaagtgtgtgaaatctcgaccattattttgttgaaatttcagttcagcacggaatggaatgaattatgtttgtttgtttgtttattatatattatttcaaataatttctcaatcagagtctgaggcacaaaatatttaaggcaataataaataaataaataaataaagcttaaaaaatagtgagacacacaccttggatcaggtttgatagagtcttgaatattggagtttggggaaacaagttggggaaaaaaattgggggatttcaccattggtgaggtttctgtagcagaagcacttcgtgtactattccctggagcttgattttccatatgcatattggtcaagaaattcattgaagaagaagctggagccaatttttctgattaaaaaaatccccaaaaaaaatgttaaatttttcaagtttttgcccccaaaatttagatctaatcccttacccaaacattaaaaacaataaataaaaaattatgtaatataactcccttttatttcagatttattatttgcagccaatccagcctcagtagctctcttctccttcaaaaactgactcaatagagtacatgtctgagcaaaattagacttctccaaggcctttccaactttccagttgggatttttattgccttctgccatttttctttttgggtcccaaaaacaataaattggaatgggtttttgggaagaagaagaagggttttttcccctaaaattaagcttatgggtttggtttagccacttctaattttgagatttgagaatgattttttagtttaaagaacaaggcatgagggattaggaaatatatgggtatagggctaagaagaagagagacagagtgatgtgttcgtctttctcttgttcttgtgtgagagtctactttggctttgttctttctttttattttaaataataataataaaaaaataaagtaattgttttttttttcctttttgtttaaaagcacgtgtttattgcatttgaataaagctaaatgtaattttcaaaggatatataataatgaaagggataattatatagactcgtggaggaggttgatgaagggagggcaaagcacctttcacgtccacatatatttaccataatgtcctttctcatttttctctctcctatttaattaacatgctgtggtgacttagtctactctttcatactcatacaaaggtgtgatctagctagttttaaaaaaaaaatgaaaaaaaaacttagatcactttactttttttaggaaaataatttcactaagttttgttcggttttttgttattgtaatttgtaagaaaaaacccccacaaaactaagttttgttttctatcgtaaatttaaagatcgtgggataattaatggttgaagatattttaatttttaaaaattttatttacatttaaaattttttaaacaatactttattttaataatttttannnnatataaaatttatatttttaattctactaagttttttaaaattttttttttccaactcatattcttaaaaaaatttactcatcaaacaaaaataaattatgttttaaatattatgacaaaaaaattaaatttaaaattatctgatttttttttttaagttttggaattaaaaatgtttgctaattttttttttttcttatttaaatgacgcgagagaaagtaaagcaaaaaataaagtgaatgttgatgtaataagatacgggaaatttacatagtatactaacttttgctattacaaaaatactgtcaggcggta

SEQ ID NO: 19366 - DNA, 4069 bp, Cannabis sativa
aaatatatttatttatttatttagcaaataaaaaatatatttattaggttgtagttgttaacaaaatcttgttttttttcgctataaaaaaataacaattcttttgtaaagacaaaatctttcttgaacaatatagaaagatttggtacaatagcaagtttgaaaactttcccaaaaataataaaaacaatttgtgatgaaactctcttatgttttaatttttatacacttaatttttttttaatagcaaaattccttataagtttatttttctttacgaatttgacacaccagttaaatattacagttaaatatcaactgaatgaccactatatatacttgtatatatgtaatagtaaaacttcgaagttaatatagtagtaatccagttgatattttaaccgataccttaaatttacaaagaaaaataaatttaaaagaattttgttaaaaaaataaaaaaaaattaagtatataaaaattaaaaattaaagaaattttgcctcaaataataatatatatttataaaattttgagataagtaggtttgaatagttgaagtagcaagaccttgctaaaacacgtggtataacatatatacagaaatcgatcccaccaaataaataaacaaatcctcaaaattctatcttattatgattttaaaagagaagtgttacaatagaataatagagagagttgtacaaaatacatataaggataataattaagctattaggaagaaaaaaaaaaaagaaacaaatattattatgtgcccaacaacaaccacaaggtggtggtacacgtcagctttccggtggccggagttcgacttctctttgtcatcttcagttttccggtggccggagggatttgacctctcttacttgacaagtgggtggagtttagagagctttcggtggtttgacttgtccatagttgatgatttggtttggactttcatctcactggttgagtctttggctttgttatccatgctttgcttcttttttgtgttttgtggctgtaccctttgatcaggtataaacatatttatatgtatatattaatttgtatatgttttttattagcttataattgatgatatctgaattgggttaggcttgttttggagagttgaccaataaaattgaatcaaattatgaaaattcttgatttttaatttgttataaagggtttttgtgtttgtgtgctgatcaaattattttactaatgtttgttcaagtctcttcaaatttgggaaagtataatattttatgatatgactaaaatgctacccaaaagttatgtaagtttaattctattagatttatctggaattggagtagtttggttgaaaattgagaccatcttattattatcttgcttgattggcctgttaatcagtctttgacaaagctaattttgtttatctaaagcttaatacataataatcaacagttatcagctattgatggattgtgtcggttcattattaaatattggtgccatttattttatgtgtatatgccatttgtcttaagtgtacataataatatcatacattaaagttatagagcccaccatattgtaacttattgtgataatacagtaatgtgtgtccccagtgatagaaaggaacatttaaaacaactctttttgtttatcaatcatcattttctcacatcatatcaatagtcatattattttcttccccttttttgatcaatttttacaggttgttaaatatttgtttattgtaactggtttgtgtatttaatttttgttttagttatttgagtaagtagtttatgtgagttaattttaatttagctgttttaggtatatttttgctaaattatttaatgtaattaatttttgtgatttaatttataaattgttgttaaaaattattctacatatacatattaagtatttgatttttgtatttgatttatctttttatcattttaggttatatatttgttcacttatttatttgattgtattacaaaattagtttctgtatgtaattattgtttttgttattttacatgattggttctacgatttagtttttgattggactaatctacataacttgttcgtcagtgtcaatatttttaactggttgataaatataattagtttctcagtctcagattttagggtccaatttcggcaacaaccctaacgtctagcactgatgacaatttcaatgtctaactccgagtaacaacgataattccatacaataaactagaatacaaagcatgtgaaattcatatgagttttgatattcgtaattggtttctttaataataaactagttttgatatttgtttattattgctttaacaaaattatttttaactcgtttttcgttaaaaaattaatttttatggtatttattcttatttatgatgatttatctcatatttttaagtgtttttttttaaatgttatattttgaacaattaaatttatataccagatatatataggtaaatactatttttgaccctgtgttttgtaaaagttattaattggactctttgttttattaaatgaaaaaatagatcctatatttttcaaaatgataaaattaggacactgagcttaatttttttaaaaaaaatattttttaatatagctaactttatgataatttttaacacaaataaatacaaaaaatataatcagttttatcttaacatctctagatcaaattattattaaattttattttaacaaaaaattagttcagggtcctatttgtataattttagaaaatacagggtttattttgtcatttaacaaaacaatagaaggttaaattggtaacttttacaaaatacaggtctaaaataatatttacccatatatatatttgatgaaagaaattctccctctttctttgtaacttttgttaccgttgttatcttaacctttatcggttaacccaacacaaaatatatatatacatatatatatatattttgcaagtagcactaaatttataggatactaatttggtctatgacaaaagtagtattttcagttctctcaaaaaagaaatagtatattttcagttacaaatttctcaaaacggttcaaaattgaaaatgctagagtggactaataatgaaatgaaattagtttccgtttatactattatatgtttgtccttatgtaattcaattcaaatggaatattcaaacaaagaatatggtaattggccagtgtacattttacagttatcaaatattaaagatgtaccaaaacaagtttcatgtgtcatgtcctctattctggtttttcaacactataaataggacccatatctacactagaaaatcacccattacccaaccaaaaaaaaaagttattatatattgttcttattctagtcatctttatattatttctcctaaagatgaagaatatcatagctatgtactcttttgctgttgtttttgttattttctcacttacattttcaccacaactaacccattgcaggccaaataagcttgacgacctaatcgaaagcacatgcaaacaaacacccaattacaatctatgcatctcttctcttcaatccgaccctcgaagctcaaaagcaacaaacgttgaaggactaggccttgtaatggtcgatgtggtcaagagcaaagcacaagcaactcttgaccgcatcaaccaattacttaagcaacagaaaagtagtagtactagtactggtactactactagtacactgaagcaagcattggatcattgtgctctcaattatggcgccattttgaatggcgacataccacaagccaccgaggcttttaccaaaggtgacttcaaatttgcgcaacaaggtagtgatgatgctgcaaatgaggctaatttgtgtgagaatgagttcacaccatctggctcttctcctattactcagatgaacaaagatgttcatgatgtggctcttgtcacttcctccatggctaagatgttattatttgcttattagtactttatttttagttatgcactttgtattttctttttaattcgtgcttat

SEQ ID NO: 19367 - DNA, 2939 bp, Cannabis sativa
aatggtcgctaggcgacaacttttgtatcaaatattttgtattaggattgtaaatattttaaatatgggatcccagttatgtaaaagataattattttcaattaaaaagttttaataaatcatgaaacagattgcacaattaatataaaattacgataacacgcctaaactagtaggttgttacattataagttctggtagatctattgatagttggcattccccctgattgatttgagaagattaggacctgttgcatgcgactttcaatcctatggctattcctttatctgttacttttgatagcctttttaactctcaaggaaattggttaaggggtgagatttcaaagtggtggaaaagatccttcatttctaaaagttttttcacacctctaaagatcttcttatttagaaagactctactaacaaaaagttctccactaagactgcctactagtctcttaataaagcttgttaacgcaaatttttattaactaaataaatagcttttttagcaataaataccctacagaatttaataataataataaacactagatattttacatgcttttgtagttaaaatctacatactctacgagtccattttattaggaatattttttagaatacagagtacaaagttcagtatatcaaataacagaattttctctctattttttatcgttcgttttctcatggattctgcccttatttataggaatataggttgatgattatttttattaggatttattcatttacagctgttgatgaaacgtggacatttgccacgtttcatttatttatatatgggataatatctaataaccgtccaactgctccttgtttttatcctttagacggttatgctgactaggaaggttgcatctcgccaaacatgagttctccttcttatccatcttaataggaaaaaacactaagtgttagaagtacttcatctcgttgtacccctttatttatattagtgatgcgagatgaccactacgttgtgtataatgtgaggcgattgagtgttgttactttcaccctattcgtgtgggagagtcaatatgattcacgagatctttagatatctcttctcgtatattttactatgtttatccctagacgtatagtttaatatttgtctttttttgattttttgattttttagaaaaataataaaagttgaaaactaaatataaatattatattttagagtatatttttagggttgcttgtattggagtatttttcttgtaaaaaatggcaaaaaacgaagaagatagagaagataaaatattatattttatggtaatgtaaagtttaatggcaacttcgagcattgcttgcattgaagatgctctaagcagtagaacacggagcacccaacgatttgtccaagcatagattcattaataactctgccaatcagtatttgcaatgatgataatcaggagctgattttaccaaatcatgatttgtaataagggatctattattaatggagaaaccatggaagactgtaaattgtatttcattcctatagtttgttaaaaggtagagagaattaatattttatattacatgagtacacatttgagccattaaacatatatagtgtaattatagttttaacataatataataataaaaatattgatgttagttacttaaagagaggaattaagatgatgagtagaaatggagtcccttcttctgcgagtaacaacggccaaacgccatgcattaagaatatggtctgagagtaaagaggcaaaacaccattggagggagtgtgcccaataaggagtgcatcgatattcatacccaattcttctcaccccagctcttgcataatcatctgctgttggtataaacatcgatgatttctctatcgatgcagcctttgacaccatttgtgttgccacatacaatggtacctacatcaacattattacattaatattaatattatcacaccactcctcaactttgagggactgttttgcaatttattatactttttaaaatatttgagaagactttaattttgtaatgatacctgacactgtacatcaattcccaagtgtttgtattccacgtagaggcatcttgatagttggtctacatacctatattattattatatacataaaatttaattaattgctcctttaagatacagattcaatatatataaaaaggaactttatatatatatatttttttttttttgaataaaaggaactttatattttgtattgtgtttggatatttattattattttatttaattattttaggtttatttaattatatttatcttgtattaaaaaaaattttttaaaaaaaattaatttaaactataatattttttaatttaaaatataaataatgtatttttttaaaatctaattatttgaatattagaaactaacaataataattatacaaaaaggtgaaaaacgatttggacgggttaaccagaccaaatcgatgaaattattgaatgggtttaactttttcaaaattattaattaagcagattacaattaaatatttacaattcgatatttatattaaattagtaaaaattaatatcctataactcgaacaaattgaccgacatatatgtactcttaattttcagctctaatttataatattactgcacgcatttctcacctttaaaatttataataatatcctagatgtatttgtgattttttatattatttgttgtatatgtgcccatacatcataatataattaatcatatctattgtaatttgtcatatataggatgtgttatgtatatggtttcacccatattgttcaataacttgaattggatacataagttttgacatatggtgtttcatatagaatatatctatagatatagtccttaattgtaatttactatatagt

SEQ ID NO: 19368 - DNA, 3207 bp, Cannabis sativa
atgtcaaagctgtatcaataagtaataaaataataattcatccaaaaatttcccaattgttcataaacaaacttttgttttcttttacaaacatgtgtaagctgtcaagtcaagaaaaacccaattcaattcaatttgagttgtctcatatttagtgcatcattcctccaatatggtcccataacttgcttatttatgtcatctagttagtaaatatgcaaataccgacgtgtgaagactctcatcttttttcgtgttcatcctgaaacgagcagagactcgtgccatcacgagcagactttcaaaacgtgtcagatcagctaaaaataatgttaagttgtgagttaattttagagagcaaatgctatttagtaacagtggagctaattggccaccatttatcatttagtgcaaagtcagatgacatttaaaggttatattcatacttcacattcagccttactttggagtctcaatagtcaaatgatactttttctaaaactcatttttggcattttactggtcaagaaaaaaacatgatacaagaaagccaacaaggtagcactatttacaggttcagtaaaatgatccaaatatagtgattaatttcacatgggacccctgaattgaaagtgagtagtcattcagtagcccatccaaaaaggggtccaaaagactcacgtcccaccaaaactagccacatgacacaagaaacaacaacacaatcataaaaccttccaaataaaagaaaataaataaataaataacagattgaatgaaaagaccaagtagaatggtttaaaagaaaaggagaaaaagatcgtgtagattctagggatggagagtcacccaccccaattagacaaatcgcacatgattacaataacccattcattcacaaccagctgccgtcgccttcacgagtccttcattttagccttgcctttcactttgactttctcactctttcaaatcacataaatttctctactagtaaccactctttgtatgtatgtgtctatatataaagagagagagagtagatttgttgaccaaaccacgcaaatgcagggaatgggatcataaagacccgcaatttaatcgctcaaggctcaaacaaagacttcaatctcacgtaagcctttttttcctttcttggttatataaaaaagaaaaactcttaagtaaactagacgaaggttcttcacttaaacttaaaggtcatatttcattactactaaataagaaagaagagagaaaaaagattaggctcaaatggtaagccccgttggtgagggtgactcgctcccgactcaatcccacgaccctctgagtcgactcgtccaaagcattttctcttacaacagcaatgtcatgctggcagctctagtctccttgctcttagtaatcgtcttcgtcttgcttctccatgtatacgctaaatggttcttggcccaggcccaccaccatcaccggcggcgaaacaggcccatcaccaccgtttcccgcgttctcggcccatctcgttttcacagctttcctcctttcaattttgatctctcttccacaacattccaacattccaaaggtctcgacccttctataatttcctccatacccttgttcgtccacaaggtcaatcccaactccaccgcctccgttgatctcgatggtcttgagctcgagtgtgtcatttgtctgagcggcttcgaagacggagaagtcggccgtaaattacctaaatgcagccatgaattccacttagaatgcatcgacatgtggttaggatctcactcgaattgcccaatttgcagagctccggtagtctgcgaagaaaaggccgctgccgctgcggcaactgtcaattccagcaacggccaagctaattcaacggaagcttcgccgaatcaagcaacggcagattcagtcgtggttgatgtattggttactccggttgattctgaaatgcccgattgttcttcgccatcttcgtcttctccatcttcatttggatgctctctaaagagaatgctgagcaggaataggtcggagaacaaggtttttccggcatccacagtgaatgagagtaatcaagtataactagctatgaaaaaaattgctctgtttcaatgtaatgttcatatgtagcttcttctttttctattttttttagtaaaccatttaatttatgtacaaaatagtttttcttttctttcttgtgggtttctcgtgattgagtaacattttcaatattacttatctaaaatcattgtcattagccaaattataagaaaaaccttagttagtgaacaaaggtgcaatgccatagtcactattcagtttaatcctataaactaacttaagctatcaatatcattagtcacaagttaacattttgtcttattagaaagctttttagattttcggtttttgttttttttttcttttaataataatagtgtttggttttgagtttatccccaaaagccagatctgagctacatgagtgagttgagttgagggtagctatggccaatgcttggtcgactaccaagcaaacagtacacaactcaaatggggctatcagcaattaagcattgaatatggtacactgtgtgtccataactttttcaatttctttttttcgtttttcaagtttttggggttcagtctaattatgcaactggtcccaatcggtcagtatactaagttttacaataattgtattcgtaaattacaaactcattaaattatgatctccatgtcttctcaacttcgatttttaattgtaggaccctttaaacttacaatataccaaacaaacccacaaatattatcagcctaaatcaatagggtttaggtactaataataataaatcatggtcattaaatggtgattatggtagtagcagagcatggttttgtataatagaattgtttgactggtgtgaattgtcttcttcagtcttcatcttaacatgtattgtggtcaatgtttgaagacttgcgtcagtttagataaaaaaaaatgttatatatatatataaatatatatattaatagtcaagaaacagtttcaaataatagacatatgatctatgtacgtatgcagtaaagcatttattatggtcagatccatagccggatctagtgccgtggagcattcaattcttattttgtatgtattcgcctaattattcatttttt

SEQ ID NO: 19369 - DNA, 4871 bp, Cannabis sativa
  modified_base (4802)..(4806): a, c, t, g, unknown or other
  modified_base (4835)..(4842): a, c, t, g, unknown or other
tttttttttttttttggtgggctcaaggaactgttctgctgatgacatttatttacttttttgaccatttttttttaataagtaaaatcgttcacagtcacagacaacctatatatataatcatctacgtagaattatcccatgatctagctagagagaccattcggttaaagaataatttttgacaaaagggaatgtccctttttcccttaacacgaggagaaagactctacagtgtgatttactgtacatggaagactttctttcaatggctctgatttattgattagatagtgtgggccatagctagctatatacacattaaagttcatcaccaaaaaaaacttaccataagtcatttcattgttatctattcatacccgtaaattaatttttttggatttaactttttcaggttttttggttccaaaaggctggagaatatatgtatatacaagggaagtcaactacgaccagtttttatatccagaccctttaattttcaatccatggagatggctagaggtgacacatttttttctgttttttctcatcttataatcaatttgttttgtttacatacttatgttactaataaatataaaaaataaataaaattcaggacaagagattggagtctcaaaattacttctttatatttggaggaggcactagacagtgtcctggaaaagagcttggaatagctgaaatctccacattcctacactactttgtaactagatacaggtcagtaatgatttttcacttcccaacactttattgatttaataaggcctttttgttaattacctttgtaattttaacatattctgtaattttattctcaggtgggaagaagttggaggagataaactaatgaaatttccaagagtagaggcacccaatgggctacacattagagtctcatcatactaactattaacaacaatatttatgtacagagaaaaaaaaaagtatagagtattattcaaaggagggagatttggtgtagaataagccgggtcctaattaacaagttaagttagtggaaattgaaggagttttgagcatttttcttttgtcggccaagtttgctgtaaattatattcaagagcaaaaaaaaaaggcagaatcaatctttttctttttttgttcacttttatacacagtttggtgaacttgacttgaccaaaatggtacatctttgtcaacttttatgtaaccttgaattttatatgaagttcaagaatacattgcaaatttggactgagattagtgtttttttttaataacaagtcaaaagagagaaatgtctaatgaaacgagcaaaacacatcattatcattataacaacaataataatgataataataatgaagacagaatgagcagcaaattgtatagagtgtgtaatagttttactttttctactaataatttgatgttttttggatcttatatggaaggtagagcccaccttataataataaacacgacacgagtgaaatttacattttcgattatattttaggtagaaatatacatcgaaatttacaaacgaatcttcggtatattgacagccgatcaaaatgtggtattactttaaaaataaaaaaataaaaattgtcattttagactaattaaatttttgatggaagtccttaataaaacatacacactgagaatgtttaactttataacttaaaagttatttttaatttttaaaaacataaaacagcttttaaaaattaatagagcgttgattaatttttttaaaaatagttttctgaaaactgaattttaaaaaattaaaaaataaaaaacattaaatactattttctattttcaaaaacaatttacattttttttgtcaaacatattctttttatattttttgctcacatacttggatttggatcttggacttggaccccaacttggaccctggactctggactccagacccagactcaaacctcgacacggaccgtggaccccagacctagacccatacacaaacatggacttagacccgaacccagatcccagccttgacgtggatcaaaacccagaccccaaaccccaaacctcggaccttgggcttcgaaccccaccccggacccgaatccgaactcggaccccaaccttgaaccccagacctggaccctgaatcccaacatagatggaacatgggatgaggaatttattagagcagtgtttaattaagatgatgttaagttggtactaaaaattgctagcttcgggttggaatttgaggataaacttatgtggcactacaccaaaaattggaaatacacagtgaagaggggctattgtatggctatttccctcaataaagacccagcacagtcagatgacaaagagagagtgcaatggtggaggcagttgtggaggttgaaaatttcaccgaagtgttgggacagattctacttttaatagatgtgtaatgggaaagtcagagaatatgtttcacgccatatggggatgcaaggcaaataaagaggtgtgaaaattaagtgagtggaagacaagatcaaatatacatggtaaggaagatgtatgagcctttttaatcaaattagacaaggtatgagatcagtctacctttaaacatcttctaattatctcttagcatatgcggcatatacgaaatagtgttgttcatggtggaagtaagccaaggaacatgggtgtattgaattggtgtgcacagttttggctgattatagagggtccaatagacaaccaaattctggtttatcgagagaggtcattgtttggtcacctctccatcaaccagctctcttgacaaattaagtatctacatagaagaacaaatataattaatggctccagaattaataatccataaatatttatcatgttccactaagttagctttaagaacaaactttcataagatcggagagatacttgttacaatttctcttccagtgtcccattatgccacagtggaaacacttgcctttcgccttcttatccttggacttaggactggccttgttgttcttggctttaagggccttctttcttcttggtttgggcttgccactacttttgtccttattgtcccatttctttttcttatcaaaagaagaaggagggctagattttgttcaaacaatatttgatttacctttcttgcatttgtccttgttaaggttctcaaagacggtcaactcgttcaacaattgagtcatgtagaactttagcttgttcatcacatagttagtggtgaaagctttgaagcaaggagatagcgaatcaaggatcacactcactttgagtcttttcgtcaatgatagccacatgtatctcttccttatgcattagctcaattatatgcaatacatgagtccttacaaggacgcctttctttatcttacgattcatgtagctacgagtagcatcatgtcttgtttgattagattgttgcctaaacatagcttgtagagaatttattatttgagatgcattctctatttgtcaatgcattttacgtagaacattgtccatgctaacaagcatgaagtttggccttatttttggattgaattcaagagtcatatttgtccccgaatattttttgagacattggcaacggtctcctaggacgctccttagttaggacaaatttatagttaattttcacaaaccagcatcaattcatattagatttctatttcatgaaattttcaccttagtataattagccataataccaacataattccaacactctagtcgtattgatattggtataacattaatccatattccatactacctagcatactagatatcagtatcctggtgcaactctatgtgcaaacatatttatatctctaatatgctagctatatggcagtatcatactgtcttacaccctctaatatcactagatatcagtgtctaaatgaactctatgtacattcatacttgtatctctaatatactagataattggttgtataaaaaatgtatatctaaacatgtgcatctgaatacttttgttgcctagtattcataatcatgtgtgttgagaaacctgagtagaaatctactcgatgatcggagaccctaagtcacgtgctagtaagtgccttgctaaaatactttctcggactaaaattcataatttaaagtttccttgtcggtaaataaggtgacaatgccctaaatattctattaacacaaaaaattgaggtactccccaaaatcctcaactaggcaatcaaatttacaattgggtgcccaaatatttgggcattgccagcataagcagttgcccggtgctaccaatcgggcgccgattttgcccaatttctgtaattcaaaaaatttcgagttctaatcctctttaacctgatcaaatcattttattgatcaatttataagtttaacaatatattaatgagttctaagtatatctatgaactcaaaagactattattcattattttaaaattaatacttcatgaactttagttccaacaaatttaatcttcttaattagctatttccttactcaaacactaaggaaaaataagtattgcacttctaaaatattaatgaaacctaactttacttcattaaaaattaaaaatcaaaggagagtaagacatcccttgaactttaacaatctcttcaaaagaataattcccaacttatcatcaattctcacaagaagtttgtaagaaaaaggagagaaaggtttggcttttcctttgtaggtggcactacaaaaaattttacttttnnnnncaacaaaatttgtgattaaaagtgaaaannnnnnnnctaattataaatcatgattcttatgttgt

SEQ ID NO: 19370 - DNA, 3977 bp, Cannabis sativa
tcactcaaggctgaataattgaagaagaaaagagaggatgtggttgctcgggacacgggacccaaactgggattaggataaacacttaggattcgagattgtaggcttatacccgacccgtagtcggtgtgtagatttgggactcggaccaggacttgaacccaaaactgaactcaaactaggactcagacctatacctagacccaaacccacacttgggaatcaaaaacagaacctaaatcgaaactagactgggatctcaaaacgggactagggctaggacccagacccggcctcggaccaaaacaaggaccgaaacccatacctggaccccgctctggaccaaaatcaagatcaaaacttgtacccaaacccgaacccgtaacaagacctgaacacaaaaccgaacccataagaacacctgaactcagacccagacccgaaccaaaacccagatccagactgggatcgtatcttgggctcgagctcgaaactaaaccgtaacctagattaggatccaaaccctaaagtcagacccggacccaaacccagaccaagagccaaacaaagagtcggacacagacccggacctagaccatgatctggacctagacccaaactcagagtagtactcaaaccccaacctagaacaacacccgaacgcttacccaaaatggcaactggtaccgcaattggacccggcccaagactaagaccaggacccagactcgaacccgatccaagaccagaaactagacagagacccaaacccagaatagaaccgagaccaaaatctggaactgggacaggaacctaggccccagaactgggacaaggacccaagacccatgactcgactccatacttggacatgaacctaagaccgagctcgggacctgacacccaaattagaacaagactgacatctaaattaggacccgaggcgtagaccaattccatagttggtgtttggatctgggacctagacctgaaccaagactcggatccaaacctagacctaaaccagtacccggtgacgcgaaactggaagcaaattggaacacgggaaaagggaccaggaccaagaccttgacccagacccagaaccaaattggaataggacctagactcggacacagacccagacctgaacctgaatccaaacaaagaccaggactcggtactcgaaccaaaacccaaactcagaatcaaacacagaacaggacccaggaccaagatttggggctgagaccaaaaattggaccccagtctcggtgcttaacctaatcccaaacctgaacctgaatgaagacccgaactcaaactcgaacatggaacaggacccgagacccaaatctaggactgagacccaaaactggaccatagtctcggtcctagatcctgacctagacctacactaggacctcgaacctaaaccgaaacgagaccaggacccatgactaggatccacatcttgacccggtatccgggaacaagggcttggacaccgacccagaatcgcaatcggtaccgcaactggaccaggaccaggaccaagacaaggaccttgacccgaacctaatcctagacctaaaaccagactgggaccctaaccctgacaagaatagggacaagaacatgaaactacgacagggacctgtgcccaaaaattgggaccgagacccaagacagataactcaattctaaactttgacacgaacctatgacccaactcaagacccggcacacaaattagaaacagactgtgattcgaatttcgaccaagggcttagacccgacccgtagtcggtgtctaaatctaggaccaaaacccagagtcgcacctagactcagacctagacaaggacctagactcgaacgcaaacctggatccaaacccaaacaaaaacccgtacgccgtgacccaaaacctgaaccgaaacaagaagcggatcgagacacgacaaagggacaagaccgagacctagacccagactcggaaacgtaaccggaccaggacctagactcagacacagacccagacccagacccaaatccaaactcgaatcaaacttgagtcccgaactcgtacccaaacttagatttgaacacggaacaggacccaacctagacttgaacctagacccaaacttagaatcaaacatggaacaggacccgagacctagatctaggactgagacccagtactggacctcagtctcgatccctgacctagaccaagactctgacccgggacctaaactaaaactagaccaggacccgtgattgggttccaagtcttgacttgggatcagggaactagtgcttggaaagactcatagtctgtgttttgatctaagactcaaactaggactcgaacctagagcaggacccaaaattggaacctgaattagaacctactaggaccctggaactggacctgaactgtgaccaaaacctagacctggacccgaacccaacccagacccaaatcaagaacggaatcagggcttggaaccaggcccagactaaggctgggaccaagactcggaccttgacgcgaacccaaacccgagactcgacccggacccaaactaagactcgtacccagaccgagatttgaagccagacttcgacacgaacccaaacccagacccaaaaaaatacccgtaccgagacttggatcgaaactcgagacctaaaccataccctaaaccctaaaacctaaaacctaaaccctaaaccctaaactctattctttaatccctaaaacctaaagcctataccctataaccaaaaccctaaaccctaatccctaaaccctcaacccgcaaccctacatcctaaacactaaatgctaaatgcgaaagcctaaatcccaccctaaaccataaacactaaacccaaaacgctaaaccctaaactctaaacattaaaccctaaaaaaacactaaacactaaccctaaatcctaaaccccttaaactctaaccttaaaccataatccctaaaccctaaaccagacccaaactcagacctagacccagaactggaactaaacccagactcggccccaaaccaggttctcgacccgaacatatacctaaactgggatcgaaaccagagacccggacgcatatatcagaatcggaatacgaatcagaccacaacaaagagaaggacttggacataggatcaaaatcgaaccaaaattcgaacacaaatccagactaaaacccgcacctggactaggacctcggacttgggacctgaactaataccgagacacgaacccaaacgtaaacaaggaccccatacctagactcgggacccaagacctgaaccgggaccaagagtaggacctagaccgagaccaaacctggactgggtccgagacccacaccctgacccaaacccaaacccagacccgaattgggacctagacgcagaccaggttccgaacccacacccgaaccttgacctgaacctggacataggacccacaattggatggtggacccaaacctaagaaccgggccctagaatcaggaccaagactttggccccgaaattgggatcgggactcaggacccatgactcgagccagacatagacctaggacccaactcgaaacccaggacataaagtccgattagggtctggactgaggatcctggctccgaggcttcgacacgaccaatattaagtgtttggatctaggactcagaccaagacctgaactcggaccaagacccgtaccaagactcggacccaaacaaagaccggaccctaaccaagatccagggcccaaaaaaggaacttgaactagaacaagactaggaccaaggaacgggactaggactagaagttggacccaaacttggtccccgaccgggaccaaacctggacctaaacccgaaaccagacccgaactcgagaccattacccggaacaggtttcgaaactatacccaaaccc

SEQ ID NO: 19371 - DNA, 3748 bp, Cannabis sativa
acaccctattacattgtaataacggttctaaatttttgtaataactccaatatcatgacaatggatcaacatagtataaatttatttttaccataaataactccactagactcaatgataatttttattttgttctattttttatttctgaggttgggtatatggtgttacaaaaatcattaggggtcatagctaataaccataatttgctaatgttgagaaaaagacaagaaagggtaagttagtcatttgggcaggagaatagtgatattattgaaataatgatatagctcattttgggtgcccatttgtttttctcagcccaataattaagtttttttttttttgtttatcttaattcttaattgagctcaacaatcccaaaagtgattctttccctatcaggaaacactttcatcactcgttttcacacgtgtcaatcacacctgtttttaggaattttaatcgtccaggcaacctctctcatccaacggtccatattcaatctcacttttaaggtatgccatctgccacctaagatcagagatcaaaatgtagaaagacagtgccgccactctcattatctcatacgatcagccacacaaatatttccacgtggccacttcctattggtgtaatgaaataagtcgcacctaactctttttttagtttgagtttgaccagtgaaccccaaaacccaatttgctagagccgagactagtgggccctgcttcccctgttccgacacgacctctatctgagggctggacacgtggctaaacagggttcgtggaaaaccccaacaaagtaaagatgtgacatgtttgactcttgaatatgagatcaaattttggattagaagaagttaggctatgattcgagggttttttttattattaattattattatttaaatagaggttaattagtatttttttttaataaaaagtcttaacaaccaaacactaaaagcaacaaaaactctatcaaggtacaacatatcttctctaataataagttctgaatacaagtaaaattctctaaccactaaattatactttttctaactgtgaaatcaagtttgaccaaagtataagcaacactgttataactgttataagatctattacaaaacacaaaattcatttattaccaagaccaataatatcatctaaaactagaatcaaagaagtaataagagaagtattatttttcagtttaagcacaatattcaaataataatcaaactcaacaataataattctacacccaaaggagatgcactgaatcaacacattgcgaatagccaaagcttgagccactttaggaacaaaatagtcatccaaatgccaacttgttgaagctaaagctatatctaattagttacgaatcaccatacccaagccattataattacccaaagaattgatagcggcatctgtattgactttgagataatcaagcggctggaaaagtttctattttgggaccacctaaagaggggctgtccaagacactgtcccccataagggatgtcaactgccttccgacaacaggggaggagacgccaccggagcttgtttgttatcaaacatcctagttaatcacatatccaatgctaattagtatttttgttcataaaattttaatatgtatagtatatgcttatttcgatttttcaagccgttaagaatcccatccgaactattaaaattgttatataaatttaaaagacttctgtcaaatcgtgtttaattttactaacgcataaattatccatatattaaatcgtgcccctaaactttaatatatatatttaaatcaacaatttaactaagacaaaaaaaaaatgtaaccaacaatttataaatttgataggagaaagaaaaagataattaaagaaaaaggctaattatttcttttttagcaaatatatagttataaaacacagttgtattgctctagagcatatatatatatatatatatattcaaattatataattggtatttggaacaattaattattgcgattgaaaaagaatggtgtaagtttttcgacttgttcataattattaatgtgtaaagttattcaatgatattaattataattttgttgaccgaataagagtactacactctagtttagttttgtattaataattcaaaatcatcatatggtgacaaattattaggatcatgatcatcttagaaaaatattttcacttcaattcactaattgatcgattcaatttctattcatggtatgaactatgagatattgttcacaaagttcacaactgaactaattaattagaatcatattttacacgtaataataatatctttgcttcaaagcttaattattaggtttttagaatattccattccatatatatctccaaatataaaatgtaactaacaagaaacatttttatatatataatgtatcgatcaattattaattaataatttccttaatctcaaaccaaaatgtgtgtttcaagattactaatttttttttttttgttatatatgtttgtaccttttatttattaagttgtatatatatatataataatcctattttttaccaatgtattttctgaatggaaaaaataaatatatatattagtagtactgtttaaggctatacatagtgcctaacgtcaatgattaatttccaataatatatattaataaagtcataaacagttatccattgaacccaaagaacaggaaattaaatgggtaagcctttaattttgactttattttaattaggtgcattggggtttcgaaaagaagatcacaaagtggtaaactgataataatatttaaaatgggttttaggatatgcttaagaacacgaagcaacaaaaagctttgtttggcaaagttgaggccaaataattaatttttattaataataattaagaagaagaataataatgtagtgttttcacttgttcaaattgatcacgatcaattattttaaggaaagaataaaaataaataatattttattatcaattaatttataaaaaaatgattaaataatatattaatagtttttgtatatgagaggagctagttttgtaagttaacatacaattgcgtggggaactagactgtccaaaagttttagctacaaaagaatttgactcaaccactttttgaattgaatttagattaattattggatgagaaatggtaaaaggtatttgttagtgtgttatataaatgtaattaaatattgtgtttaaattatgataataattttttgtcgtattttacttataaaatgttagctacttattaagcattattagtacctaataacaatattcttattatatataagacattttgattttctaaaactcaatttgttagaaggtaaaaaatttcaagtaaagattaatatgaaaatagttcagaattagagataagacgatattaaatcagactactaatctgagatcgataaagccaaataagcaagagaatgaatcatagtattttaaactatttcacaaagtaagagaaatagaagagaaaaaatatcatgtaaaatatgttgaactattatatcaaaaaattaatcggacacttttattttctattgataatacgaacaaagtggaaacaattaaagaaaattgtgatagaattgtaccccaatcgaggacacaacaacttatgtaaaactcaaattaataataataatctcatgcattttataattg

SEQ ID NO: 19372 - DNA, 8479 bp, Cannabis sativa
aataaataaataacatatttatagtgtcccaagaataggtataaataactaaagtttatctcctattttcgtaggttattgaagcccaatacgtaattagaagtgttgtctaggctgaaagctgcagaggcacaaaatgtgcgtgctaggggagaagatggtcatcctttcctttgttggagcctggctggcctatgctggtaatagggccggccagggtgtccggtcaaaccccttaagttggccagttcattatctctttgtcatgcttaagtatttggactcctcatcaattgatatgttgtgcatgatgacttggccttcttgctgataagctatactccacgtggcatcgatcttacctttgtggacatcccacatcatgtaggaaaaaattgggaaaacatttgcccccacgtccctatgcgaatatttgtacggattgggaatttccagcttcaatcttaactgttggagtctttactgggcaagttttatacaataacttcaataatgaaatattttctcttgtttcactgctcacgttcaccaagggaattgataatattttgcatgttatttttgcaagctgcatagttgtttgctgcatgttggatgagaggggccaaccagaaatcatataaggttatttgatgaagcaccttctcattccacactttattttctctctcttaaaaaatggaaacaagatgagctcttcacatcccctttgaggctgatacacctaagttctctaaaacccaggagtctcgctttgtttcgacaatccaagcttcccaccggcttcctcgaaggttttaactagtgggtaaaagctttcaaatctcgttctctacttgttttatagaattttccattgttgtgttcaagtttttccatgcttcatacattcttgattctcacgccagattctagtctctttgatattttgatctacatgatagttttaggatgcataatgtgtaatttattgatgaaaaagattaattttgaccttcgttgtgattcttgactctttgatcctcgaataagatgtttgagttttgaaaaaacgcatactataatccaaaacacaccctggtcgtccctagcggtcttgtttaagacctagccgggtctagggttttgtcatggggctggctggttttggggtttaccctaggaagctggtcagttcatgcatgggtcttgctgaccctggccgattcttgcatgggtcatgggaccctagccggccctctcaatgctttaggaccttggccagcctagggctttggttttaagtaggtggcaaattttctatcctcttttggcctcggcaagaatcctgtcatggccttgttaacctatacaaactttatttcatatgtggttcccttagaaactttgtatgacacttgatgatgagtctattgtagttaaatacttaacttaatactcaacatttgtccaagttgttatacttgacactgtacttcgttgataccgagccttgtacgatgaaattatctggcatgtacccttaggtatagttgaccagagtcttttctaaaccttgtcgctttgtcaggtttctcacctccccttgtcttttgtgtgcaaatgatcccagtgactattggggaggtgataaccgtgtcgagaggatttacttagtcttctcttcgaggacaagtatctagttggtctagtagccaaatgatcaaccgaaaaccagggaaatgacaactcaggaatcccctgaaaatgagcagccaaatgatgctaaacctggggaaactgagtaatccatttgctttgaatggaaatgatgctagacctcgggctttggagaaccaccactaacctggggaaactgaggaatcccttaaaaatgagccaaatgatccaagtatctccagagctcgaggtctagcatcattggcattcaaagcaaatgggtagtgagtcttatagctggttcatctaggagttgagaatcaagtggaggcaatttcttcctggttcttggacttacatcattcaagatggtgtgcctaatactttgtctgctggtagggaaatttcttcactgagagatcttcttgctgtagagatcatggttactgttgctaggcactcaaggtcaattatggcaaggaccaagccgacgtgttgtagggcaccaccctatgacccacatattgctatgctagtgactagagggagagtaggcattgttgaagaggctgcatagccacaatataatggagagccaggggccgaccaggctagacacctatggtcgagcagcatgtagctgattgagatgaagagaccccaaacattgcgtctgaggttgaggaggttattcctgctaggaggtagtacaaggcttctactgtattctccaataacctcttgggtttgtatgatgagcccaggcagaatttgaacaaccttagtcgtcaatctaaggttaggatagaccacattttagaggaggctacaacaccctgagtcctcgagcatggggaccaatagaactggtggatatctctcttgtcctctatttctacctagatgctcaacaagatcaaggtaggagggctagtgggagatgtctggtgtgataggcctttgagagaccaacaagcacattaaacggccttcaaatggatggcctagttggagcgccacatagagtagggagcggtgctgcccctgcaccattactttataaacatatccatgtactttaaggtgtgtccaacttagatcaacctgaaaggcataaagtacctttcggcgatgttcgtcctgtatgtagagttgggttggccttagccctccccttatgagattgggtacttttttgagctaaaatccatttcgaggcaaaggaccaaatacttctacttcagtcagctgggatatcaatggttaggtgacattaacaacacagctttgtcaaaagtgggaggatatactagaacttatttcattgcttgggatatcctgcaggtccaccaccacttctagagggtgcaaacctactcacactccatcccctctctccggatgagggatagacctaattatatcctgtccctccctcttgagaggaggaatatattgaggttggcttccgaggccaaattttggaagtgtggtctataccctctcgagtctaatgttgagggagttgagggctcatctggaggcccagatgatgtctcgatagtaaaggagacttgcccaggaggtgggcatgcatctaatctagatgatgacatcccctctctaagcttgtgaggaccctagagaagagagagaaggctatccgctagtgcttggcacgcggaggcacaaccggtgatgttgctctatcaattaggcctagaagccaaggtttttccaagcccactcgtcccctgcctacttctagaggcaaagacaaggctgctggtagcgatagtagttcagatgattccttctctaaggatgatggtagttgatagcaccaattttcttttctttttcttcaattaaatacgtgtaacttgtaatatgactttgttactttctttttgcagattgacttccagattgagggatcttgctggagagccttctagtggaacttcttcaggtcgcccttaagccaaggtggcccagactaccaggtctagtgatacaacagggtccgtccccttcttccggggtctgctctagatggtcatctgatgatcataaatcctccctagagaagggattcatccccacacagatcttcaagaaaggggcctattcagccaccagatagaggattgatgaggctacccgtagttacattggcaagactcttcccatcattgatggggagctccacgagctagaggatgaggatttgaagtgtctgacttccagcgggcttcaagatttgacatttgtaagttgtatagttgactttactcaaatttttgtaatgacaagggctggccggccagatttaaactactgggaggatggctggtaagggttgcattaatgagaagctagccggccagaagtgcaccactcaagagctggccgaccaagtcttcttctacagctaacttggttttttcttttgaattcaggccatgttgaaggtcagccttacccatggtagaaccaagcgctcctctagcgctcaccgagagaagctaaagggtaaggagaccaagcttcagacggagagggacgcacacaccctgacataggcttgcttgaaaaagacctaggatttgaacaatggcctgtaactcttacttggtattaagaacatagaagtgaccaacctggctgttgagacctccaggttgggatggaacttgagaacaagtgccatgcattgcaacttgctcttgatgggcaacaagtcatcaaggacgagtatattagcttgtcctccaaggtcttatatgaggtttatctgcataaatctaaggttgacctctcctacatggaatctttttttcgtgaaagaacacttgctcaagggagatagttctacgatagcaggatgcagatagaccaggttggccaggctattgtccagcctaagaggtcatcgtctgaccatcttgacaaggctatggctggccaacctatggaggaggtggtcggccaggctactgaccacatggctggtcaggctactgaccacatggccagccaccctacaaaggttatggccagccaccctacaaaggttatggccagacagctccttggcaatccagaagctgcaactcacagctcgactcccatacacctacacatgattagacactttctattagtatcttatgtttatgattttatttcctattagtttcatgttcatgtatggcatgttggccctttacttttgaacatttatttttggccttaaggctttcatgttcttgcttttagcctataggccctctattttagaatactacttttgtttagtcttaaagccttttaatatggacatatgacctaccaggcggtctttaatcctggttatcttcttatgtttagacatgtaagcatcaagatttacttttttttatgtcaagcgaagtatgcctgcattgacttagcttttaattttttgcttatactaagctttgaatttctctacataagttttatgtgctagtttgatgcttgtacagtgtgggtgccccccaaatgagtacgtagacttacggtctcttagtcacttgtaattcatctaataaattgagtgaacgcaaattcattgactaaaggcatgatgtatcataaattcaatgatcgtaaattaaatataagattcaattacccttatacaattttcattaattgtacaattaaagatatactatcaataaaactcttatgtaaatattttctaattttcatgtgcaactcaattttatttgagaaaattgtatcttaacataattttaatataaacatagcatttattcactttagtacatagccgcataaagtatatttttatgtaataaatatattgtaatacatgaaaaataatacttgtcatgattcatatgtttgatatagtaaggatgatcattggattataagtagtaaattaatttaaatattaaccaagtgagagaatgttataatattgttcatatggtaataataaatcgaatatttaatttataaaatataattaattatttaataaataattaaaaatattctaattaaaattaaatttaattaccaaattttaattgttgagatagggtagagaagtgtaatttggagagatttgtattgcagagaatatggcacctaaattctgaacggaacaagagtgtacaaatgccacttttcatcttcacttgtatatattgacattacaagtaaatctcgtatgagaaactgataacatatttggaaaaattacacgagtcttttatatatatgtcaaacttatataggcgtgacacctgggtaagaataatatttccctctgttaatacgatcaattctgtacataaacaaacaataataataataagtaaaaaaaatcctcgataattaaagttataagagcatctctaatgatagtattctttagggatgttaaaaatctccacatttcacatcagatactcttacttttaaaattactccaatggccaatggtatgacactctcacacatatttctagaataatattcttttctctctagtgatatagcatctcaacatgttgccacttaaacatcctttaatttttttttttcattgagatgccctaaatagattctgcataaaggtaagaaggaggcaaatcccacaactgagatcctgtaaaactcaattagaaccaactagaagcatccaataacaaaaaaaatctaactggaaccacattataagatagtgaggaagttgtcatatcatattaaagaaaaagagagagatatgatgatgtactaagatgtctttgtaccaaaaaagaagaaaaagaaacattgaatagtggtagccacttaggtctagaagggattctcatgttttagctgatttggaaggtataagaagttaatagtactccccctaaaattcttagcaatatatactcataaattacttgtaatagttattagactatttagttagaggtgataattggtgatctcttatcatatcctgttatacaagtttacatatctattctatataacgtgtggttatataacaggatttctaatttaacgataatttttgagtttatgcattaattttaacaaaatattcaattacttaacataatattttttattaattttataatattattatatacatttaaaaataaaaattatatagatattttatataaaatacttaaaatattatttatatttttaaatttattaatttaactttaaattaaaataaaaaaaaaaattatcttctatacaataaaggtacctactagaaaatgtaattttctatcttctataggattgttgtcttgtggtcaccatagctaggttgacattgttaaatgtgccttccaccatataattgagcatatatataattacattcaaatgacacaccaatgtaacaacagttaaaaaaaaaactattaaagatcaaaatctcaaactctatttcaaaaattttaaaaaaaaaattacatacacgtattgcacttaacatcacttaattgaacttaattaaaaagaaaattaattatatgtgcattgaacgtaacatcaagtttaatttgataaatcttaaaccaaattgtatatattattttttgttaaaaaatctcaattttaatttaactttttatatcaacgcactgacctttatcatattcacatacatgttgactatatttatcatacactacatgttaatgaacattattaatatctcatgtttgatttttatacatatatttttaattactaagttattgttacatatattatacgtatatttagttatatttttaatttttatttttattatatgtatttttaaaatttataaattaaaggaaacaacttatttattttataatattttttttataaaaacacaatatttaaaattttaaaaattagaggaaaataattataaagctgaagaatattaaaattgagcaaactctcaacattaaaaataaaaatattataaataaaatattaatatttatatagatttaaattaatttaaaattagtataagttcaattaacctaaaacaaataataaatttaaaatatatatatatttataaagctaatcttacttacaccgttaaatttaatagaatagtcttatattcttaaaatgttctaaaccaacaaaaaacgttaaatagccacattgtatatataaagttatcaatttattcaattcattaaaataatatactaaataaaaaaaatatttaaaattgtaaataaataatattatttaattaaataattcatcataaattatcaataaaaaaataaaattcttaatatcaagtaaaaataagctatcttatattcttgtaaaaaaaatgcatctgatttagatttttttatataaaaaataaataatattttaactataaattaatcattttaatagtatattgaatataattgggtcaatttgtgtcgattttgtgtcacacgggttaactctgacccaacccaaataataatcatgtcattcaagattaacctaatgttgacttgcgtctatttttcatgccctaactcgtaataattcgtatcgaatttatagtgttgtcgcattttgacctaaattaccaatcttacatttattaatgaaagacataaatattgtattatatttgttatatataaaaaattaggcagtcgattttgtgcccatatgtgcaaaacacggattgcaatccgtgtacggcaggtaggtc

SEQ ID NO: 19373 - DNA, 8256 bp, Cannabis sativa
gagagagagagagagagtgtttgatgatttttagagagaaggaatgagctttttagagttctgggattgaaattgagttgtagaaaaagctctcttatagccatcctataaccctccttttatagccaaaggaagagctatttttctctcattaattatatataaaaatgacaagaaaaatgcaaatatgaaatttctttgttggaacttattttaccaagatcttatttactaatcatatatgttgattatacaatataatctaacatcctatatatgcatatacgatatatataacaaatttaaacacataaagtttaggtttctcacatagggttgcagtggaataatatgatgtcttcaaacttgattgagcttaactcctctatctgcaacacttatggttccagatgaaatgctttataatctttcaatcaatttctatgttcgcgatctgatcatctagaacaatgttctctaaggatcttgctcctagatgtagggcctagtggggacctctccaagctattttagaggaggacactctcgtaccctttctatattttttagtgttgacatcaactactttgctttttttccctcattctttttcaattgctatcatggctaatatattccaagctaatgaggtggagattttggaacaagaaagaatcaaagcaccgcaagtagtgtataattcatctcaatgggagatggatcaacacactaataaattcagaaactatggtgcgggcctacaaagaagaatgcgacctcataaatatccccaacttgtttcataacaagattcctttgttaggagaatcactgtgcaagtgtgcgaatgtatttggtgtctagggctgggcacatgtggaagtaggggcacatcttccactccaaagttactttgcacatttctgtgcggaagtgggtatagcatccttccaactgattcctcaggctaacaaataactggcgggatgggtcatcttgttcaaggaactaaaagttgaagttgcaatactagaagaaattcttactcttaccaagtaaagtcaaaccccatgtggaagaactgaagcaagattaacttctacaatctagagaaacgattcaaggtgattttcctgacaaacaccttaaaataaacctacttcttctaggaccactggctcttcaccattggttttcctcctaaaagaattctaactttatcattggattttaacatcgctggtaattgacatcattttttcttttttctataggatttcgttgaatcttttgatagagtctgattggagcttcctcttcttattattttagacaatgtctcttgttcaaactcactccttttctggtagaaagggagaatttttacataggctttccccagaggctctacaagtagaaggtttggtcaccactacaaaccttaggcgacttagtctaatcgcccctcatcaaagctttaacacttataatgctcgcaaagtccataatgactatgttgatgttaaagaagtcatcacaaaaatcatcgaggaagaggtaaagaaggccataaaaaaggatagacgctagttggaagattgggcctgattacatctggaaccaatggatgaaaagacagagctagaggtttgtttcaaggtagtcattccggacggaggcgctccaggtgctagcatatccaaaagaggtaactctcccttctgtctattctgcgctcaacatttggaagaattagaccacattgatcagggaggatttgatccctatttcttagaatttgaccatctcatatatcccatgattcattattatggtagggtagatgaaatagtaggaagtccaaatcattttcttccaccttcccaatgtgttagagtagatctttttgtcttgatgaagagtccaggtttcttatagtacagtagcttctaaggccaagaagataactcattatttgttcatggggatccaaaataaaatagtgttaatggttgtatctagattagagtcttgttttgtttgttattactggttttcatgcatttactgttacttccatgtgtctgaattttgtgtttgcttgcaaagaacccctaagccatcaaaatgggaattgtaaatgacttttgaatagcttagaagtccacactaaggagtttagggaagctacgagcctgccaaagggaaaagtaagagcaaagcgtcttctcgatcacaagagtaaaaaaaaatagcactccaacgaggtgtcagaagctgttccagaggttcatgtctagggacttccacgtatattgtcctttaggttgagccattgtatttggttccacctctagaggcacaattcattcccatcactgaagatgatgatgacgagggtgagggaatggtcttctctaggaataggcttgcttccaatgttgatagagaggggaataaggccaaagtggatgccctccaagaactgtgccaactttgaaagagtgataaagaagaggttgagtagaaagaggctaagaagagggaggtagaaaggaaaaaggaggagctaagaaggatctcccaaatcaacaaggaatttactgatcctaagtgccgaaactctagacccatttcctaatccaatgcctagtcattatccaaggggatggcatttcttccaactcttcctccatcaaccttatccttcccattctaactaatgagcaaatagaagagtatcacatccagcttgaggaggcagttcaattctttcaaaagtggttcaaagtagagttagttaagaatagatagagaactaatgtgcttgtttctctatgcaagactgaactgtatgataagggctctgatgttaatgcccatgctctagtcgcttactacttggaggttttagagaagtttcggcctagggttgaaagtaacttggctctgtttgcagttgacctcatgaaaaaaaacagttgatacctactgctaacttggtgcggagaggtgggccacaatagctagtcaggattcgatcttcctagcctattcactttgccatcaaattattggagtaagcattcttacttattctcaacattatctttattcaataccttttactaattcctcctttttttatttatttctttttagggaaatttattggcaaagcgttgtttggaagtagtgtacaaaatgaccttggaactggaaaatctttgagatgaatgcaaggcttcacacacaaaaatggcagaagctgtggccaaattagaagaggttcaaagccaagtgaaggaactcgtggatcaccaagtcaaagataggctctagtttgctgctaacgacagagtcaaatcttataaggaggaatgcaaaagttgtagaggcatggtgatgagtacaaggagcactacaacacggccaagactcgggttgaaattttggaagctcatgaactcatccttaaggaaaaacactcatcttaaacttcaacttataaaggtggaagctttttattgttggcttccacctgtccactaaagagaagctttttatgactccatattttacactgaaatcagtaaagtgatcactgtcaaattgcttcccattttttgatacaattttgtatggaaggtcgtaacgacatgctatatcttttatgacaaagtccaaggccttcttggaggtgactgtgttcattggttctccctcgacccacttattaaactaatcgacattgactatgactcctctttttccagttggaagagagcctactaaattgatccctcaaaaaacaaacaaacaaggactactcatcagagttatttatgttggtggagcccttgggattttaggataataatgacactgctcgcacttccaagcgtagtcaatccaatcatttttcattgtcagccaaaagtatctttatcggatgatcttcttagacaaattggatccaaatgtgttgtctctatagaagcctttgcatatcttttaaataatagagttgatatttgttctcgctatgcacttcagataaggtaccaataacccccttcgatacaatcttccaaccagaaccagatatacagaagctttgtattgaatctttctagctatacccctatcatttgaaagctctccaaagcttaaaaatttatatatagggcctattcaagaggtgggatgatcaattacatttgcccccactgattatgtgcttcgaatagctaggtgagctatgggaaccactccgtattgttcaatctctagattggttgctagctttgccaacatatttgcgaatgcattttggttcgaagggacttgtttaacataaaatcttttaaatttttgaagaagctctcaagatctggagacataagtggccattttctcacttttatctgatattctccagatatttaatttaccactagttgagaatcactgtaaatttcaatattttgagccctaacttctttggataaatgtaagcccacaatcattgctttatattctactttgttattggaggtagtgaattcaaactgaagggcactattgagctgatgtctttgcgaagaaactaaaattattccagctccagaacccttttcattcaatgttctgtcaacgtaggctttccagatttccagttctggaattaattctttcggattattgttcattccagtagactcttcaatgaagtctactaatgcttaaccttgattgagactctcaaatggtaatggatgtcaaactagatgagctctatggcccacttcaataatctattagaagacactcgtttttgtaacatttggcgaagagcgtggtttgtaagtacctagataaaatggggctaaaaatattgtcttaacatctgcaaggcaatcaataagcaataggaaagcttttcaatcattggataccttgactccacgcctaacaatatttttcttacataatacactgaaagttatacctttccttcttctcgcactaaggcaacactgatggcaagatctgacacaaccaaatacaggtaagacggttctccctcaaccagtttggataaaacttgaactcttactaaatgcccttttaacttttggaaggcttcttcacaaacggtagtccatttaaacttattaattcttcatcaaacattaaagaacataatgaatttatttgttgattttgaaacaaatctactaagaactaagatccttttggttagcctggttagactctgaacatctttgtgctgtagggggaaggcatgtctagaagagcgtgaacattttttggattatcttcaattcctcggaagctgacaatgaaactcaagaatttccttggtaaaactccaaaggtacatttttgggatttagcttcattatatacttctggataacagtgaaggagtctcctaggtcattactatgctccttggaatttttagacttcaccatcatgtcatccaaataaacttccgtgttcttcccccaaacatccttgaacatcttattcaccaagcgttggtatgttgctttgacattgttgagcccaaaaggcatgaccatataacagtacaccccttgtctatttggaaactactgtgttctttatcttctacatgcatcttaatctgattgtaactggagtatgcatccataaagcttaaagttcatattctagcgtagcattcacaatctggtcgatctagggaagtgggaagcaatcttttggacaagcttggtttaagttcatgaagtcgatacacattctccatgtcccattttgttttagaactagaactgggttttccaaccaaataagatataaagcttccaagaggaactctatagaggtagtttattgacttcttctttcactgcctcagcccggactagatctaacaatcttctcttctgctaaactgtgtttgaatctttttcaatgttgagaacatggcagattacattgggactaatcccaatcatgtcagaatgactccatgccaatttatattgattcttttttaccctggacacaatttgttctttgatcgtcaaaggtaaattttgtcctactttgatgactttataggatatgctctgttgatgcatatttctttgaattcctccattggcacgatcattcttctacccctacttgggggtctaattcacattcttcttagattacattatgtgctagttgattaagtgctccgagaccttcttcttcaatttcttctcttaccataaaaactaacttgccaagacattgattaagtgctccaccactatgaaagtgcggtatttgattgcagaagctatattacttctggctacactctaattcaatgtaactggaaattgagtcttccccatggtagtagggaatatccattaaaaccttgaatctacataaggcatggcatcaaattagcttcaactaacctaatatcttgaaaggtaattttgaacagtatgttaaaaaactttcgttatccactagcactatagacactcttttgttggaaatcttggtattaatcataaatggatcattgagagaaaaaatgtacatgcttaatgtcctattccataaaggtaattggtagattcgtcattcgtggacgttgggcaggtgtttgtacaagtgcatatgtttccccttcatggtctagtttgttgaggtaccttttttggacatttcttgtgcttctggtaatgtgtggaccttcagaaatggttgcaacatggccatccactaggggtagagtgagccttggcagatatagattacctggtcagggtgccggagtagccttgggtgcctaggcatttagtaccccttgaggatcctaaatgcctagagtttttattctcggggcttgtattcctagagcttaagggtaacccactatctaaggaagatttatagctccctactatctaagaatggctagctactcatgtgctactccttgtgccaaatagataataaaaatctggacccactaagaaagatggccatttcggattaggccttccatctcacccttcaagtattcatatcatttgtgttgtgcccaacatcaccatgatattcacattttttattctcgtccctcttacgtcttccttctttatacattagtggtggcttcttgtagtgaaccatattacaagtagccttattcaaattctcctgagtatttatcaagctcgtgtactccaagtatcttggttcttgttaacttcttcatttttcagagctttattccagctttgagttttaccactcctcttggccttggagcaactcacatttgagtttggtgtccctttttgttggcttgcttgtctggggtcggcactacatccagattgtgccaccccagagaaattagttcgtgtgggcatatactctaaggtagtgggctcgtaaactgtaggattcatggactggcttccaggaggagttatagttggagatgagaactgtggattgtgagttgagttgttcactgttgttgatgttgctagaaggactccaaaagcttggatgtatgcttcctctgaattcatgaaaccccaggccttggataaaagtttggacaaggtcttcgacctcttccattgaagctttccccagaacaaggatccaatagatattttggacattagagccactaacttcatatcagcatcaacttttattctaacaacttattccatcatccttgaatgtatctcttaaggctttctccttcctgctccttgatgttcgttaaataactaacctctatattataatcttttgttgctccaaactatttcttaaacatgtattgcaagtcttttggaatttgaattgatctaagtggtatctttttccaccaatcttcagtggacttcgtcaaagtcaacaaaaacgtagagacattttacatcatcatttgccttttccatttggaccagtctgatatatttagacaaatgggtcctagggtccgtcgtgccttcatataattccatttgtggcattatgaaatttttaagcaagtatgcttctattattcttttaacacatggttctggatcatcctctttcgatttaggtacgaccccattttacttataggctagacaatatgtgaacttatttaacatgactatttgatcttccaattgcaagtatggccatccgggaact

SEQ ID NO: 19374 - DNA, 4003 bp, Cannabis sativa
  modified_base (3929)..(3945): a, c, t, g, unknown or other
aaaataatttccaacacttacctattggccaagaattgtgaaacttttgccaagttcaaagacttcaaagcattagctgaaaagctatttggtaaatccttaaaaacacttcaatctgattgaggtggagtatttggattatgatttcaaagactacctactggagcatgacattctatcccaactcacaacacctagaacaccctagttgaatggtgtttcaaagagaagaaatcgaaccttgttagatatggtcaaatttatactgagttactcttcactgtcactcaacttctagggatacgcgcttcaagcagatacttacattctaaatgtaataccctcaatgagcataaacaacactctaatggaattgtgaaatgtaacaaaacccaaattgaaacattttcgtatttggggttgtcttgctcatgttatatgacctaggacaaggaaacttgcgcctaggtctgatgtgtgtatatttatatgatattcagaggagacttgaggtgcatacttctatagtcatgaggatcaaaataatttatcttaataaatgtaatacttctagaatatgaatatatgagagatcacaaactatgcaacaaattggttattgaggaaataaaaaatgagaaaatttctaaaccgtcaactttagtaccatcagtttaacaaccaaccaagcttgccacagttcctgaaaaggaagccccgatacatcgtcatggtgggagggttgtgagatagcttattcgctacaaacatgaggcacatgttcttgtctctaacacagacaaggacaatccatcggcttacaatgaagcaatggatgaccctgaatcagataagtggaacaatggaccaagaaatagattccatgtgcaccaacaaagtctgggaatatgtaatcctacctgaaggggtaaaacatatagggtgtaaatagatttacaagaagaaatgaaatgttgaagggaagttcgagataagcgaggcttgtagccaagggctacacacaacgagaaagtgttgattatgaagaaaccttctctcttgtggtcatgattaagtcgattcacattcctttgtccataactaccacttatgattatgagatatggaagatggacgtcaagaatgatttttacatggaaatcttgatgaaactttacacatggacctacatgaaggttatgtacaagatagggaagatcgaacggtttgtaaattgtttaaatctatttatggattaaagcaaaattctagatcttgagatatcacttttaatgatacaattaaaacatgtggcttcaagaaaaatatcgatgaagcctatgtgtgtaagtacattaaaggaaatatagtgatatttcttattctttatgtggatgacattatacttattaaaaacaatgtagaaatgttgttagacgtaaaaaaatggatagccagagtcagtattcactcttggtggtggagttgtagtatggagaatcattatacaaaccattcaataatggaagtcgaatatatagtagcttgtgaggtagctaaagaagcggtatggttgaataagtcctacactaatcaggaagtatttctagaggtagaaaaatcactggtgctctactgcgacaacagtggagcagtgaccaaccctaagaaaccaagaagccaaaagagaggaaagcacattaagatgaagtatcatttactcagagatatagtaaggataagtgatgtgacagtttttaagattacgtcggaacataacctgacagatccattcacaaagacgataccaacaaaatcttttattggttatgtaaccaatatgggatcaagagagatgcttaatttgcttttagcacaagtaggagattgttaggatcttgtaaagaaaattttgattattaatagtatttgaacaatttgatatatatttgaatgttgaattattaatattttatatttaataatttatatatataaattttgaaaattttcttatttcatatatgaggctatgatttatattgtacagagaattaagatcattggtgatgaataaaatagtcagcacttgttatcccaatttttgcccacttaacgtggcatgcttacgtggacaatatcagcgccacgtggcaatacaactcaccaacaaggaggtcaagtaaggaccttagccaacgggggtcccgacactcaaacaggacgacaagtgatagaccagccaccttaagggggctggccagctagcctctggactacataaggtcggccaacctgctccctgcaggtgtctagccggtcaggattgaacctgacaggattctagtgcacaaccttacacgtggactataagctggactgcaaaattgggccttaatagcctaataaagtagatgaaaaagacctaaatttgaggggtattttagtcttttgtatttaataaatataatatgtaaatatctacttattttatttgtaaattagggtttaagctctcctatatagagccttaactcaaccctaaaaagacctaagtctaaacctaagtcattaagtctcattcaagccatcaagctctaaagctctaagtctgatatgattctctatctctctctctaacacgcccactataacatctcttaatacttgaaatttgccatctttgattcctactttgtaaccttaagagaactatattagatcccacctatagtaatctaaatagtgttatctctcggtatcaatacaactaaaaggggaataggtcgttacccgctaactaagggggccgaacctctataaaaattcttgtgttctttactttcgagttctaattgtgtaacatgtggcaaccatcagattaatacaatcccgctgtcagttggtcaatttttaaggtcaatagtttggtgctttcattgagagcgagccgatatcacatctaataaaactccatggttaacacgagaagaactccaattgcaccatttgcatcattgggtcttcggcgatatcccctgattgcagatgtctatgttccagccacaactggaattcctatgaacactgcagatgtagtcaatcctcctatcacggtaagtacttcaaatctggccactagagctggccagagtgatacaaacatcccagtggatttgaacagtaggcccttgtctccgagggaggaccctccactggcgcctcccactgaaggaaggactatgctggagagacaagactaggagttggcgagccccatgtggacttgggagaagatctcgagttggctagacttagagaggctgtctgccaagccggcctaactgaagaatcacgccctcttgattgcgatgtatttgctcaatagagatgcgaattcttgatataaatggatgaccaagagtacatccttcgatctaaccaggcagaactagattgccacaatagaaatgccagcgacctgataaggcagttcaattagagaactaatggaagaggctatgatctcattagagctccactccaaggaagactagttgatatatcagggagggtcgatcatcaacttgaccaacccggtttttcaggaaccaggacaaacatgttcccctacccgagggaggacaggccttaccaggaaggtctaattgcaagaacaaccagatcccagcaaccagcattttgggggcctgaccagggatctcacgctcaacaacacctcccatcaaccaacctttggctagctagccacctgcaggagtacccctgcctggctagaggagtacactccctccccgaggggagcgagccactcaaaggctagtattcaatcgactaggaccagaagcaagtggaaacacccaaagtgaaaatttgagaagtggaacttgttgggttttgtgccctannnnnnnnnnnnnnnnntataattagatttattaattaataaaagatcaaaaattacattttatgttgcatggtt

SEQ ID NO: 19375 - DNA, 1959 bp, Cannabis sativa
  modified_base (1411)..(1423): a, c, t, g, unknown or other
tatatatatgtaaaggcaaccctttaagtacaacccttagtatagttaattatatacaatatataccttaaactcatcatatagctttaagtacaattataaatctcctttttgtttaaagtaattaatcaataatactctctccccttcttttttatatcccactttgtcttccatgtactttggagcttaattgagtgtggtttaccattgcaaagacatatatttgagcatattttgctttcaaatgagaaaaaaaagatatataattaaaagctcttttggcatttatgactttaatttgttttttctaattaattaaaatagttgtggggcggtgtaccctattattattattactaaccaaaaaaaaaggttggcatatcattatttacttatatattttagtgtttaaacaaaatatactagattagcatatcactaatttgtatgtcgttgaagtcaaagtattaaaaaaataataataataataaaaaaaaagaaatgtgaaattgatatacctaattaaaggttactttcatttagtcgattcattcgtacgtagaatcattacctttctactcaattagtatggactgtactttagtctataaaacattttcttagttcgaattaatgacacttctttatagcaaataactattgttttgatgaagatgtgtgtatgaaattaatatatatatatatatatatatatatctttaaactacatgagtagtaatttagttaagaataaatagaagttttagcttaattatgactgttgaattttttttttttttttttaaaaaaaaatatctcttcgcttgcatttcgtttaatgttaaatataattttgatggtgtagcactaatatactaatatgaggctaatcttagacaattcaagagcctaaaatagagatatatgagaattgctaaagggtaccaatggtgtcttgtaccatgtcaatattttagtatcaggtcccatatatagtttaatgtaataatttttagggagtatcgctagccaattataagacgacaaatttagaaagtattagacaccactagtacctaatagcaatgttcgacatatatatatgtcaaataaaagaataaatacataatacatgcataattttataaaataataaataatatataattttataaaaaaatatttcaaatataaatattaatagatacatttataaaaatattaaaaaaaaattaatttaaaagataattatagtagaactatgtatgtaaataaattgatggtaaaagtacttaattaattagttttgttatagttaactattagcataaaaaaaaattgataacaaaatttgtaagtaaaattatttttaaaaaataaatacctatataaaaataatttaaattannnnnnnnnnnnnaaaaaataataataattaaaaataaaaaaaattcataaattttttaattataatatcatttaatttttttaaaaaaataaatatatcattaaatattattataacaagtataaagttttaattgtatacaaacagttctatagtaaaaatatacaccttacattataataactacaaaatctaaattcaatggtaaagaaaaagttctctactagtaagcaacttttactaactcctactataattttaccctataattataatctaacaatatatatgattaattgaaattgaaaatgtctcacactgattcatacactacgtagaattagttaattaatagtttatataaatataaagagaacaataatagagcagcatagtcagaccacacatgataattgaacaaactacgaagtagtatgtatacatgaaatattattataactttattgtaacgtccccgcttcaagtttctattgggtccttatatccacggaataatggctcttatacacgggtacgccactctggct

SEQ ID NO: 19376 - DNA, 3335 bp, Cannabis sativa
tttttttttttttttgagaagaagcttgcttgattattataagaaaaatttcagttctcctttaagaaaataaaataaaattgcccttaaaatatctaaattttgtgtttacttacgtataaatattaaaataaaaattgcactaagctgttaatttttctttcattatgttatgtaggtacatctttaaaagaaattgtgtacgtaggtaccaatcttacactcaataagaaaatttgggactgaaatatttaaattttgtgtttatatatagttaaataccatttattttgatagtaaagtaacgaaatgttaaaaattattattattaatttattactgttatttcttgaattttataataattttaattttttttctgtaaggaatcttaaaattaatttaataaaactaaaatagaaattcaacgataaaactaattatttttcttcaaattcttttatttatatttttcttgtagctcacatcccttctttcttcttctatttttttttttctttaggataagttatgtttttggatttttttgtttacacttcaaataattaaaataatttattttttttatttttacagaattacacacatagactcttatagcaactaacggaaaaacttaaatcgcaaccaaaatccgtatagcaatttaaaaaaaaaaattaaaaaatagttgatgaagtaattctcctatttttttaatctttaaatcaattaaaatttatttaattagtatttatattttagttgtttttaaaatttactatttttttgagatgcaattttaaatttatttaattgtggactggcaaccaaacacaaaatttagacattttagaggcaaattttctgatctaatataaaacttaaccgttggcatctaccgaatatagaaaaaaaggtaccattttaatattttacagcaatttttttaatatatatttatccaattatccgaatataaaatttaagtattttttcaagtatttcccttattaatttagtagttacaagttacaatacattgccaaattgataatttctcaaagaagaagaaagaaaacctttggaccctggtcttgatttcgataataatctcaaatctcaatgttgtttcatgttagttgccccacattaaaaaaaaaaataaatgaataataaaatttagcctttttttttttggctagatatatccagaaacttctgtctaagatgcacaagcaaatagtgcggctaatcaaattgtctccatctccatacatttgcttttcaccgtaattttattttttttcctatggtgaaaaaaacccaacaatatttctgagaatgttctcagcaatttcattctgtgtcaccatctttggtttatttattgcagcttcaaaatatctttcttcaaaatctatttaccaaatggctatttctcattacagtacatttcctaaaacacctcaaaaccacctaattataccataacaattgtgagtgagagaaaataacgcacttaatattcttttattctattctttattcgtatctgtatatgctttccttaaataaaaaacgataattattagtattaaattacttgaagggccagcccgaatcattaatttgcttacttgtatttgtacactattatttataataataaaaacaatttgaccatttgaaacagtgagtagtgacacactaaaactagaacaggacaatttgaatgaataaaattttgaattaatatacagtacaaaactgattttaaagaaaaataccattgaaatggagcacttcaacgtatgagaattttattataataaaagatattatttacaatgcaaagttcatcagataaacttagtattaatctaacaaaagagaaagaaaaaaaagaacaagaaaaacagagttcccctgtttgataatatgagttgaatgaatctgtagattggtgaggattcttcagctagatagagaagaaaagcaactaccggaacgaaccagagaaggggtcgaaacccttttgacagtttcgagagagctacttgaattggaacgaagcgctcttggggaatccaaactccggcgtaaaatctttccgatggcgaagattgggtgctctgtttctttgtgatgaggattcgatgaacgaaacttcttacagaaagttatatggcgattgagagcttcttctgttgtgatgagcctatctgacctgaggacttcgtctttgaccgcctcaacgcaaagtccgcatatccaacggccctggtaccgttctcggacgcgtgagatgtacgcgggagtacactcttctgtgaagccacaagagtagcattttacgcattcaacctcaagctggagggctcctttggttgttgtgttgcctgtgcttgtggattctgaacctgtaatcaccatttgtttgtaaccagacaccattgagctcattttctctccctaaaactctctctctctttctctctcttgctttgctctgtgtgttagagcaatagatgagtcattcaagatatatataaggtgggtccacgaataatgagtatttttgcattgcactattttttttttcttctttattattgttattattatttttgtttgtaataaaataaaaagtgtctctatacattatagaaggagttgtggttgtgctgcatggattttgtttttcacaataatttgtggacttgttcctctctcctccgaattttcagaactcttaattaatttgattttgattattattaaatttacatattcctgattcttagtattgtactaactattattataaaggggtagtcatatcaatttccttctctcatattccaatcattggccgtggattttaaacaagagggctagttgggtcgggttgggttgggttgggttgggttaggtaacttgagttatggtgaaggaaaggctgcagagcatgatgactaaatcaactattgaagagggtgacagtatatgactaaatgtgtcagtcattgatggatccatatttgagtattgatatctaccacacaatgaaatttcttaagttgatcaggttgatttttgactcatccaaataggttaagccttatcctagacaagagaccactcaaaatcaaaatgaaaaacacttgcaaagaatttagcttttcttttatgaaagacaatatcttttttgtgtatgattaatgaaaacgagagttaatatttcagatatatttcagagaaaaaagtaaggtagccaaaccaatcacgtttaatacatatacacaacaacatttaattgtttacagtataat

SEQ ID NO: 19377 - DNA, 3579 bp, Cannabis sativa
aatgtaatccactcatgaaatcacaacaatctgaaattgttaataataacaatcactacactgttaagaaaaagtcaaatgagaaaaactatattgaaaaagctatatatatatatatacttatgatgtatgtatagtatgatcatatttttggttttgatcattattaatttacacatcatattcgttacctgggttgcctgaaaaagataaagcacatatctgaaaagagagtactccattgtatatataataagcaataataatgagctgaaaatgacatgctatgctatataaacgatacacatacgatcatatgtgtaaataccatatctaatataatatacttgtactaaaaatatagaaggcttgcattaaaatcttgttaaaaccatagagacaccatttccaataatctttttcttaattgttagactttggatggtgatgatcaccattaataattacagagaaactagtaaagagagtagaaagaaaactcaaacttaagtgcatggatatatatatatatatatgaaatatatggaaccatgagtatatatatattggtgcacctatatatatataaatacagatgcactaacaacaaaagatagagttgacattaatatatagtcaaaagagagaatgacccaagtcaactacatcaccaagaggaggaagtgaaggagagcaagaagaataagtaggtccagacatgaaaccatacatagagttgtcaatgagtggataaaaagctccttgatcagtactactcaaagggatattgttattattattatttgagctactagtagtactgatcatggcagagagatctccagagttcagctcccatggttgttgatgctgatgctgaatgaggttgttattattgttattatcccaaaacccaagattgaaatcatccaaacaaggcataataagctgatctctagcttggtttgaacccaatgttgctacttcactactaccactcatcatcatgtcccaatgtgatttagttcttttggggttatgatcagaaggagaaggagtaggaggaggtcttaagcagttatcagggactatgcaacccaagtaaccagagttataatcagaatcatcattacagaaaaagaagttgttgttgttgttgttattatcatcatttggtggtgatgacatgtcattaatagtatttaatgattggttaaggatggttggatgatgacatgtcataacaatctgaggtggagtagtactattctgattggtggggtttttactagtagtgctgcaaatgagctcatgagaaggtagtggcaaaatagtagtactattgttgttagtatcaaagggagtagtagtgttattaagatgatgatgatgatgaagagagtggaaactagtgttgtgatgatcatgagtagtggtattagtagtgtaaataaagtttgttctggcttgtgtgcctttcatggacagagcagctctgtcataagcaagagcagcttcttgagcagtgtcaaaagttccaagccaatgcctttctttagtagttgggtctctaatctcagcagcatatcttccccaaggtcttctcctcacaccaagaaatcttcctggctcagcttgttttctccttcctcttctctcaccaggttgagttggagatgtgttcctttgaagtatggcaaatcccatttgctgatgatgataatgaccattgttttcataccctgctttcaagggtttatctaaggtttttgtggtggtacttgacattgtagccagaaaaagaagaagaagaagaagaagaagagagtagaaagaatgatcaaagaagagaaaaggtcttttctttttctttctagttttgaatgaagtgagttgagaaagtttgtagggaaattgtcttttaaagacactgatttgatcatggacagaaggaaaaggacatctcagttgtcattctctggaagaccatgatcctattcaatccacttttttaataccttttttattttctatttaattctatagccctgaagctaaaataaataaataataataataataaaaataataagctaagctagaacttattaaaggtgtaaataaagattcccaactcttttcaagtaccttaatatggaggtatacattatatgtaggtatatcttctttactgttttcccccccaagtttcaaattccaatacaagcccacataaatctttatctatttatgtatattattttctgtaaatactactaatgctaattaattataagttataattggtatagcttaataattataatgttattaatgagctaagtattacatcatgccaatgtaagctattgggatttgttaaagtttgtttatataagttttttgagtcttaatatgatcacatcacgtgcaaaattactacttactaatttggattaacctgatccaaattatatataattacaaatatccaagtgttgaaaaaacaaagtcaagttttgtttttgtaaaattataactagaagcaatgaatggttggtagaaattagaatttaaaaaccctttgtcttgttattactcctagattaatatatagtcttaagtctaagaaatcattattaataattaatactaataaaatttaatttggaatgtttttgagggagtcatataatgtatatttatacatgcacatgtaaatccgcattttaagcaaaaaaaaaaaataatgggattgttaaaaaaattgttgtctcttctttttcttataatgattttttatatatattttcaaagggagcagttaggatttcatgtaagcaaacagaaacaatgatatatgaagtgaaagagtttcagtccttgttccactgttgtgtgacgtacacgtgtcctgtattgggtcactttggtctgtgtcaattggatattacaaacctttgatcaccggtttttaagtggcaccgtaaacgagaacatcttggaaattggaaaagtgatattgagagggtacaattgtaattttcttattcaattactctagtcttgcttgcttgcttctacatcaaatttaggtagtcaaaaattgagatttttctaacctaaatactcttcaagacatttcaaaaacaacattcaaccacttcattaacatttttatttttcttttctagattgttaaacattttattttattaaaaacaatagagtgtattgtaattaataaaaaataaataagtttttaatttatataagattgatattcatctaagtatgtggaacataaattatgaatacctcaaaaaaattaattaataaacttgttctatatattatctagcaaaggttctaattcattcaacccaaggaaaagaaagcaaagaaaactaaagttagacaatcaatttcttattcgcttcatagtttttttttttagggtaaggaggtcagcaaagctaagagagacaattaagagaacaagcctcatcaccaatccaacacaaaaatttagttaagtttaaagtcttctttgccatgtcgtgagccgctgtgttagca

SEQ ID NO: 19378 - DNA, 3869 bp, Cannabis sativa
  modified_base (3431)..(3444): a, c, t, g, unknown or other
  modified_base (3838)..(3843): a, c, t, g, unknown or other
aagacaagagagaacattgattgaagagttgaagttgtatttagtatttacctgcccaaaatggaggaacaccacaaagtaaaatatacagaatgactcctgcactccaaacatctatttcttttccataatgacgtcgcaatacttcaggagcaacatagtaagcactcccgactaaatcgcggtacacctttcctgagaagattatcacaaaacattggtgaaacatagaaaggtctcttgcttaagatgacataaatattagagaaaatatcatatttcatgattacactacatataaccaacaatccagcattgacatgttcccaaacttgtctaaattaggataaaagcagggtgcagacctacaatacaagatacaacaatcttcctcacgtttttacctaaatttcctagtgtgtcaacaagccatgatgacaaaataaaacaatgcacatgatacaattcacagacaagctcttcaaaagacaaaatgggctgtaattatttacattacaaaggcacaaaagttggcaatgatagcaagtcctaatgatgcttaaaacctgaaccagtaacaccattatgataaacatgtaatgttctttacatggttataacttaaaacaaagaaaacacaatgatgttattaagtactaaaaactggacagagaaataacaggaacatggtcaatgcagggaccaaccccaattgtgattaaataactcaaattagttcccccaattctaattaggactaaaacaactaaccttcctctgtgtaaacagacagtccaaaatcagcagccttcagcattgcccctttatctttgctagaaaataagaaattctcaggcttgagatctcgatggatgactcccataaaatggcaaatatggacaacattggcaatggccctgaaaagttctgaggcatccctttctgaatatttcccctgagcaataatccgatcaaagagttccaaaccagcacaaagctccatcacaaggtggactgagtacctatcctcataagctcccttgatttccacaatgtttggctgcccagataaatgctgcatgatctgaatctctctcttgacatcatctctatcactcttatgaacaagcttcctcttcagtatagatttacaggcgtaagtgtcaccagttgaattctcaacacacaagtaagtaatcccaaactgacctctacccagttctttacccagagtgtagtactgcttgatatcttcaaagggtctatccagaatagcatttgggggaattgggtcggaagaaaccggactgggctgcttctgctgaggcggcggcggaggaggagttcgcttgggttgtggcactggttctacttcttgctgtggtttgggtactggtggcaaatgagtttgaggggctgctgaaactttctgggtttgaacaatgggtggggtttgatggggttgttgttggtgatgatgttgataagtttgatgagcggcggtagcaacagagccaggtgctgatccataggagtcgactgtagtagtagcacctggttttggagttctcttcttgctctgacaacaacccattatttctctaaacaaacagataaggaaatttgataatgggaatgagaagagaaaagggaaaaaggcttaaagatgaaaactttgggatttaacccttatttaaagaaggtttctcaaaacagagaagacaagcaaaagcagtggacatgaaaaacatgtggggttttgaaagagagagcagaggagatattcagaaaaaatgaaaaaagatgagaataaaggcaaaaacaccaaagcaacacactacacaaatgtgtgtgattcttctctcatcttttcttttttatccaaatgaaagccatggattttaccagaacatacaacacatcttttttttttttttttaaggatttttttttctggtcttaaaaataaaaaataaaaaagatctcattaaatattaattttagaaaataaaaaaataaaaatctccaggtaagtaagtaacacctcagaagacagtgagtatagtcaaggcaattgatatatttcccacactattattttggtcattgtctgagctacacacacagaaaaaggggtggtagtggtagacacaaattaattatttttctttaattattatctattttatttcttctcatttaatttataattaagaagccgctgactattgaattggtccttagttggatatatataatttttcttttaactttttgaaaaataaataccatatttaataacgtaataatatctttatcaacaaaaaaaaagaaaaagaaaaacagaaattgtattgtatgtaagtgtatatcttcaattataatggattcgaattttacaaagcgtgttaatattttaaaatacgttttaaaaactttggtagaaaaggtaaaaactagagaaaaaatggcattttacatgtttggaaggaattatgtgattaattgataatgtaaatattagtaattatattatattacattataagtcataattgtatataattttttattttcatgtttgataaataattttaattacgtttttttttttaataaatgatttcttaaaaataattttatttcataattatggattacacctaattttaatcaggttgagagttaagaatttaaatgaagcaattatctcaaattacactattagtaatagtgagagaccacttctcaactagtaattatttcgaattacatttactaattacaatgtaactttttaaatacacttaaaaaataattattttactgtaattttactaatgaatgtcttgttcatgtaatttgtgaaatttatattatattcataactattaaattttaatattattataggatttcggtaattaagttaatgttatacgtgtaattgaaatctaaaatactagtgaatctatcatattgagggaaaaagattatgagaatataattataaggtcattaatataaaatatgaaataaatattagtgtgagctgcatttcaatgttattaggtggcattccattccatcaaactcaacgtgtgaaacacatagtagactttgacataaattatatatgctttaaatatactcacccaacccacctcttcacaatatgacatgatgctattactatcattagtcgaggccataatagtaatcataatatcattatccaacacttatagaagttagacataagctaaaagaattaaattcagattaatttatgagaaatttacatctagcacctttaatttggtataatttataattatggtgttatcttatttatttatttattttttactttttttatgtttgttttacatttagcgaattttcattgcttttcttttttttttttcttnnnnnnnnnnnnnnttcttttttctttttctttttgttaattttaaaaataatttctttctacatcattacttacttggctgacccttttcaaaatctaagaagtaaatattattttgctattttcaaaaaagaaactatttaattactaatatgtaattagttattattttattttattttttaaaatcttagttaacatttattttataattttgttaattgaattatattatacaatacaataactaattaactttcaaaattataaaaaatatatataaataattggtatataaaaataataatttattatattacatgacatcttattagtttcgaaataattttttaaattacttaaatttattttcaattataaactaccagggccggccctaggcatagnnnnnntaggcccgtgcctagggcccacactt

SEQ ID NO: 19379 - DNA, 3617 bp, Cannabis sativa
atttagttactaatatagtgattagttactatattttatatatttatttaaatcttagttaatattcattttagaattttgttaattgaattatattactatgcaataactaattagctttcaaaataacaaaaacgtatataaaataattaatatataaaattagtcgcttgttatattacatgataactcattagtttcgaaaataatttttaaggtttcctaagtgtattttaaattataatctacaatacaataacttaaaaataactaattaattactaagatgtatacaaataagttttagaggtaaccaaaatgtatctcaaattatatgatataataattatataaaggtaactaattaatttcttatcaacactattaataaccaaaaagttacttttaaaaatgtaggaaaaaaactgaaaaatgtcaaataatgttagatttgactgacgtggcacgtcagtaatagaagtaatattattattgtaaattaaatgcagaaaatgtatattattaaaaaattcccaattaaatagtagtttataattgcactcaagttctatctattttattaataagtatcaattcttttgttttatgatagtaataccaaatttttgctaatttttaacaattaactgttatccgtgtttccagacaacgagagacatgtagcatgtagagataattgtcgtttaaacttaggcctaagcctttccatgtgaggaaacctagccccgacttaggatgggcctgagcccatcgaatattcaaaggcttcgcctccaaagatactgtccttccatacccagaagcccttccagccttttcgagaaatggaacagacgaagccctctgggtgaatattgggacacatccgaaggggaacaacaagggacactcccagatgtcagccacaggaggaccctcgaaagcctactacaagacgaatgtcaaatgcctataaaaagatgacgtggtcacctttctcatagaatcaaatattggccccagtgtcaagacatggtagtgcgcacaccaccaaaagtatacatcgttttatccaatagcgcctctaacattcttgtctgcaggattggcctccgtgtgacatgtgtcctgaattaaacggtcccctatctactacatggatcctttgcccccccacgtgctgaatacctgctagtgggcctcaaactcatgtattatgtgtatttaccccattagtgggcctatctttacatagaaacctgaatggatcacgggtgtgcctggattatagctttgaaagacattagcagacatacacaaaattttatagtcgcgagctttgaaagacaacgcacttagtgtttctacgaccttcaacttttatgtagttagttttgcgcgagctagccttgctgtgagtaaggaagatgttataaagatcattaataaatgaatacaagcataagaataagcatcctactaggacaacagttaaactctattctaatccctggcatattggccgcataaaatcatttcaatttccaatcgcccatataaaaaatcacgccttcaacaccatttatctttgctttagcccacttgataaagcagtaaaaatgttgttgttaccaatgttcttgatatcttagaagaaactaaaatcctcaactgtaggatcagcgtatctgtattctttatacatcgcaaaaaatttcgagatgattctatagttgtttggagttagttggaaatgcgcgacgtcgtaataatttaagatggatttgatgaaggggtggaaaggaattttgactttagtatgaaggatgggaatcgagacaaccacgacgtttgtcttgataatcttggggttggtgaaaggaaggtgaggttgttacctttgtactgcctcatgtaaccagttaaaataagttttagtttctcaaaggaagcttagtctgattgcctcatcctagaaacaaggtcctcataggagaacaactcatccaaaggtgcgtcttcatcatcagaaaatcctacttctacatcttcctcctccacatcgtcttctccccgagcaggtaattcgatatcttgctcaacttcttcaacctcatcgtcaaataaggtcatcacattgataaagctacctcgggtagagatagtcgactcactcccttgtatttcaaccaccatgggttcttgcaactccctgaccatgttagatatatcattcatggacatcgaggcttgaccttcatcggcatggtaatcaaagagcaattttgggaggaagttattgttgttttagagctcgtcgtcgaagtcacctccatgagattgaaactcttggctgtctgagagatctctcatttgaaagatagaagatctttttagcgtgccatgtgtgcaatttaaaaagagtgttctcaatcgtgtgttattagtaagttaacctctaatattattaaggcttttttctagttagaaattactacaggtaaaaaaggcgattattcatggactgttaaaagtgaaatcctacatacatgtgtgatcatttaaagcattctactgcctattgtgaacattcaaactgttctaacaaaaaacatgcgatcattcataaatttcatgaagaagatgggaatatttgatgtaaagctaaaattcttccagaaaaattacccatttcatttcatctaaagccaaactcccattatctaaaatacaaccttttatttttatgtaattttatccgataaaacctagaatgcatacaattatcagaaagtttcttacaaaaaattgagaaataaagaaaacaagcctttgaatttgaaagactattttcgtttcctgaagaaagatataaatctgattctaagagtttaagcagcaaacgattcttggtgaatggaagaaatttctggaaatgaaaagaaaaattgaaaaaaaaaataagagtaataaaaatgaaagagaaatgaaactctcattttttacttgggacatttatagggatcgaagttccccattacgatcgtgacacgtggtgttggaaaaccaacagttgcctcatcgaacgactgccacaagacaagcctgcacagaccccaaaagattttgatgatgtggcaccttggaaagataaacatcataattaccaaccgccatttcataaagctcaagaaggtaatcaaacgtcacccacgatgtggcaactcaactcgactgtcctaagaggtagtttctctgcgtgatagaaaattatcgtcgcaaaactaagggcatgtgttatagtacgatttttttgcctagaaatacgagtatagtcttatatttatatttgacacgtggactcagttcccagttggaaaatgataacgtttcaataacaactccatcagagctatcctcgcatgatcaaaacttgcgagaaggtgtgaccaatacaatatttagtcacacactatgtgcatcatagtctagaaaaaggaccgagagaagttatcataagtcgcacatatattagttatatgtgagggtcaaatgattttcccctgcatcccatgtaaagactgcatatttataagacatgcggtccaaatgattaa

SEQ ID NO: 19380 - DNA, 4832 bp, Cannabis sativa
agagaaaagagagagagattgggtttgggttttgtatgaagaatcttttgtagatgaagaagattcttgggtaagagtgtgagagttggaacactttgagagtactcatcagagaatcgatctcgaatgcattatacatgttcttgctcaattaataaagagaatttggtggtgtccagaattggagtaaagtcatagatcatattgatctattggatttgaaccagtatatattcttctgttgattttatcgttttaatgatttattcatttctggttttccatactttgttcatccctatttgctccgattatcatttttgatttgttaatcttgtcattgctaattaatttttttttaacaaaagaaattttttattcaaaactaaacaagcaaagatacaccaaaggcaaacagcccccatcagatcacacaacactctaccatccctcaattacatttataatatacttatcaccattttttacattggaattgaaaacacccaaaatacaccatttcactagatatattatctctgtattacaaattgccttaaccgagctacaaacacaatcaaaaacacatctatttctatttgtccatatcatgtatatcgttgtaacaattactgcattgataactttgtttttcaggccaataagcggcttcgaacaccaaatataagctccaacctgtttctcggccaataaaaagtacctatccaagagtcaatttcaaccactattttcttagtatagatgcaattcataaataaatgataatgggattcatcttctagatcacaaactgaacagtgagatgagggatgttcattattctattcaagtggtttctagttaataacaggttattgattactttccaataagtatacatgtgtttcgttgtgattagcttattccagacattcgtgtcataatcaatcttgttcccagtaagcaaggtgttgtaaaaatacttcaccttgaacctcccccctcccccttttttagcctgaaacagattaaactcatctattatatgacgaagcttaaggagtttttagaaacaccagctcacatcctgcttgatagtgacattctagatattttaaccctttaagtaaatggtgttaatccatttaacccaaaggttatctttctttctagctatggcccattaaaacttagccatcaaagcaatgttccacttttttccttctcaaaatcctatcccctcataattctttggaagacaaacctgctcccaagaaccaagatgaagctttcttcgggtccttgtttttccctaaagaaaattgcgacaacttttatcaatctctaaagtaatcttttgaggaaggataaatagactcatccaataattacgaatccccagaagaaccgagtgaatgagctgaactctcccagtaaaagaaaatttcttgcttgctcagcaattgagtcttttgttcagcttatcaagaataatgctacaatctgaggctttccatttagttggtctcagattaacccccaaatatttaaggggaaaagatccctcatttatttgaactatctctagaatcttcacttcgctctcctctttgacacccccaaagtaaatatttttgttgtgcttgttttccacacttgagaccttacaacaatcacaagcttgagttcagatcagatcagtgcatccttcttggatattcctctcatcacaaaggctctctttgtgaaaattccaaaggaagaatctagattgcaaggaattttgtgttcaatgaaagttgttttcctgcattcaatgcttcatgtccttcataggtacattcttcatcttcattaccttgtgctacatgtatttttcccactactgttactacatcgaatacattttctggttgtgccattgctccatcaccacctactatacacaacaccaatattaacctatcaacacaagcactcatacgagatcacccacccaccaccctgcttaccaacctgcccactcaaatagttatcccaaatccatcacccaacctgccacccccttaccaactctggcatcaccactaccaatcccagaactattattgccatcccctagttccaacctacagaacacagacacttctgtgtcagtttctcctatgatcttacaaaactcagaaatagacctacctatatccaacaccaatcttcctcccatagcagcaacccagcatgtttcttatatgcctacagccacatcaccaacttctgttcctaatccaaatactacaaacaccttggagtagcctgttcaatctgatgtaatagctcagcaattacatgctactgatcatggtgcctccaactctggtgtgcagcctgttcacacaacacatgactcaagcatcatatcaagaatttacaaaatgaaagcaaggtctcaaagtgggatttataaacctaaggcttacctatcagcaagacattcacctcccgaatctctctttccaactgaaccaaggtctattgagcaagctctcaaggatccaaaatggtttcaatcaatgcaaaaagaaaacacttctttggttaaatcaaaaacttggatcattgtaccatatcaaccacgtatgcatgttattgataataagtgggtgtatcagattaacattaatgttgatggttctttgaatacatataaatccaggttattagttgctaaggttacttacaaacacctggtattgactatgaagagacctttagtcctgtggaaaaaccgttactgttagaactgttcttaccttagctatcacttcagcttggcctttcaagcaattggatggtagcaatgcatttttaaatggaaatttgcatgaaacaatttacatgagggaaccaagaggatttgaggatccaagcaaaccaactcatgtctgtcaattgcataatgctctctatggattaaagcaagatccacgagcttggaatgagaaccttaggcaaacactgctgtagtggggttttcaagcttcaagatcagatacatatttatttgtctatggttcaacatctgatttaatcaacctactagtctatgtcaatgacatactagtaactggacctaattcttagttgatctctaaattgatagctgatctaaatgcatcatttgccttgaaagacttgggtcctatacactactttcttggtattgagatttatagagatgctgcaggtatgtatctttctcaaaacaaatatgtcactgatttacttgttcgacttcagcttattgttggtgtcaaaagctgccccaatcccaccagctctactcaaaaattatatatgtctgataaccatttcaggttatcacactttatcgaagcacacttgtagctctgcagtatctcacattaacacgacatgatgttgcattcattatcaataaactcagacagtttattcatgccccaactttcactcattggaaagcttgtaaaagactacttcgatatctagaagtacaatttcacacggcttgcttcttagatcaccagcttcaatggacatgtgtgcctactctgatgcagattgggccagttgtattgatgatcaaagatcaactaggggttatgtagtctttcttggaggaaatcttatcttctggtctgcagagaagcagaatgttgttgctagatcaatcactgagagtgaattttgaagtcaacccaacactgttgcagaactaagatggcttgtcaatttgttatttgaactgcatatcaaaccagctcacacaccagtcatcttggttgataatcaaggagcagcagctcttgcagctaatccaatttttcatatgctcgatctaagcatatagaaatcgatctgcattttgtaagggatcagattatggccaaggagctctctgtcagatatgtcccagtagttgatcaagttgttgattctcttacaaaagctctctctatagatcgattcttgtatcttaaaggcaaagtactaaaaatggctactaccccttttcatttgaggggggatcttagtctattttaagttagtttagttagttagttttcagttagtttctcaactaactttgtgttttgccttgtaattccttgactacaaataaaaggattgtgctcatttcttgagttaagctttctcttaaatctctctgtttctcttcttttctttctgagtttctttttctaattttaccaattctggtttagcttgttaaacttacatttttagtattattttaaactaaataggtgaaaattagtattaaagtgtatcaatattaataataccactattgagtggtatttgaaatcccttaggaatatttattttttttataatgaataaaaataaaaactaacctcactacaatgagtgtacgcccgtgtgtgtgatggttgtccaagtgatatggtcgcatactaaagaagaaaaaaagttgttaataaaactcattcgactatagttctctttattttctttaattattagtgtcaacacattgattttttatgtccttttctaataatcaagacgacatacttttaatatattctcctgatcatatattttctaatactgtctcttcaaacatttattaaaattgaatgctagataagtcattttactcaactcaatttaaatttacgactatatatatactgctacaatactaaaaggctaaatagcggcataaatacttaaagtgttaagtttgtaagtggcataatcccaatatttatttttagcggcataagtacccaatgtttgtataa

SEQ ID NO: 19381 - DNA, 7726 bp, Cannabis sativa
ccaataaagaaaattctacagctcgggcaaatgaatattcgaattcgccttttcttcaatctgtggctccaatccaatatgtggtttgtgtaaaaataatctgcccctacttgatcttgcccaacttctgattcataacaataacgaaagtaactcactagctggacctcttgctggccagggcttccttgagttttctacctaatgcatatgccagaggaggaggtacagcatttcctatctgtctgtgcttgtgaaggatattgccggaaaactggtaattgtccgggaaaccctgcatcaggcaatatcaagagaatttttcaacaccatgataacactacatcagcagtttttatctgactatttacaatctaatgatctattattctgtctattgagcctcaatcaattatgacagctaaatagtagattttttattgttacattggtctcttttactggctaagttatacttcaaagtttatggccaagtaaattgtaaaacctaaccctatttttcatttctattgacaacagcaaagacttgcttaaactttggagcatattctaacagtaaataaaattatttaagaaacataaacttacttgtgatcgggcacactctcgaaccgtcagaatcctgtcttggtcagggtgaaagcacatcccaaccttacccattggctgaggatctgtaatggaagttgggaaattcccttcccaatccaaccttccaaacaggcccttccactgattgtggcgcttggcagtgtttggcaagcaccatggtattaaatcaaccatttggccagtggacaattttacctacaatttgtttgaatgtgtaagtttcatcattgataaacagtgagtttctcactagcaaaatttaactatttctttgtagaaaaaaaaaaaaaaaaaactaactatttctattgcaccttttcatcaggaaggtcatgccaatctgcaccagctcgcttaggaatcttcttacatcgaataagatttagctcattcatttcttttgatatgtgatcagtcaaaaccgccatgctccctctaattttcttctgaaaccatgagatggcttcaccttcatactgtataaacaaccagatgtttgttttctttagtcctttgaatttaaaagaaaaaaataacaaactaaacaccatgaaatatgaatttaaatacctctaaattggccttagaggctccatttcctacaggtggaagatcaccaatcgtatcccgcacagttattgcccgaaacggagcaccatttgcagtgctcttagcagcagcatattgtagatttcctgataatgagatcttcaactccggggcagcaaacacatgcatcggttctggccattctgggagaacctcttctggtgaggctgcccaaataaatgctcgttttcgtgactgagaaaccccaaacgttccagcttccagaataccaaacctcacctacacatcaacatcaatcaatccactcttaaggtttagttatatatttacaaaatataaacaaaaaaaatccttacatacacccacaaaaccagataactacatcagtgatatatgtatactgcatagtatgtacattttatgcatgcaaatacatgatattgtaattagtatggaaaaagaaattactggaacagctattttgcccttctaagcagtagagcatagcttacctgataacccatctcaagaagtgaagccagagtcaatcgaaatgtctgacccttgttgaaggatacaaagtttctcacattttctaaaaggaagtacttaggacggaagtaatctgcaaacgataagaacgccaagatcatttcacactgaactttactccaagtgctgttgttgaacctgttcattcctgaaaatccctgcaaaaggaatcaattttccccctattagtttattcccacaactccaaaaggccttgtgtttggcagacttaaagatgagttctgaacattaaaggtaaaacttgtgaatacctgacatggaggtcctccattaatgaaatccacttgccctggcagtggtaaatcattaatcacgctttcattgagagctgcagctaactcagctgcttcaggtgttgaaatgcaatcgtctacatccccacacttctccattatagccctgcattacaaattacaacaaattataagatacttacaaactggagggggtatcaagccattcagcacagtcgtttaccttaaaatcacattgcagttattaacaaacacagatgactctttgtggttgagtttaaatgcatctccagcgggttcttcatactcaattgcccacttagttgatgaagcacctataaatagcaagaaaaagtttatcatccagcagttgataatgaaaactaacataatggcaaaagaaacaccaaacataagtaccagattgatgcaagccttctgacaaaccaccacaaccagcaaaaatgtctaatgtggccaaacgcttctcctgagatgcttctgtaggtttttcaatttctgaaatattttctccctctttactcttgccctttttctttctggacgcagcatcactatcgaacttgacagttgagtaccttaatcttacctgagctggcaactgtccacaaagaggcacaaaaatattgtattaataaatgaagcttctattattcacctttgataaattttattgccttaaataacatatattttaatatcataagagcaatttaactatagatctaatcaaacaactacctggttgagtgatcctttcttaggatcatacaaacgttcacagaagaaagtatgctcaaatatggcgagaccatcacatagtagtagaacatcatttttctttctaacttcacatttcccttcaatgttgtcaacagttaaaacgtgtgtttcttcgctgtaataaacctaatatttaatagaggagcttgaattaacataaagattaagcaattattaatgagcaggtcagtatttaaaattgaagatgaatgaaaacaatggtaagaggcttcgctacaccaaaaaataaataaattaattaaaaaattagaaagcatttacctcacgaatatcagaaacatatgccttctgagatgatatatcctctggcctataaaatctcctcaccttcacctgtgtagatttgatttcagcttctttagctccttttttagtgttaatctccaacacttggcacacaacataagcttttagacccacattcctcccacctttaaaagttccgttctccactctttcctcagagaaataatgggggcttatatacacaaaatcataaacagaatactcagttcctttatagacaaaactactcttggatgaatttaatttataaatttccttttccctctgaacttcatttattcggcaagagtggcagttaccagagcccaggccaatagtatcaggagaaagactacagaaagcacctttttcaggacaatacaagcttttacagaaatattcaactgacaaacccttctttttcctctcatctgctcttgctctatcagctttgtcagcaattgcattatccttccgatgattatggccccatggcattaatctgatagctacaacaacattttgtttacaatcctccagtctcatgtttatgcattcatttgtcaagaatacttctctttcattagcagtgtttccaagaactgtttgagatccccgttgcatcactcttccgtgaagcatctttcttccatctgatgcttcaaacatatactccaccaaatatatatcttgttcatctgagtcctcaacttccaccaaaacagctcccccaacagttattgtttctccacgaaggaaagctcgctgataaagagcttcaccagaagttgttttaccaacaggcttcccatcccaagatacttccttttcagaaaagcaagatttagttttcctagacaatggactgggtttctctgcttgttccaaccctagcaagccctctacagcatcagcatcagcatcatcatcatcaatttcttcttgctcctcaacttcatcctcttcttttgtttcacattcagcttctttatttgaagcttctggagagtaattcgaatagtactctccccaaattctgttgaccagccttgtagtcgtagcttgcatagccttcctcttggataccacaggtgccagtgcagcccttgggttcaaattgagttcacttttctgcagaacttttttctttttcactaaccatttagtatggtgcctctgctccattttatctgcaagacccatcacaaatgcacattttctgatcatatcatctggaaattctgcaaacaattgtagtataatctgaccgtgtaccacaacgtatctctcaatagcagctgcatcagaagaaatgtaagcacgaccatcccttttaaactcggatactctcttgatgacatcagaaaaagaaagccgtgaaattcggctttgttccttcaacaaagtaataatacttattccaagcttggctgtctttaaaactgtttcataccatggtgcatattgctttgacggcttgccaagtctgtacctggaaattttggagaaaagtaacaccaaatgttttagtaacaagcaggtagcaaccatatttgatctcttttagaataattctactgaccctatctgcttgaccacacattaaccgctcatcattattatcataattgcatacaactaaaatttcaaaacgatgtgtgcaatatttacaccacgctctttgcatatgtattaacccaaaacattattccaaaagttgtttcatcctttatcaataaaattcatcattgtttaaaaagaaaagaataagataaattgtaagactaagtagcaagtttccattaaaacgatttaagtcacaggaactaaagttggtaaaaagtgacaatgacaagaaaagaatattaaaaaaaaaataccatgccatatctgttcggattgaaatgaaaaccattgacgacccaaattcaatcatccactcttttatagcactcaaatagatcggcatgccatcaacagcctgtgcttccaagctctttgaagatgactggtctagatcatcatcgagacagaatccacttccatcatcagcagtcataataccagatccgtatatcgtaacatcaatatctgaacaaggtttcataggaagaagctctagtgaaaccaatctcaagtctgaattatagagagaccaattatgaagcatacttcgaggaagctcatcaggattgcacatgtccaagtcactatcaaacactatgaactcatcagtttcttcggcagaggtcttgtaaaaagcaggtagaggatagtcatttgcaatttcatcttcattaattttaacgtagtacttgtttgaccctgagaccaaaccccggccctttttctgtttcattgattgccagtactcttcttcttgcaatagctttgctagtttcacatcatcatctacctcttcagcacaagcaggcgagccagatgcatctggtttagttttagcatctccactttctgaattgatctttaaggtcccatttgaagggatggtattcggttccatgaaattttgacgctttttacactcatctcttaatgtagcaagaacaggaacattgacaaacagttgaccatttttggatgtttcatccaagcctatcaattgtttatatataaactcaccctgagaaacaacaaaatctcttataggcaaattacctgaaaagcatttgctggcattcattgaacgaaaaacaccagctagtaactcgtcaagactgcaatcaaagctccctccaaatgatttagaaagttgtttgtagacctctacacaaacacgggccttctcaaagaaatgaccataaaacttcttgtaagtagcagcaggtttcacacagagataatcaccagcctcagtcgaaagccatacaactggatttccatcttcgtaaccagagatgtcccacgattctattcgcccaaaaccttcacatcttatgcctcctcctacggccttacccttgtcagaattttcttccaaaggcaatacaacgccagaaataaacatgtcatcgacttctaacatctcaagaggacgcgaaacaccatcttcatcatgaacaatgaactcagtaagccttctgttgggtcgatcaacatcacctccttctccacaagtaaggcgcaaagccaggatctcgtcatcgacaagctgatccttctttttctccaaaaggttggatttttcggacaggcgaactgacttctccttgaagtctgtacaagcagctgctcgcttgggcagctttcgagccccagaagcctcttcttcgctaccagcattacgaggggaagcacgcttcttccctttaggctcagctttcacagaatcatttgttttacccttcttcttcttagatcctgttacaattactaagtatcaatatataacactatggaaagaagaagaaaacaaaaccacatgcagaaaaacagtttacaaaatgacccaattgtgttagaagaaatcaatcgaaatagaataacaatacctggattttcagtctgattggaaagagcatgctcggggagagaccccattcagggaagaatatgctatactgagtgaaatgggaggggagagaaaggagaacggaaaggaaaccctagaaactgagtgagagagtgagaagaaggggattttaatagtgtctgatttgatgggaaaatagagcgccaaaccgtgtattttgagacgaagttggcgccaagtgtagcattgaaatttcaaaacgtaaccaaacgtgcttttctttttcctaattttaccgattgagaagaggattcgttctaaatagtgtacggaattgaacaagataacacccccctccaactatttttttaaggtaaattagacgatataaggggtgttaatcaaaacgctcaatttacccgtaccacaccacgccgcaaaaaaaatacggtttgaaattctatacggtgcgatcgcgatttgaatttttcctaaaccacacggtgtgtaacgtgcgtgccaagatggcacgttacaagctaagtgatgcccataagttggccaagtggtggtcaagtggtagcgcatgttgaggtgaatgctgatgcttagtttgtacggcagtggcattttgtaaatatcttcaatattgttcagaatgggacgggacttggtattcgccatttatttgggtctacaaatataatggtgcaatcggatcggcgagactatgtgatttggtatgcggcttcgtcgtatgtctacagagccaaaatcatgtatgttcctcgtagaaggctaaaagctcagaatgctctttaaggggtaccctggtattagctctttaccacctcttggcaccttggtgctaagtcatgagctactactagtcagcagggctagtaggacgagcatatgaggaccacgaagggactcatatgtctccatgagttggagtactcatggacattatcgggtcgacccggtagtgcgtttaagaagccgccagaggttaataggtatgtttccattggcttgccgatatgccgcttgcacgggacgtggcctaaacttccaagagatgttgtggtgc

SEQ ID NO: 19382 - DNA, 4992 bp, Cannabis sativa
  modified_base (455)..(456): a, c, t, g, unknown or other
tagtttgtagtcttgcattctttatttgaaaaagaaaaatatagtttgtagtagtagttaaatgataaactaaactattggaagccgttgtttcagtaaaagctctaaccaatgactcattgtgttgggtggttggatatttgagttggctaacctcctcttcctcattctcatagactcataatactgttcccctttaatgttggtggcgctctgcttctttaacttgctctcccataatatacaaacccacaaattcaagagtgcaagtatgattatttgatataatatgacttgttattatttgtagcatataattagtgcaccattaatatatataaagaaaaaaaaattgctcaagctagtatcattgatgaattatgaaaaagaagaagctcacagttcccacttcacactcagcttccaccaatgtattattctctctctctctctcnntctctctctctctctctattttatattaagttattcaatttttttgctaaaaaaaattcaattttcagtaatggtactagctaataccaaaaaactgtttgtattattattgatggagtaaatagaaaattatcaacatcaaattgaaaagtaaaatttataaatgtttgaaaaatatatatattttttatgaagaaagaacttcattaatcaaaataaccaacaattacaaacagcaaagcgcctctgaagacctgtgagctcaattacatttgatcaatgaacttcatttgtttgaaacatttgtttgaaaaatatatatatattttttttttttgaaaagtgtttgaaaaatatattgaaatgatagaattatataatttattattttttagaaaatatgttaaaaaaaataataatgaacaactcgaataagaatcgtcttccttttatgaaattacttaattctttctaggcatggtacatattttatgatcatgcgcataaaactataatgttcaccaatatcttattataaatgagctttgaccatatatatataactttaaaactctacattccataagtcctcaaaacgttggggacgaagatcttattctctacttctaaaccaaacagaaaatcatggatctacaaatatgcctcattaattagtttatttgtttttggcaatagcattaattagttattcttagacagaaattgttcctcccttaatttgggaaataaaaatttaataatttaataaaactgatagcctgaccactggtcattaccctgcagtaacaaatgtactgcaaataaagcaaaccgaaaattaacaacaaatgataaaaaaaaaataaaaaaaaaaaattttaatacatttatttatttatttttaataaaaataaaattaagaggagcatctgggtcgtcgttggagcgagtaaggcccacacaaattttttttgcttgtgttgtttcctttctctcaaaagtataaacgataaaactacccactcccatcattttgtattactaataatcccttcttctctctttctctttcccttttcttccaccctggcatcctcgtccgtactttgtccctcccttctcttctctctcctctcaattctggtttacccgttaccggttcaaccagtcacccaattaaattactcctctctatcaccccaaacccaaccccccacacgtgtgttgtccagagaggaggagcctgcctgccttgcactgttccatccatgaccatccgcacgtgccacctctcccatactattcctcctttctgtggtgcaacacattaaaagttgaagagagagaaaccaagaaaacacaagctacacacacagagagtgtgataaagagaaattgatagacacagagagagagagaaacaccatttatttttttcccttctctaagtctctctacctctctccctttccttcgttgtgttttgtaattttatttatttacagtatacgagtcttctgcttaatttctattcataattattgtataattagataaaagtttgactgtgggagagagagagatcattgtttttttttttttttttctgttactaaatctattgggacaaacccagtagagtcaatcttatcttgaatcgatgaggatccgtaaaagacaggtgccgtttcctctctcttcactctcgccgatacctatctcagatcccctcatcaacctcaatcagccaccacctgtggtggtgcaactccatcactacgatccctctcgaaacgacgccgtcaatctacatccacaagggaatccttctcgggagccgtatccagctactcacttcactcctcagccgtctgatcgtcccgtgaatcatcgtctatcgccgatcggggcaggaaatataaacagaagaaccgacggctgtgatttctctgatgccgacaacagaaatgatcacaaggatacgatgaacaacaagaaaaaggaggatcgtttggtaagtgaaaccaaaaccttctgacatataattttacttatttattttaatttttccgttttgttatttcatgtttttttttttaatttttttattaccagtagtgcacttctgttcattgtgacctaaagaggaagtttattaattttctttttttcctttcatatccattattctttaattaatttctattagtgcataatatttggatgacgtttatacttattttgtatatcttttgtattttttcaggaattatttttaaaagacggagaagataataagggtgatgatatcaggtaagaaattgaggaacaagaaagaaaagattatattaattaattctaaatggattttttttaaaaaaaaaaaaattacatttatgtagacatatttgtatatgttcttcacatcttcatgaattcttgtagtaaaaaaaaaagtgaaaaggagagacccataacatgatataattaatttacccaacaaatagaaatagaaaaagaaaagaaaaaaatactgcaagtggaaatactgttttaggtgtttttatatcaactttggctagccaccataccttcccatctaaatctaatctagtatttggctatttttttggtccctctaactaatatataaaccaatgcggtgcacgttagcatgggataatggtccccatctacaatctatttctttttttgttatactcgtcactatttgtatttaataattgttttggtcaatttgttattttcactttggctgtaaaatgttcctcaatcaatttgcttgaagcattgttttttatttttagcaagcgaagcaccccgagtgcagaagcggattcaaggtttagtttcccggagtcaaccatttctagtacttctcctcctcaaggtatcaattcatatccatcttacataaaatactagcttgttgttctgggatttgagtttagtttatggtttatcaaaatattttgttgttgttttggatatttatttttggttagtggtgatgaagacgtcgtattggtgcgaaggagagaaagttttcccactgaaaaagagaaaagggagttttctaccaggagaagaagatggtaattatcatgattatcatcataaggagcaacataataagaagatcaccactaacgtgatcaagacagtcaaagctaaaacaacccagaagaaagaaagtaattcttctcgtaaaaacgacgacatttcaaacgaacaacaatatgatgatgatgatcataatcataatcatcaacttggtagtaataacagtggaaaaagcaacaagaagggtcgaggtggtgcactcgtggagggttcgaggtgcagtcgtgttaatggaagagggtggaggtgttgccagcaaaccctcgtgggttactctctttgcgaacaccatttgggcaaaggacggcttcggagcatgaccagcgtcaggagccgatccatgttagctaaatcatcatcaccatcatcatcttcagctgcaacggcgataacaacagcccagatgggctcattacatgaggtgaagcaggagaaagagccgaagcttcatcgtaatgttgagagaatgataagagatagtattataatcaatgaagaagatgacgacgaggatgatgacgaggatgattacgatgacgatgatgatgatgaggattatggagaacatgatttcgagaagaataagaataagaataagaagaaaccgttgaagattgcgaataagaagagggtgaagctcgggatggtgaaggctcgatctatcagcagcttacttggtcagaccaacagttgtacaacaagtacaggtactactggtgcaatttccatggcggatagtaaatattaagcaagtaagtatagtagtcctagctagagagtacgttaataataaattacatgaaacacatgatataatgtgcattaatatattcaatcatctactgtgtatatctctgtgttacatgttatagatctcaaatatagggatctagatagagagattgaagatgtcgacgtgacgaaacactgaacctggtgcaactatatggttttgtttgtgatctaatgatgattatagtttattttattttaatatatatattattatatggataggcatggtgaaggtgtcgtattggctatcgttttcttgcttctttgttttttcggagactcagagtaaattatattaaattattttttttttttaagaaaaacatatgccttaacgagattaattataatattatttaaataaagtaggggaagtacccatatgtagaccctataatacggataactactgtataacttttgactaacgttgtttaatattatcttgtaactctctgttgagatattgcgcgagccacataaaaactgtattctacagttttttttttacttaattagtgtttaatttaaataaagaatatgttcaatggtttcataaaaaaaaaaaaaaaaaagttgataggttcccagtcaaaa

SEQ ID NO: 19383 - DNA, 6569 bp, Cannabis sativa
gatagagagctctcaataatcctcctcaaaacccaccaaagcatcactaattaatcacttgaccttcctacactaatttgagtttgaacgaaggataaaaaatcatccaacgctttgacagaggatcctttcaaatttccttcctccctagttgcatttttaatttgttctttgataatagagactttcatccttatctcccttcccttggcttctccatccatggccaattcaatcactctcttaacatcctcatctttaacacagctctcacttcccctcgtaagctctagacacactcccatctcctccacaagcatcttcgagttataggcctgttccgcggccaaaggccacgccactatcggaacaccttggctcaagctctcaatcaccgaattccaaccgcagtggctcaaaaacagcctcgtcgatttgtgggacaaaatgtccatttgtggtgcccagtttttcacaatcaacccctgtttggtttccgccatccttttttcgaaactttccggaagccattccgattgaaagtcttctttaatatcgaaaccaagcggaggcctcaccacccaaatgaaaggcttcccactcttttccaatcctttggccaattccatcatctgggctgatccgattgtgttctgagaaccgaaagagacgtatactacagactccggacgttgttcgttgagccattcgagacaagttttaaaaggaattcccaggtctttccgtgatgaatgtttgttcaatgaaggacaacatccaacagcccaaactgggagctgaaggaaactccgaaggctctccagtccaaggggttcgatctcctccactgtattacagaaccaaccatgagatttgagtgaaagtgagatttgtggctgcatgaatttcgaccaaagatccgttccatccgcatctctaacttcattattcaactgggagcgatgaaaacgacaccgttcagggaacccaggcaagacaaagtcgtgagaattagtgtgacgatgaggaaggtgaagccatgtcgaagctgtggctagtgttccgtaagcaccgcaagttgtgaaagtaaagttgagagttccaacgctcttagcaacatcagtggcccaaccgaaaaacatgtcggtgataatgcaaagcacaggacgaccttctttggcggctatgtcgtggagtaggcggcggaagggtaactcaagactgctggaggagtggagcatgtcgacgatctttgatggtggcacgttctctgtattctcattggggccggagaatgggagctcagcgaagaagagatggttatgatgattcttgtccgcgtcatgggaagaagaaatggttgaacgaaggtaccgaatattgagagaagtgttggctatggtgacggaaatgttgttgttggaacggtcgatgatctgggttgcaagtgctaggaaaggtgtgaggtggccgtgggccatgtatggcagcatcactacatgcagatgatccatatcgattgttatgtttgatattaagattcaagaatccattatatttgatgtgttttttttagcaaaaacatgatatttgatatatgtttcttcttagcaaagtcatgatatttatttatatatatatatatatatataaatatattatagtatcaaaaaagcctggctcatacgccaaaagtgaatacaaaaaacttatgcttaagttaaaaaaagaactaataagaagaaggaagctaacaaagaccgataggcctgaactcaaagcactcttaggctcatcaactcttaaacaatatatcagttgtgttaaacgtgttttaggctgttaataaggttgttagagttagttaattatttaactaactgatggttagtttgttgctgaattctatcagtcctatctgtataaatacattcactctgttcattaataaaatattcagattattactttcaataatatggtatcagatgcataaacccctctcttctcttcttcttcatcgttcacatactctgttccaccattgatattccaacatggtccgaacccgtgctactggatctcgaagttcaggccaaaatcctatgcctaatacttcttcaacaattccagttgctccgacgaatgatgatccgatcatccctccagtctctgcaatttctggagaacataaccacgcccagaatcttgttcatcgtcctcctcatgaagatagctcgagtccttattatctcagctctggagatcatcctgggttaatcttggttacccctcccttatcagacaacaatttccaggcctggagacgcgactttgagctctctgttggagcaagaaacaagacggtgttcctcaaaggcacattacctcaacctccgatcgacgatccacttcaccaccactggttccgctgcaatcaaatggtccagtcttggattcttcactcagttacccctgaaatcaagagcagcataatgttccttgaaactgcagctgcaatgtggactgaacttcatgcccgtttcgatcaaggtaatggtcctcgtatttttgaactaagggaaactctcatcacccttcgacaaggtgatgattctgttagttcttattttacaaaattaaagtgtatgtgggatgaaattcaggaattaagacctaggatcccttgtacttgtgctgcttcaatcgataaccttgccttcttgaatcaagaacaggttctccaatttcttactgggttaaatgaatcctttttccctgttcgtgcacaaatactcctcattgatcccttcccttctttgtccaaagtcttctctatgattattcatgaagaacgacaaagaaaactgaaaaatcctcacatcccccttcttgcttctgtccaagaatccacccaaaaccctgcagccattgcccaaaacccctctgcctctgcagccactactcatcctcgttccaacaaaaagatgagaccatactgttctaactgtcacaaaccaggtcatttaaaagaaaaatgtttttttctaatcggcttccctcctggttatggtgataagaagaaagccgagacaccatctgttaatcatgcttcaacatcaactgatcaatatggcattcttgcaaatcttaccaaacaagaggacattcaagccattatctccttgctgactcaaaaattgcagcctacagatgcctccaacccctttgcttctcatgtctctggtaactcttctcttaaccctctatggattgtggatagtggtgcttcccaccatatttgttgtgatctttccttattttctaatgtgcataaaattcccatagcccatactgtgtcccttcccaatggctctacaataaaagttgaacaatcgggtaacattcagatttcaaaggattttatcatatctaatgttctctatgtcccaagtttcaaattcaatctattcagtgtatctagctttatcaatgatacctctaacagtatgcattttacttctaaactttgcacattacaggattttcagaacaagaagattgggacagctaaacgcataggcaatctctattttttgctgcagtctgttcctttttccaaattttcttttccttgtaaacagaatattcatacttgtaataatgcctattcatggcattctcgacttggacatccttccttgtctacaacaagattactgaataaaacattacattctactaatgattctatttccccttgttctatatgtcatttagcgaaacaaaaaagattgccttttaattcccaaagcaatattactcaatcttcttttgatttaatacatcttgacatatggggaccgtttcatattactagcatagaaggttataaatatttcctcactattgtggatgatcacaccagacatacttggatttacatgctaaaatccaaatctgatgtgcaatacttaatcccacaattctataaccttgttcttactcaattttccaaacctatcaaagctataaggtgtgataatgcaaaagaacttaatattaagtccttttatgttcaaaaaggtattcaagtatacaattcttgtgttgaaagacctcaacaaaactcggttgttgaacgaaaacatcaacacatattaaatgtggctcgtgctttggcttttcaatcctccatagccctaacatattggccatatcttgttcaaactgctgtatacttaatcaatagaacacccaccaccttattacaaaatttaacaccttttgaattattacataataaaccccctgcctatgaacacttaaggaattttggttgtctagcctatgcctcatctttgccaagtactagacacaaattttcaccaagggctcatgcatgcattttcataggctaccctaatggaatgaaagcctatactcttctagacttagcaactaacaaaatttttcaatcccgtgatgttgttttttatgaacaaattttcccactcaaagggtctctaaatacccaacaattggaaacttttttttccacagttcctaacactccttctctatacactgctgaacctcccaatactggaaacaattcatcagcacctaccactgctgcttataaaccagtagctacaccagctgctgatatcataccagcagctccattggctacaactgatataccagcagcaaaaccagtagaaaaaccagctgaaaaatcagctgcaaattcacaaactgatgcacagtcttcatcagcacctgctgttataccagcagttgttccttctacacctccatcaacacaggatctgccacaatctccaattaaacaacatccacaaatcaccaaagcaggaagaaaatcccttcctcctgctcattttaaagactatatctgtcagtcttctactcatcaccctttaataaaatatctcaattatgacaagctaagtattccatttcgaaatgccatttttcatgcatatactgaaatcgagcctactagtttcaaacaggcctccaaattctcccaatggttaaaagccatggataatgaattttttgcccttaaaaacaacaacacttggtcggttgtatccttaccaccaggttgtcaaccaataggcaataaatgggtttataagatcaaatataatgaccaaggtgaaattgatagatacaaagcacggctagtcgccaaaggatattctcaactacatggcattgattatagtgacacctttgctcctgttgcaaaatttaacaccctcaagcttttcttagccttggctgccattaacaactggactctccaccaaatggacattgataatgcttttcttcatggggaacttaatgaaaaagtttacatgactctccccaaaggttatgtccatgagggggagttacctcccaatcctgtctgccttctacataaaagtctttatggtctcaaacaggcttctcggcagtggtttgcaaaattaagcaccactttgcttgaacatgggtttcaccaatcggcctatgatcattctctatttctcaaaaaatcttccacaagtttccttgcactcttagtctatgtcgatgacatagtaattgcaagtaccaatgattctgaagtcacttcttttaaggctttcttacactcaaaattcaaacttaaagacctcggccacttaagattcttccttggccttgaaattgcaagatccaaaagaggcatttcggtttctcaaagaaacttcactctccaacttttaaatgaaactggcctccttggctctaaggctgtctctactcccatggatgccaacctttccttaagcaaagatattggccttcctgtcaatgatcctacatcttatcgcagtctaattggcaaactcttattcctcactatcacacggccagacattgcttatgccgtgaatagactcagccaatataatagtgatccacgacagccacatcttaaagctgcctatcgaattgtacaatatctaaaaggcactccaggccaaggcctcatgtttcactccacttatgcctcacagcttcctgcagcacgtcttctccaaattcaagctttttctgatgcagattggggcacctgccctgatacacgacgctccataactggtttctgcatattcattggcccatctctcatctcttggaagtccaagaagcaatctacagtgtcaaaatcgtctgccgaagctgaatacaggtcccttgccaatacaacttgtgagatcatgtggctccacaacatccttactgatttcagcatctctacctctcaaccaacaaccattcattgtgacaatcaagcagccattcacatttccgagaatgcagttttccacgagcgcaccaagcatgttgacatagactgtcatatagttcgagaacaagtcaacaaaaatcgcatcaagctctcctatgttccttctcgacacaacattgctgatataatgacaaaggctctttttcctacccaattccaatcattgttgtccaagatgagtgtatcc

SEQ ID NO: 19384 - DNA, 2667 bp, Cannabis sativa
ttgcattttaagcacaacacaaaattagtatgagctcaagagatttgagtacaatacagtatgaaaaaaacataaaattgggcttgctacgataaaagaaaaattaaaaatttgaaatatagatttaaacatagcaccacaagataagtacaaaaacatacactacaaatatatttgcacgaaagtacaatacacaagcacagatgtaaaaagtacaatttttattttagttcgtatgttttctctcctatcaagggtgtgtcaatatttgttgctggatccagcgatccagctccctgtctcgactattgcctcggattgtctaaatgtggttaacaaaatttatagctcttattgtaataactctgttcttagtgatattattattagtattaggaactcattgttattcagtcctaatctttctgttctttatgttccaagagattgtaatcagacagctcactctcttgccaaggtcggattaagattagacaatgagtgtatttggaatggttctttacctttcaatcccacctgaacattgtactttctggttttatcaatgaatctcaggttttactcaaaaaaatatttgttgctggatctattttacacgattctaattagctttgttgcattatttacgaattcactttgtctaaatgcaaattgtaaatgtattgttccatgcacctttaaaggcttgaagcctgtagttaccaatataacttgaatgtaacaaccaaacacaagaaattgtagaatactcaatatctaacaaaagaaaccccccaaaaatatttatttatttttcaaaatgagaatagaaagaaatagaaacataaaaaaaagaaataagaatgtaatcaaattcaaaatatataaaaaaaattaattaaagaattattaaattttttcaatactctatcatttcatttcaaaatgaaaagttgttttactaaaaatgatattccaatattttaaagtgtaattaaataaataaataaaataaaaattatttattttctttttcattcaattacaaaagccacctaagagtttagatcaataagattgacaaatttaccaaaaataagagaagagcacaaaaaattaagatgcaaattaatgagaagatcattacccagaaagttgccactgagatctggtttatgggagaagataacaaaacagctcaaggttccaattgcagtagccaagggggaagaattcatcagaaaaaaagggaaaaaaaaaaacaaggaagtggaaatgaagggaaatgaagatgagtcctctaaagtagagtaggtggtgagtcagggttgagatttcagctgagggtgcagggatgatgagatctcaaattcatctgttctgaggtaatatgctgctgcagttgagcaattccactgctcgttgatcatgagtgaagtgaaaataggaaatgaatttgctcaactagataatacaatactgaaattcttttcatttggttcttatttagaatcgtgtaccaaatatgatattgtttctagattttgtgtagtatagcagttcatagttagctgagcatttgtttgattattttatatgtgaatgagatctcattagtcattacactaaccagtttttgtagatgatgtcattggtggcgagcttcttattaggaatatacgacttcttaagccaacaaagttaaaaacaatgaaagataactgagtactgatggctttggatatgtgtctacaccaatgagtaaagtcttttctatcaaaagaacaaaggaaaaacattgctaaagtaaccaatttgcagctgtaaaagttaagaattgacattttcatttcttctttttagcctttcttttcacaatcttttgtttaatcaaatgtgcagataggttcaatgataaataaaagcaattcctccagcaattctagaattagactcttcttatgataaagtataaagaaaggggattatagccatgaaatgcaataatcttaatcaactaacactaatggagcctatgaaataagtttctttatatcaagaaagcgaagaacagtctggcctctattagatgcctattacatctacattatcttactccactcgcccacaacgacgttaggctttatctttccttaccaatcaatgatcattataacaacatgtgtcgtttacctttgttagtaccaccaacttaatatgaatatcaagttttgttaataaaatattactctataaacacatgaacaacaccttgttcttccagctttagtattttggtaattattttttgaagattctcaccagctgtgtacatatctttgtcggattttctatgcaattggatgaggcaacagaataagcatgaaacaagtgtacttatagtagagaagatctttttctgttactctacaaagcaaaagtggaaaattctgattgcaataagcttccattcagttcatcttatcatctacatccaataaagctactcctatcaaagcctaagacgtggtttgttcctaaaccacctacaatcttccctttaaacacattaaaatatatttatatgtcaatggttggaccccatcattacactctcagttttaatctcacctaatcaatatgtagattaaaaaattctctatttct

SEQ ID NO: 19385 - DNA, 2890 bp, Cannabis sativa
aaaaaacgtgacccctcttaattgttgacaatctacagaaacggctatgcagtcaattttaagttttacaggctgttaaatagataaaggttacataaatatattatatattaaatgattttattataacataccaaagtaagttttgggagatgatcaacggtaggatgttggcctttgcaaacttctttgacctcagcacgaatcctgtcttgccacgtagaattacttgctaataacatgacagtccacgtcagcaagagtgctgtagtttcgtgtccagcaaagaaaaatgtcttgcattcatccattataagttgaagattcaaactaaaacccatattccctctcttttgcttttgcatttcattaagtagcataccaagaagatcatttccatacgagctacttctcccaatctcaacacagtcttttctgctttggattatctccattagtaacctctccacttctgatttcaatgactttatttctctgttatatttatttggtaagaacctacaacccccaacaaaaaaaaattaaaaactgtgtatcagaaaattaaaagcatagcttcttagtaaagattggaatctattaaaggaaaagctaatacgtaaagatttttttaattaattaattaatgaaaaataatataataattaccggcttccgggaagacatagacgacgacttgcttgagcacaaagatgttgtaaaaccgttaaaagatggaatatttgctttcctttctcgtagctgctatcgaactctgtacgagatattatgtcggcggtgagtcgggtcatgtactcaccgatttcgaattcggttcgacccgagtcaacttctttctctagtgtttggagcatcttcttagtgcattccaccatgtaccccgcatagctctgattaccaaataaaccaaccccatttgtgaatctttattcaaaataaaataaataaaaaaaaaaatatacatttttatatttatgtgtcgatcccacacagtactaaaaatcaatgatgatggtgatgatgagtcttcattattacattgattttatatttatataaataaataaaatttatcatttatattagaaaattataccttgagcttgtcacccatgaatgcaggggcaatgatgtgacgctggtggtaccaatctctaccgttggccattaataagccacgcccaataaaatgtttggacccttgttgttgctgccacgatttcccagatatgttactgtattttgataacagctcttttatcaaatcagtctccgttaaacacatccttggctcgattccattccaatatataaaccgtttccctgttccattaattattaataataatatcaaaaaaaaaaaaacaaaaattatcatgtaacatacagattaagagtaccatattgtttggaccaggcggaataatgaggtaatagacgcgaaacgacgtcgtgattgatggaattcatgtcgttggaagttgatttttctatgagagcagccatgtccaagatgttaccgaggagaaggcgaggtttgggcccacgcactccttgctggtccatgatttttctgatgcgtctcgggtttaaccaatagaaccacaccgtgttgtacacgactctaatcatcaccaccattactgctactactatcgccaccatcgccatctttattatacagaaagaaattaacagaggagttttcttatgtaataataatctgaataatatatcactaataagcactatctctactaacaaaatacagagagaaagagaaggttggtaacttggtatgagtgagtgcagtgagatatctaatttataggatatcattttgtcacttcacaaaatgtattcggtcactgtacattaatgagtatactttttaactttaattaatctcagccgtcaaatcaaataactctgttgctgattacaattcatacttagaataatagaacaaaatcatattccctaattttataatgcaggaaatctcacgtgtcattattattttatttttccaaaaaaaaaatggaaacaaatatttaaattactttaaaaagaaataataataaagaagaggaaaattgcctgctggaaataaaaaagtgaagggtaaaaatttgaaggtttgtgatcaacggaagagatgagaatcagagaatgtgtccaatcatggggttaggaatttaacttagattttattttattttacgtgtatatatttgaaatggaaaatggtacagtttcagagaaaaaaaaatggaaaatgctcaaggacaccctgtatcaggcattataaaatttgtaatatgattattattattattacatttttaatatcaaattttaaatattttaattcaataaataatataaaaattagaaactaattataaaataaataacaaaaatgggttttattctcaagtcagctattgaaatgcccaaaatttgataatggtatcaactttaaggttttattttgttgttttggtaattgtgtaaacattgatatcttaatctttctaaaattggaattaatatttacaggtaaggagaatttattccttaagcatacaaggcactttgaaatcttctctttctttttaaatcaagtgaactggattttttttagagagaaatttggactccttaaaaagaaaacaacaccatttattttgttttggatttgatttttttattacattaatatatatagtattatttgagtaatattctttatttataaatcaataatatgtgaatattttaacatttatttttatttttatggtaggtatttatgtttaggacctccttaggtttaaaattagttttttcttttttttttcttttt

SEQ ID NO: 19386 - DNA, 2914 bp, Cannabis sativa
ggtctatcccataactggttttgcggtttcaccacaaatatggcaatgatatttaaagattagatggacatttaaaatcaacttaattaaaaaaagattgtaatgtaatataaaaagtcaaaaagtgctgggatatataagctaggaagacagcactaactttaaaactataatttctttgatggttttcctaaacattgtgtgtctttgtaaggaaccattaaattattttatttgtgctgaatagcaaatactttgataatgctgcattttgcaatatggtgattgcagccaggctgcaatcaaattatatgcttttcttaccttttctagtgtgtaatcttttccatatactgttatacctaaaagttgggaaggaatgaaaaaggatattaaaatagtggaagtggatcatgaagtaagcatatctaaactcttcttttgtaaaaagtcataaaaaagattcaatatttatgccaaacatgtatgtgtatgtatatgcctatgaatatatattggataaactatgatgtgcctagaataaataaactattccacagattttctgctgttaaaatttctgaaaaggacaaccacaagtcttgcagatgaaagatataaaaatgagttctggtatgcaatgatcagtgcacgaattcaaattggagtattacttccagtctcccaggaaagaaaatctaactaaacatgttttagccagccaacctcaaatgtgaaattcaaacagggaaaatggtgtttcggacgctaatggttgcattgacttcattgcaaattgtacagttaatcattggtaaaagattttcatctcccagtcaaataaaacctactgccctcctcaacctaaaaaggaaaaagctcatgcagcatgctaagttcttagagtaaaatctgaaaaggagaatcaaggcagtcatacaatatacttacactcaaaattgtcaagtgattccaaactaatttcttctgcagtaatgtaataaagggcaggaatcattatttaattcttttcttatcttggtaccctctttcttgatgcatctgcggcagactttaccatgtgtatacagaagacagttaagatcaaatttgagcttattggggatacgttggttgagatggagatatgccttattcctgtcagctccagctggtaaccaaccaagagcttttgcaatctcaaacacctgttttacatctttctcagcataatctaaactatgtaatttgcataatatggaaacatctgaacggataaagcactcacatgtgtgtccactggaaaatcatcatgctgaagatggaacatcaagacgcaagaaacctatcatccatttcaaatattcaaaaagaaacaatatctttataaagctccattaccaaatccttgaacaatgtggaaataaaaatctttgtagcttatgtaccaggaaaaccaaagaaacaaactccacatactaatgtagtaatggaatgacaatagagtgagtgaagcatgagacatgttccaacaaagggtgattctcttatatattttttttttggtcaactgttactcggttaatataggtaaaattatcaacattgaggacaaacataaaaaaatatataattgttagaaagatcaccgttttggggccaattcctttaaatagagagagttcagccttgacttcatcaactgaaaaatctcttaagtactccaagcataactttccttttctctcaagcaaacatctcaataagtttttaatacacgaagcttttgttggggccaaacctccacaccttatagcattctctatcatttttgaatcagcacccaaaaccttgcccccatgcccaaaaacaaaaacacagttaatttcccacatactatcaaaacccacctcacataattcatcagtaatcatttaggcttactgagatgaattacagtgtaatacactacataaccagaacataaatatgctgaacccaacaaaacaacattagtaaaagataatccataaaagaagaacacgagagggtagagagacatacattttcccaagtgggaaatgcagacttaagagaagcgaaagccctttgagaatttagctcggtggtattctgcgacagcacagtgctcactaaaccgtccaaaacagtctccttttcctccaaatcaccatccaagttgtcattttcagaagggtcgatggaaagagaagagccgttttcatcagcggggagatcttcgcttggtctctgcctccggtacttggcgaactcttgggggaagccatgtagagccaagagggagtctcgtacggctcgacattcgtctggggttggttgatggtaagttgggtatggatctttggtgtgattggctgaagattttttgttggacaaggaatgtgattccccaagtggcttgaactgcttccgtttccgggattccttcatttctttgctctttttctgtaatatttttttcttctgaatttctgatacatcaattggagatatttcacgtctcgcttttatattcagacatgggatttctatcctcatgtcgtttctttcatttctttaaatcaaacgacaaaacagtttctactttctagtgacacagttaaataaacccaagaaaatcttcgaaaaaatgactcaattctttgtatttaggaagtctttggttggaggtaatgaaatgaaatagaatgaaaagaaaacaaagtactagaatgacattctaatagaatattctttctaccattttggtggaatgactattctattttcaaaatgaaggaaagatcattcaatgtagaaagagaaaaaatttaatgatttttttatcaatttttttaatgcattttaaattttattctattccatttctatt

SEQ ID NO: 19387 - DNA, 5513 bp, Cannabis sativa
ttgtaattagatcggtcggttctcgttggatttgatcgatttatgcacacctctatttcttgatatggtatcagagccatatccctaatgggttttcgatccacgcctatccagatgattagtcagctgcacgagatcgagtgcaacagatggtacattatcccacatggattaaatgtaaaaaattgaatcatatataaaaatatggactactctactcatcaattttgaaatggaaccctatttttctagacaaaattaaaatactttaattgtaattttttttgactaattgtttgctaaaaagcttgttacataaggttatgtttagaagttaaatttgaatgaagaaataaaaaaaaaaaaataaggaaagtatagaaaaaaaaaaatggaaaataaaaaattataaatttttatatttagtatgaaaaaaaaaatgtataaaaaaacactcaattcaacaaaatgttctttatgaaaggtgaaaagttaatttaattttttattcacacatttttctttttctacattttctttactatttttctttctcactaaaatccaacttccaaacatatcattttttaaaacatgtgaacaaaatttgttggatagaattttttaaaaaaattgtaagatttgctttagcgtcatccacatgtttgtttgttttttttttttttttttttcctaatcacacaacatttattaaattacgaaaactctcagtccatgttgaaaacaatttgaatacccaaaacgatagtgttttataaagatgaaaatataaacatctaatacacatcaagaatgacctatctccatcatattctaaatttcattacatccataaatgtaaaagaagaaaaggaactccaatacaaaatattaaaaaaggagctacttttggatgttatatattagaaataagattaattaggatttttgcccccttaattttaatatgtaccaaatcatgttttttgaacttttcagaccgttaaaaactccctgaactattgagattgttagatttaagaatttttgtctaatttcatttaattttactatttcagtgattgtttatgtactaaatcatggtctatcaattttgatatctaccaaataattcctcttgaattttaacatatactaaatcatgctccttaaactttcattcatattagaattttttactaaaatttgacaaaaacccttaaattcaataatctcaatagttcagggagtatttttaacgacctaacaagtttagtggacataatttagtacatgttaaagctcaggagataaaaattataattagcctaaaattaataatgttgatataaaacacgctaatcaataatcattatcaagtggatattatatagctaagaaatttattaatattgatgtaaaagatattaattgattaattatcaggtggatgttgatccataaatctatccacctaagcatcaattacccagtaatcggttcataaggttacttattacattgtcaatataaaaacttaaatcagaaaacaaatacaatttccaaacatgcatgccttccctctctgttgataaattatttaaatttcagttagccaagtcactatcaaatcatttaagagaagaaagaaacatccaaacatttgcctagaaacagcacaaagtatcccaaatacaaaaaaaaaaaaaaaatgttgactttagattgatgggtaactttttgtacatgggggagttgaatggcttgaggggcatatcataccagtaagtaattacacaagctagaacaagatgttattgttcttcttcttcaactccacaggggcccatgcctgctgcaactgcaagaaactttatttacagcagacctatattaagtagaaggtctcttcttgtacttgttctgaactaagcttagcagaaaatctgtaaatatgtgctcataatctggcattttcccataacctgcatttttattattaaaaaaaaaaacaaatggtttgtttaagcaccttgcattcactcattcaaaagagtcaaaagttagatgccgaaatggttactttataaaacaattattttcgagaacacagcagaatctaaagaaaagtctgtatacttgcctggaaaatagttgatgtctattacataaaagacatctctggtcccatgctgtcggatcatatctatattgaacaaccggagaccctgacaaaattatatgatatacgattaagacataggaagatacaaaattcatttgttgctaaagttattttacataaactagtgagtgattagtatttaccagtcgtcgacgaagctctttagcaagcctctcgagtagaggtcgaggaggaagttctgcaataatacatttcacattaattcaagggaagaactttgcaatttcatcattagattctctgaagactgctaattatcttagtgtgcaaaccttatcacactactacacaatattaatcagaacggaaaaagatctggttacttaacatggattcctcaatagtcaattatgttatatcacatctctggtgagttatttagaccattataaccaaaaaaaataaataaatatgtatactcaccagcaatactaggctccaaatctgcctcgtctgcggtagctgctgcacatgaaactctagggaatcgaaacaggccagtaacatcggccagttcatgtttagtaacatcgggtaaagagaaacgtctaaccacctttatagcatcaccaacaatatatattttaaagactacaccccctacaataaggaacactgttatataagtatcgatataaacattaaatggaactaaatatgtttccccatcagtaacagcattataccatgattcacaaactcctgaaggaccaagggaggttcaagttctgagagacagaattgatcgtatgctaggaataattcgtgagatttggcactgccatccacaagtaggggctttgcaactttatggaaaccacaaaaacatgtcagaatcgacagacagttaatggatttgcacagagatcaaaatccagaaaactaggttattagtgtcgggcatagagaacattacagcattaggcgacacaaacccaaatgtttcaacttacaagaataaaggaaaatactcaaggtaaagagcagaaaaatctacacaaaaacataacagccatacccaaaggtaaattcagcccagctttagtaacttcataaggtattgacaacggatcttcagtgataaccaattgcttggggatgcccaccttgcctgcataatagttaaattagaagcataatcaaaggatacgtcaccaattcaaaacatgtactttcatcaactatcttcagttacaggtaagaaaatatttaagcaggatctttaaaattcataaatagaacataccatggtagtcagacaactctagatctaccacatcctgaagcatggactgacgattatgtagatgctgtatggcctttggagaatcaagaacagttacttctggatgcttttgcctgtaatccttcaatgatggaaagaaaagtcacaaaaagatgtcaacaacaaacaaaattataccgcaattagtatttattttatgaaaacaagtaaaccatagagggaaaaaaaagatagttaaacctatcatactaatctgcaatatacatgtccataataatggggatgcttcttaaataatacagcaaacctatgaaaggaccctaatattttaattgaagacttgcacacatttaaaatccatcatctcaaagaatgcaaggaacaaacgtgtgtatgaagcaccaaaattttactcatgtttatagaaatcataccaaagaatcctatagtggcaacaaacacagatatatcaatgacgcaaaaatcacagatatcaaacacatatatcaaccctccataattaaactcaactagccaaataaaccctgtaaattcaaacaagacaaatcctacaaggtatgcatgacatctctttgcaaccaagctcgccaacacctagagaagttatctatattgcttgcagaagtaaatcctcacttgttcaatacttgggactgaattctacaatctggtcaagattcatgatgatgagagcaaaaactctgcaaattatgtcagacaaaaataagttttaagggtcaggagattggctttacaaccaattacgaattaccggcagttcacacttagtccacaccattactataacggcatattatccttttatactatcataaattgtatagcaagaaaatgcagcacacacatttgtaaccaactacagtttaaataagagatgcacaaatatcataggaccaagaatcgactaacctcaattacatcgctccattcttttcctaacaactagaagaaaaacaaaaagtgtcaaaggtttaatcaaataaaaattatacagtgaaagaacaaaaatctttatagacaaaaagagactcaaaaagtgatcatggccaatctaaaagagtaatcaaaccttaccttatgcagaagaacatcaaagggaccttgatccgatagtggcttgtttagatcaatagcaacaaagaatatccccttacttctgcattgatagaaaacaatctctacagtcacatatctaaattagtggcatacaagatgggattcttttcacaaacttctactagtttgtacatcgtataaaattagaagacattcaatgcaaatggaatggtcctgctgatatttgaaaactattatcaatactacaacataaatatgaattccagtcatatatttgacaatacaaattcatttctgaattttctgttatcttatcagcagctgatctgctaaaaaaagtgtaggaaataataataatataatagttacttaagtaagagggcacatgggcactgaaaacacaaacaatcatcccaaaattactagatggtaatccagtaaaataaaatagataagaaagttacgcaataatcccaagtataagcttgtcaatcgtgttcttagtaagataacaggggtcaaagttaggactagttccaaaaaataaaaataaaaaacgcatcaccaaaagaattgacttttggttccaaatagtaggcaagtaggttaatcaatatggtatatattatagaatattcctatttagaaaattttgaaggtaaagaagattctatacacccacaaagctaaccaaatatgcctcatgatctatgtttagaaagtaatcggttaataggtgaaacatgtttaaccacaatagacaaagatgcccatatccccaaaacccaccatcaccacttcaaagaagccgcttttttggccacaaagaaaaacacaacacaaaacaaatgaaactacaaaacaagaccaaaagctctcaccaaccatatatggaaacttggtaaaaaaaaaaaaaatagaaaaaccaaaaaaaaaaaaaaa

SEQ ID NO: 19388 - DNA, 3783 bp, Cannabis sativa
  modified_base (59)..(59): a, c, t, g, unknown or other
gtgtgtggagggatgtaaatgaagtatcaatcttgaagtgatttccctcaatgtgatanatttctttgtaatactttactgtgttgagttgtaattttaggctcattcaattgtgtactactgattattcttattcaataaagatccattattcattcattatcgagttaagttttctttgtctaaattcagttaagttcaagttttgattttgtgattggttttagttttgtttgtacatttttggacattgttactgttgcagtaacctcttttgagagtgaggattcaccacagtatatatatatatatatatatatatagtctagtttggaatggagagaagtattgtttaagatttattttgagttagtcttccttgggaaacatctttgaatagatagatacattattaatgaaacaagccctaaaatttgatgaaataacaatttggaagatctaccgggcaatctatcaaaccagttgagtgcaaaactcaaataccaatactattcattcaaacaaccaccatggttttggaaagtgaggggaaagacccatcaagtcatctaattacattattcaatatcatattttgtatggtggcaaggatctcaaagtcaaagttggaaaattttattcaaaagaaataatatgaaagtcatcatctttagacccctttacttgttaagcctcaaattttgattacaatgttgctgaaaaagttgactttgtaacaataaacaaaacatatgtttaagaagaagaactacactaataaatgatatgtttcttattgtgttttattgtacatctctttaatctgatatctgacttaaattagtatctgagtaattgtcccctgattgtgtggatgaccatgttgaggatgaactgttctctccaagatcctccattggtgcctcatttgaacaatagaatgtgaatttagttggaggcatttctaaggactcagtttgatcttcaagcatctctaccactttggtcattgaaggacgatcagatggcttgaattgtatacaccataatgcaattatcatcatcttctttatgatcttcacttcctccactgtgccaacaccaaaatcaaattcatttccttcactgaattggttagaaacccaagatgggaagtgaactcggctcgaattctctactgctgaatttatattccttcttctactcgccatttccatcaataacatgccaaagctatagacatcagctttataagaaactcctccgaggtttttgtaaaacaattctggagctatgtatcctaaggttcctctcgctgcagttaaagacacaatattattatccaatggacataatctagctaagccgaaatctgaaacttttgttacaaaattctcatctaaaaggatgttgtgtggcttgatatcgaaatgcagaatctgcatttcgcatccttgatgaagatactcaattccccgagccactccaagtgaaatttcgaacatcatcttgtaacttaaagagtcaattccttccttagagaaaatatgtttgtcaagagatccattagtcataaaatcatatataagagcacgctttgaaccttcaacacaaaatccaattagtctaacaacattaacatgatgaatcctaccaattgtagcaacttcattaacaaaatcatccccatttcctttagatgcatccaacatcttaattgctactaaatgaccacttcgaagtttgcctttatacacagagccatagcctccttcacccaatttatctttaaacccttggctcatctttctaatatctgaatacgagtatcttataggtacaagattgttataactttgtaagaattcttcaatacgatcatacatcgataaatgtcgccttctccatgtgtagaacaaaaagatacacaaacatggagtccctaatatggcccttcctacaatcacagctcctgcattaagaaattggcagtagcatatatcatgagtcaaattctagcctacattaagtcacaagtctccaactaaacttgctcatataaaatgtcttcttctggtttttatgtgtcagctcattgtgaaaatgtatgataagtttatgaacaactaagcttaaaattagaggtcttaccaagtataaatagtatcaaatatcggtaagctgcaaggagaccagaaaaagaaaacagaaaacacagattgatgaatcaataatatgcaagaacataaaagtttttaaggcacaataaatgaataaaccatgtacttactactaaggtcttgcaatatttgatcccacaggcctgcatttttttaattcaaaacaaccaaaaataagttcaaagattattgctttatgaattccaatgaccaaagttaaaagactaagaaaaatacttattcggattggaagtggagtgattcctggaatccatgaaagcttaaacccaaaagccatctcattatgaatatccatgaatgaagaagcattggtgttattgtttctatgctgagatactaaagtcgttagctttacaccacatgatttatccatgtccgaaacagtcaagctcccattgactattacataagaatggtttttgtaaccattagatgagcaagaagaagtgtctatataaaaatgggatttgactgttttttcacaactcacgaaaaccagtgtctttgacataagcttcagagtccaatctgtgctccattgttgaagctcatatgggtcaccctgtctgaagttgtaccttgaaatagggtaacgagggagagaagagcaattgcccttttgaattcctggatcaaccactcttatggtacggttaatgtaattgattgcttccactgagtattttcctgagtagaggtttagtattgtgatattgttctcgcaagaaagaacatacctttggtctccacagctttttggatcggattttaggctaaaagggtagcttatattcttgattttgccacaggaagaaggtgaacattgattgttttgggctctgcaattgaggaaaaggaagaagaagaagaagataaggatcaagaatctaagatgcattttgttttgggtctggaaagagccaaaggaagaagagttagccataatgtgtatatacattttatcaaaaagagcagcttgatctcgttgactaagattctgtcaagttggaacatgttccacaactgagctagctaaataatgctactaccataaaactcccatacattgtacctacccattaaagtttgactattctaattttattttactcaaatacccatcaaccctttactagtttcccatccactcatctttatcgataaccagaacgagaaataatgatggggtttctctcaaaatctcaacttttttggtcttacactctgtttttgcttctggtgttgtccattaatattgaagctactcaaacacagtgcaaggaatcaagatgtgggaatgggccggcaattcgattcccgttcagagtcaaagatggtcaaccaaatcactgtggttaccctggctttgagctatcttgcagagggaaacgtacggttctagagctgccaaaatcagtaaagctgtttgtgaaaagcatagattacaaatctcaggtgataaaattatatgaccccaatgattgcctttttggacagcttttaaagatcaatggtttatcagtttctccattatatttcgcaaaatttgaacttcgtaactatacaatgtttaattgttctg

SEQ ID NO: 19389 - DNA, 6944 bp, Cannabis sativa
  modified_base (495)..(495): a, c, t, g, unknown or other
  modified_base (3437)..(3447): a, c, t, g, unknown or other
  modified_base (6188)..(6193): a, c, t, g, unknown or other
tgaatactcgcacttgtcattacccataaaattctctttcatattaataaaataatataatttggtgttgcgaaattcactcgacaacacctatatatagtgttataaataaatcctttaatcctatatttaaaaaaatataaatatctaatttgatctgaattcaaaattcaaattcaaatataaatatttaataatcgaatatcaaaatatcagtagatattttatttttttaataattaaccttttaattaaataatcatcaaataatatatttaattaataattaaaagatgattaatttaatttaatttaaattattttaacttaataaaataattaaatcaaattaatcaaggttctttatatgttaccctacacgtgtagaatgggcctacacatgttggccatattttaaggtcaaaaatatattctcaattttgctacaaataaaatttattatttattcaaccaataaataataattgattaatnctcattaatctcttatttcacaaggattaaaattaatattattttctctaaatttatgtttagggctgagtttatatttcgaacctattttctgcagaatttttgatcaatcggtttaagttacttttttgtttggattctttttttttttaggttgcgattgggtagaattaatgttgtcttggtcaacataattaatggcgtcttagtcgccggagttgtttcattattgctgaactcctatcatcgctagtttcattcgtttctctggtgcaatcctggtgttgctaggattttagagaaaaaattatttctgtaatatttattggttgggctgtatagatgtttaatatgtcgattgactgtatttttgtaatattattacctttttaagctatatgaaaaaattcccctttgtattacctaaacattaataattacttgttaacttttctagttatttttctctttgtgtatgaagtataattgataattatgttaggtcaaatatacactaggttccataatcatcgtgataaaatttcttaaaaattaataaaataacacacacacaaaattccttgttgaatcctacaacatgctttgttaaggtataaagtttaccaacgtgatgtagtaccaagccagatattggatgagatttaaatccttaaagtattgatcaatgctatctagcccaattctagaaaaaccatctaaatgcggagtatgagacatatacataaaagatttatcttgtcgaaaagtactcgctttgagagtccctttgttggactgcctcttgtcgagcatcttgtctatttcttaagaattagcccttgcctcttggatcttacgctcttttgctatcaaggcggtatctattgtgagagctttctccatctttttggcagagatattgacaagttcctcctagaggcgatgatccttctcaaaggaaattcaacaaaggttgggttctttgaaggattgatggttcatgattaacctaataaccccaagttatttttttctggtgacaatgttctggacttccaagtcatcatccttaaatttgacatatttaatcttgattttttggatgaacttagtcatcctagttgggtgtaaggacctattcagtacaccaaattaaaacgagatttagctaaaaactcttgaaaagacaagtgagaaatgaagtactcgtttgaagtccacaactagatagtgatgttgctccactaagaactcagtcgtgaagaactagtaatgtttgatgtttgaaggtgttgaacctcacaaagtagtcatggagcaggagatgagcttcgatagcgatgtgaccaaggctaaagggtcgcaaagccatccttgcaaatgtggaccttctcgttcttataggccaatgtattgaaaaaaagatctgatgcgtttgaagccaagggcttcttcaaccttattgagcatcaagtagtataaaattttttggggatgccatctatctcccacatattcccttcggatgggggtgtctctctaggacaacaggttcctcattcacctcatcttcaaggtggatggtgattgttagattgtttttagtattatttttaagttaatttttagtgtgtttttaatttagttctactcttgtttggagaaattttacgctttttatcttttatttttgcagatttaaaatagaaaaagatcagagaatatcaaaggaataagatagaaaaaggataaaaagatctcagaaaaagatatactataaaatagagaaaattatgcaaaaaattaaagttgaaacttcaagcttgaattcgactatgttctaattagagtttagaaaaagtcaaacataaaaattctggatctctcttttatctttctgaatcatcttgaattgtccaattctgagtaatattgagagagttatggccaaaatacaacatgtcgatgcagcaaaaaactcactgcccttctaatcctaagcaaaataggtttttttagcgtctttatcttttttttttaccattttttggctatataagaagtgacttcaatagtttttaacaagcaatcaaggaggaagaaaattggagataaaagttaatcgcgaagaattttttaacggggttttcagcattcttttcttctctattttcttctcttttcttaagttaatatgtgtgattttactgcaatgaacatgagtagctaaacatttaattagggtctagatggatattgtttgacattgttttatggttctaatatgattttattttccctcaatttttatgtattctatttcattcgtacttaattacttttatttgtctgatcaccaattaactgtgtataattttgatgtgagatctgagaagtgagtatcaattatgctatagtgaaatataactgaatttcaatttaggaagagagtacctgtatgatttagatagcttatagggtttctgtgtttaatgcatgttccatgtttaatttattacgggagtagaaaatttgcatgtaattgagatttatatatctaagaagactataaattaccttagtaaacttgctattgtataaaaattggttataaaaagataatcatattaaaccatgatcaatagatacaattgaaatcgaaagccctaacttttattcattgttaattcctttattaatttacctctttcttttcactgttttttattgttttctagttttaatcttctcttaaattttatttagccaaatagaagtaagaatttaattttaacgtactcaactacaatcctcgtgggatcaacctcactcttggtgagtctattacttgttaaaacgatacctatacttgcgtgttgcaaattaccacaacaagtttttgacgccgttgccggggattgttagttaatattattaaaaannnnnnnnnnntctaatttggtttttcttttcaattatagtactaattatgtttgtttaaaatcttatcttttttttttaggttccactagtttatgaaaaatcaaggtgcaactgtcagattacctattgatcctgaaatagagaagacttgtagaaagaacagaagaatgaagaaattagaaagagctgcaatagagattgaacaagaagtagtcatggctgacaacgctaataatgtcaacgatggagaagctttagaagaccaggctaatggtcgcaactacaatgacctgagggactatttgctgccaaacttgacagcggccagatcctgcataaggccacctattgttaacgccaacaattttgagatcaagccgaccatactgtagatggtccaatcttcagtccagtttggggggctgccaataaaagaccaaaacatgcatctcgctaacttcgaagaactctgttagacattcaagatgaatggagttagcgatgaagccatcaggctgaggttgttcccattctcacgaagggagcgagccaagagttggttggtatctttgccacccaattttatcaacacttgggaggaattggccttgaaattactttccaaattctttcctcttgcaaagatcgccaagctgagatctgacatcaacaacttcacctagcatgaccactaatctctttataaagcctgagagagattaaaggatttattgaggaagtgcctgaactatgggattgaaaagtgattgcaagtgcataacttctacaatggactggtgagcaacatccgaacactcatagacgccgcagtttgtggggcttttatgaggaaaagtgctaatgaggcctttgaactacttgaagagatggccataactaatcaacaatggtcaacagagagaggtcaatctgaaaaggttgcaggtatgcatgaagtcgatgctataatcaagttgacagcacaggtggagacattaacaaagctggtgactacacaagccatacaagcttaagttgtctgcgagctgtgtggaggatctcgtactactaacacctgtcctatagatgtagatagtttgccaatggagcaagcccaagccattagaaactaccagaataattatggtttcaaccaagggggtcatcagcaaaacttccaaaaaaagtttcctaatcaacaacaataagggttttatcaacaggaaaaccaatctcagcaaagccaacagtatcaacaacaacaagactctagtggagggtctaattctcaattagacatgttgctgcaatttatgacggagattaagtcttccattaaggtcttggaaacccaagtggggcagttggcttctcaaaacactaacagggctctaggtaacttgcctagcactactgaagtcaatccaaaagagaactataagacaattaccttgagaagtggtaataattatgctggtccgagccaagacaagccagaggatgaagaagatgatcaaccagcaccaacacaagagaagaagaagaatactgacggtcttcaacaaaaagaaacttcacctcctatcagtattgaccatcacatcaaaattccctatcctcaaagacatcacaagaataagctgcacatcaacattcaattcatagaggatttggaacagatgccaacttacctgaagttcatgaaagacattctatctaagagaaggaagttggaagaatttgagatggtggcacttactgaggagtgcagtgcagtcctgcaaaagaaactaccacccaagcttaaagatctgggtagtttcaatattccatgctcaatagggggtttgatagaaacaaaagctctatgtgatctgggagcgagtattaacttaatgcccctatctgtgtttaaaagactaaaatttggagaagccaagcccacaacagtgactctacaaatggcagaccgttctttgactcatcctcggggtataattgaagataatttggtgaatgttggtaagtttatcttccctgttgattttttaatactcgacatggaggaagatgagaatattcccatctttttaggaagactattcttagccacgggaagagcattaattgatgtgcaaaagggagagttaaagttacgcgttaaaaaagaagaagagactttcaatgtctttactgcaactgaaattcctacctgttgttgagtgaaagttgtaaaggatagtcaagaagcaactaccaataagaagaaagggaagcccaaagaacaatttcgaacttttcaacgttgtatgaaaagactgatgtgtgggaattgtgaaggtgactctcatcttatggatatcttcaaaatttgtaacgttggaggacagttctcttcatttggtacaagggcccttatggatgcaagaggtggattgtatcccagttgaattatgcaacaaccaccaccatcaccatatatattgatacggctctcaggtaagttccctttcctttatttttaatatcacattgaggacaagatgtcactttagtttggggggtgaacttaaatttttattattttagtttttaatgtttctttgttttgagtcaatttacttattatgagtcaatttgaatgtaggtagataacatgatttgaaaagttcatttgtttttcaaaaatccgtgtgctttgtgatattacattcttgactaatttcaattttgtgctttaaaagaacatnnnnnnatattaggtaattttctagtaattaaattggtttatgtatgttaattgggacatgtggaaagacgtttgaaaaattctagaacttgcttgcttgctatttgaggcaaaataataaattatgcatcactaggaaagtgatataggtattttttttggattgattgtgcctttcaagccatccctataattttatcctagttacccccttttttttagccttaatctattttttgtttctacacatattgagcctagaaatgataaacccatgaatatccaaaaatttaaccctacttatacataagtgaatctttagtttgggggaatttggatgggaagtttgttgtatgtgtgtgagaaaacgtgtggaaattgagagaatataaaaaaatttagattgacagcaacttgaaaaaaaatctgacaaccagtgtcaaattcagaaaaaaaaaataataatataaagttgttgcaatcttgttgaaaaaaaaaatagaaaagaaaaaaattctctcatgtaattgttgtgatattttgcacacacaagtgcacgtatcgattacaagtagtagactcaccaatagtgaggtcgatcccacgagaattgtagttaagtacgttaaaattaaaattttacttctattcggttaaatgaaaattaagaaaagattaaaattaaaaaataaaaatagtgcaagaataagcaattaaattaaataggaaatttacggttaataagaactagggcttt

SEQ ID NO: 19390 - DNA, 3186 bp, Cannabis sativa
tatcaaccattagatgaagtgttttgtaaaaatagtagttatgaaaatttttattatcaaaataacttcataaaaatttttattagtcaaataacctcttatggttaaaaaaatgaccatgagttacattgtgcaattataaacaaattatgcttgcaaaacgaccatgaatttatactgtgcgatcattatgatcgcataaagtaaattaagtgaaattattttataaattttagtatttcaaatggtcaatttgataaatttttcaatatactatatatatttattatatatattataattttacatttcaatattagttttattttaaatcacattatatatatatttctatatataatatatgaaaatcttcataattttagaatcgtttaaattataattagaaaatatatatataaataaatattataattagtaagaaatataaatattattgaaattttgagaaatatttaaatgaataaaaatgatatagagaaaaagatagagaagttcgattgcccttaagttacgttggaggtgctcttcttttgaatagggaaagtgtacttggccttagccaaaattctgccatcaaaactgtcaataataagcataacaccaccacaaaagataaaatagtgaataatcagaacggactaacaacgggaccacaaagctcagccttatttctataccatgccaaaattaatgtcccaactcataacattagctaactgcaaattaatataatccagaggtactcataccctctatctaataaagctcacttgaaaatggcaatattaaaagtgaatcttagtgctctgaaggttacataacagaaaacaagggacatggaaaagtattggcttcttttaacttttatgtcccacattatttcactatgcagatcttaatcacagaggcagttccaatacgatggagtgccacaactgaatcaccaggcttacacagccccctaccagttgccgatttcaatgcagcttccaaaatcacttctgtagattctgcatcagtggccttggctgatccttcggccaacaggggaagcaaacccctgtagatcaggctgtgccttgctggactttcatcactgcaggaccaatcaaatgtgtccgttgtcaatactggaacaacaaccgatacgattggaacagctggcctgtatttggcgaccaatttggctgtggttccaccacgtgtcagcacaacaatcagttttgctctggccttgttagctgttcgcacagcagaggatgcaagactctccaaggggctcattggaagaggggttgaccttatcatctccttaaagattgccccatagtcaagagatgattctgcctcaatacatatacgggccatgatcttaaccgcgagttctgggtaagcccctgctgcactctcaccactaagcataacacaatcagttccgtcaagaactgcattagcaacatctgtagcttcggcacgggttggacgaggagacttgatcatggactcaagcatctgagtggcagtgacaacaggcttgcccataagattgcatttataaatcatcattttttgtgccaaaaaaatcttttcaactgggatttccattccaagatcaccacgggcaaccatgaatgcatcagtctcacgcaagatctcatcaaagttgacaaccccctcttgattctcaacctgatataacagcacaaaacatataattatacgtaaaaaaataattattttctacaattaacatcaaaactatcatcctaagaaaataagaatgaatggttacaggaacatgagagatttatggatgcaagcatcatcttaaagataacacacctgaaatgacattaaatactgagcatacctttgacattaacataatattcttggcatgagggccaagaaccttacgaacattaacaagatctgacccctttcgtacaaaagaaagagcaatcatatcaatcttgtttggaacaccccagtcaagaatatcttccttatccttctcagtaagggttggaagatcaacgacaacaccaggaaggttaacattttttctctcacccagcattgctgtgttttcacaacgacatctcacagacccagcttttgtatcacacgacaagacagtcaaagtaattgttccatcagcacataaaatggtatttccaggcttcaagtccacagccaacttttggtagctcatggaaatcatctcagggtcacccttgatggtgtaatcagtagtgatagtaatctcctgaccctccttaagttgaatagctttgccatccttaaggaaaccagttcgaatctcaggtccctgaaagaacaagaaaagcacaaattcatggttaataccatttaacagagtttctcttcgatgaaacaagtctctctgacagttcacaatagccatgtagcataccaaacaatatatcagcaaacgagaagaatagtaattaaacatgaaacccagaagcatccatgaattggacagtaaaagggccagattcaaaataaccgagcagttcaattttcttgtaagtggaatatgagaaaaaaaattacaattgaagtgtgggtgcatcaggtgtatcatcaatttaagtgttttcagttcaatatatattatagcaacaggtttctttaattttttttttttcttttactttcatgttattatttcttaccagaacttctcaaattaagactggacatggaatatggtgttcacgaaattaaccattttcacatttacaatccacaccgtttcccaattaccatagaagaaatcattagttcaaataagcacacgaaattcacaacattaataaaaataattgacagattttgttatatattattgttattattttgattttaaaaaaaaaaaaattaataaatggacagattaacatggtgcatgttgtatggtaatagtccgagcggttcgtctgaatcagaagcagcaacaaaagaattaattaatcaccataatttaccaatcgggttttcttgaaagttctgatcctgagtcagacttcactcaactaagcatttatagcataaaaaaaacatgtttttccttttaccaaaaacatatataaatttttacagaaaatatccttacctaactaatgttctctccat

SEQ ID NO: 19391 - DNA, 4116 bp, Cannabis sativa
ttgaatattttatcatccacttttaatagtgttgttgaggattctaaataacttttatcttcttttagggattttttttttacgttttgtcaaataatctgctaatcaagttgtttatcttatgaatagaacgtcttgtttatatgctaattgtatttttcgaagtttaatatcctttttaatgttgaggccgaatcgatctacttaaatgaaatttaccattaaaaaataataatttattatttaatagataaattgatatgactatcaacatgtataatattccaaaaatttacatgtgtattattatggagacaaaaagatttttattctattgttatttaagattaattggtcttaatcaattataggaaaaattagtttaatattgaaaatttagtactacaagatatattttaaggtaaataagatctcatgttatatatttatttttgaattcaaaggcacatatcaataaacttcttgaacccttctattttaattttaatttttaaaaattatataaatttataaattataatctatcatcaatttatttgaaaattatgttttgacccttcttaaatttgttattaagtactttttaattagccacccttttacttgatctcctatgccttttaataccttaaggaagcatttagtatgggggttaaatttagccctatatataatcaagaaaagcaaatgggtatatttagtcctaccaaattagatggaaatgatatgataaattatatcatgttttggcatatattattttaaggcaatcgataaatatagctcattcaattttcaatgaatattgaataatctctcatttcagtcatttttaaggatatatcacatggaaaaaaatatagaacttgtgctccctatatacaattatattaatattcttacctcaatattgactatatatatttttgtgttcttttctaatggttctccctatatggatttgatagtttcatttacactttattaagaaaagacagtcaacacaaaagcattaattattcccaaattaaatggctagctagctcttcaaacccaaaaataatatatatgtacaaattatatatatttatatatgaaaaaaccctacaccacataatgtttcaattgtggtactactgtatatgttaaattgataccatgctttttttgattcatgtatttatatgcttatataattattatgagtgtgacacattaaataaaagtccattatatcacaatatattgttgtagttatcttattattaattaaccctcttattaatcactaatattgtaatggtacttacaagtattataatctcatttttagcatatgtcttgattttggcaagtgggagagattaattcaagacattgatagaaaaaagagtaataattaagattagtttattaaggagttttattatataattcttcctaacttcctaagtttgcaatataaattccaaaaaaaaaaaggaaatatatatagtcatttagtattttatattttcatgaaaaatatatattggtacccagtattttttaataatatttatttagtacttttgtattttgaaattgtacatatttagtactctcaaataaaatttaatcaatttaactaataattctcagttatatataatcaaataattaaatttaaattaagaatttataaaattttaaagtattaataaaaattttatcaaacaaatttaaatttaaatatgtataattttaaaatcaatgatatcaaataagcattattaaaaaaagtattaaatgtgtagtcatccaagaaaaaaatacataaatataatcaaatttttttaacatcaaaatcttagagtctgaaatatatttgtatggaaagtgtatatatataaaaaaatttaaaaactagattacctaacaacaaaatgtttgttcagaaaaaaagaaaaaacaacaacaacaacaaaatgttataacctttggggacatatatgtgaactcaaactatgcaccaaaaacattataaaacaaatcataaaatgcacttatcatatatattagaaaaaaattataacttgcacaaaccaatatatatctaaaatagaaaataacaattataaaacaaaaaaaaaatcctgcaccgtccaaatttgtaacttgtgagaggaatatattctattggtaagatgggtttttatcttttattttttatgacatcttttattctatttgcttattatttttccatttatagtttaggtgtattcattataataataaaaaaaaatgaaatcttttgatgtaaataaataaaacaataataaaataaaaaataggttaaacccactaaaagatggcttcccatatataggggttggaaaacagtagaagcagaatttcattcactaaaccaaccacaaattcatgcacatccaaagattgttttattttgtatttgtactcactctcttggcaattttacctttacatcttgtttttttatatatataaataaaaaccaaattattataatcaaagtgaggaactcagtgtatctgaccttattttattactcaattattgagagttagataaataaattagtataataagagttggtatagagacaagttacaggtaaaaccatgtttcattgtctcatgtagttaaaaaccaattttttatttttaattttttcaaattaaaaaataacagtaagattggtccaatgcaaatggaaatctgtcttcaattatgtcccaccgcccaagtagatccaattgcaaactatagcaaaaaaataaacttttccttttttctgagtgttattcttttcatggggattctctatttcaaaccatgcatcttaacatacagtataaatattatttttttcatagaaaccaagtaaacatatactataataaactctattataggtgtttttgttatttttaaactgagttttctgagttcattattttgttttttggagtaataatacaatactatggtgatggagaatgaggaagtgtcttcagctccttcgacacctgctacaccaggaaccccaggtgctcctctgttcgggggcaacgggttcaggcaagataaaggtgggaatgcaggtaggaaatctttccttaacagctgcaccaaatgttttagccttgatgattgggctatggaggaaggaacagttttgcacaaggtctcttcttctttgtcacctcctcctgtctctcttgccagaagggtatatctcttctcttctcttctctttacatttattatgctacatttcgattttcgagtactaactaaacaacattaacacaggtgggagctgagttcatgggaactctgatactgatctttactggaacagccacagctatagtgaacgaaaagacacctggctcggtgacccttctgggccttgctgcctccaatggccttgctgttatgattgtcattttgtcgactggccacatctcaggagctcatctcaaccctgcaatcaccatagcttttgctgctctaaagcactttccatggaaatatgtaagcacttaatcacaaaggtgatcttctttagctaattatgtgaataatatcatgctattatttcattgttgtaggtgccagtctatattggagcacaaattgtcgcatctttgtgtgcttcatttgctctcaagtggattttccacccgataatgggcggaggtgtcactgttccttctgggaatcatggtcaagcttttgctttggagtttgtcattagcttcttccttatgtttattgttactggtgtggccactgataccagagctgtaagtgccaaaacttcactgctttttcatccttttgagttgattattttcgaaactgttttggggtgaaaccctttctattacaagttctaagcttatggtttctttgtccaaatatagtaagagcagacaaaagtatttctaaaccacacattcctaggatttgctaagagacagagaatctttttcatatatttttctagagaaagttttggctaagagacaatagtcagtgaagatagttgttacactgaaaagt

SEQ ID NO: 19392 - DNA, 4149 bp, Cannabis sativa
  modified_base (173)..(180): a, c, t, g, unknown or other
gagagagtccagatccagaggagttggcagacaaaaactgatagagaactttcaaacctcttttttttttcattttttttttggttatatatatttctaccactactaccatcactcaactagcctctatattgcagtctcaaactcaaagtcttattattattattattatnnnnnnnnttattattattatttttcaaaatatatatatataaagagtaggttgagatgttcacacatatatgtagtagtgttgaagttaatattcttatttgttagtgttagtgttagtgtgtgtgtttgtgtgggcacaccataataatataatgtaggtctattctattctcccatccacccatccattcatattatcctcttttttcttattctcctcactatcacattcacattcacatatatatacacttttaataattaatgattcaccccaaacaatcaaaactatttcattattatttcttctctttattcttttcttttttatttatttatttttcttaaacaggaggcctcatgatcaagggaaccctttagacctaaacaacttgcctgaagattatttgatcaataataccactagatcagacggtaaacaactcttccatgatggatccaccggtacatttatatatatatatttatagtatatgattagctagggtttagggtttggtcttgtttttgataaatggtttaggtcatatatcatgatatatataataataatattatgtttgtttgttgttgttgttgttattgttataataaataataataataaaataggttataataataatagtaatagaaagaaaaaaagcggcggaaatgggaataaggaaggaaaagaggagttggggaaggtgtatgagtgtaggttttgttctcttaagttctgcaaatctcaggcacttggtggacacatgaatcgccaccgtcaaggttattatttatttatttatttatttatttaaatctttaatctcaaatctcaacaacaacaactaaactaattatgttttgaatttggtcagaaagagagacagaaacactgaatcgagctcgtcagttggtcttcagtaacgatacactagccgcccaaactcacctcaggtacaatacaacttctaatttattattattattattattattattatttaatttcatcaccaacatatatataacattcctacttatctattaattattaattattaattatttcaactatatgtatatatcatcacaaatacaaaaaaaaaaaaaacacacacttgttttgtatatttattatttattttattttatttatgattaaactatatatgttctttttaattaattaactatatatcacaaaacatagaaaaaaaattaatacacttggttttttttatgttagtattacctatcatttaattctaaaatggtcatttgttcaaaaaaaaaaaaaaacaaaaattactaattataataactataattaatgtttaaaaacaaaaaaacaaaaattactaattatatattgtcggatttaactatatttttattaataatgcatgagatatacttaaatttaaaaacaaaaaaataatatatataatatatataattttaaatagactacattatttttaatatatatgattgaaactcagatataattttaacttttacatattatcttgtgtaaaaattgcgtataataatttaagagtaattaatcacaaaacatatatgatatcaattaataaaaaaaaaacaaagagtttgatcatacaaaatatatatttgttgacaatttcctttttttttttaataattttaaagctgttgtcatccaatgacaccggccggagcaggttaccatcatccaacaaccaacatgggagtggtagcagacacgtcaccactcccaatgagatttccaacaagaatgttttccggttcgtcatcatcaaattttccaccaccaccaccgccaccacaaccgccacaaccttctcaatccccttatactctatacaacaactcatcaacaccatcatcatccaaccgtccaatcccatactcatcatcacactttccaccaccaccacatgattactatgttggccatgtactcacctcaaacaccaactctccatcacaatattgtcatcctaacctaacctatccatcctctgatcaatcaaactacacttgtatcggtgccccggtagggtttggaacatcaggctcgggcggtggtggaggtagcggccgaggaggatccaccgagttagcggagtcaggaggaattaatagaggaggttgatcattacaatagttgatcatgactatcttaatcaaaaatattattattaatagtataaagtttggatttttaatttaaagactacatttttatttatttttttgaagtgattattattatctctatattgacacgccacccacttctgagagattagagagagacttaacaagctgacaaatggggtcatatatattttgatatatttttgttgttggtttggttaattggtatttttttttttttttaaattttaatttttttttattattattttttttatggatgtgtacagggattgggaacagcttttgatctcaatgacagggtcagctagtttggctgggagctgtggggtggtggggattaatgggagttcagaatggtgttttttgtgttggtttctagtttgtgtagtactactacttctactactactactaacactactactactatctattactatacacctactgtgtcacaatgaaagctacttctactactactaataataatataagtatataaatatatgaggtttaatttgtgtgggacaaaccaagttacatatcaactgaaagttctcaaccccctttttgcatttcaacttcattttgcatgcccaataatcactttctatcctatatctatatctatggtgaaaatctttttctttttgtctttatctttgtttgtaattggcacatatatagatgagaaatggggcatcttattatgggtaaaaaatactactagaagtgacatagcgctattggtacaataatatcgatcgtttttgtatacgctatcaatataatagagaaatactaaaaattacttatatattcccaatgtaacataccttattaatataatttaatatcgaatcatatttattttactataataaaaattattaaaaactattaactaagcatcttaatagtaatattctaataaataaaataaaaaactgttaattactcttgacgcgtcatcggtacagaagtaacaaattaaagtatatatataatctttttttttttttttgaataagtatatatataatcttaatttgacctaaaaataaaacaaggttaaagaattaagataaaattataataattagatgattgttatctgtgaatttcatttttcgaccgaaacagctgagaaattgaatatcttaagtatacttcataaaaaagatatatttttgtaattagtacatgttttcttaaacttattataaggactaaattttgattatgatttttattttacgaataactatataatatatgtttctattgaatgaaaaatagatccaaaccctaaaacaacatgtaatcaaatgatgaaattatacttcaatttcattttcatcagtttttcttggatcatttttatatagtcatgagaacaaatagtatgactatgaagaaatgttaattaaagagaccaatattaattagcttttgttgaagtgtcataatcacatgcattaattaaaacaaactatgcatgacatatatattgtgtgcttgttatagttaatcattacatataattaaaagcattaattaatggtcactacttactaattactatagaggccaatgttggaactaattgagttgtcttcttcagtagtagtagtacgtacgtacaataatatcatatcatatcatttatatatttatatatatatatatatattggtagtgatattggggaatctacatttttggaagtaaatatttttcgtctttttcactgttcttttctttaaaatatgacgtaca

SEQ ID NO: 19393 - DNA, 2152 bp, Cannabis sativa
tattgacttgtattaatagattgtgtaaagacgttataatatattttcaatacactcgaccccaacaccaactacgggtttggatccaagttcgggttcgggttctgggtcccaagttcgggtcggggtcttgggcacgggtcgcaggtctcgggtctagggtccaagtccgggttcagatttgggttttggtctgggtcccgagtccgagttgggtttgggtctcgcgttcgggtttgggtctagatctcgggtctcgtgttcaggtctcgggtctgggcctatgtccaggttcgggtcccgcaatttaggttcgggttcaggtcccaggttctgggttcagattcgggtctgggtcaggggtccaagtctggggtttggctcctggtttgggttcgggtctcaagttcaagtccgggtctggatccgggtcccgagtttgggtaccgggtcccgaatttgggttcaagtttgggtcccaagttgggtctatgtcagagattggtgttgacttgaattctttgtaaatattataatataagctaatacgaaccatttgttatgtattaaatattacaacattcagtattaaaaattttggtcgtaataactaatacaatacattactttatctaaatataatattatttattatttaatacaatacgacttcgcgtaacgaactaactcaaaaagtgcataatattattcagtattaaatatttttttgaaagaggtaaaaatcaaacatttgttgaaggccaaaacgacagctttaagtttaagtgccacgtcgtggtaatcgattgaaaggccaaaaccctttgtttgggttttaagaacccttttcagtacgacacacaccacaaaattcccaatttcagagctcggaaatctaattcgaaccccttagggttccaccattactaaaattatggaaggaaaatcgtaccagaggtttcccaaggtcaagatccgagaaatgaaggacgattacctcaagttcgagctccgagacaccgacgccagcatggccaacgcactccgtcgcataatgatcgccgaggtgcccaccattgctattgacctcgtagagattgaggtcaactcttccgttctcaacgacgagttcattgcccaccgtcttggcctcatcccactcaccagtgaccgcgccatgtccatgcgcttctcacgtgattgcgacgcctgtgatggtgatggccagtgtgagttttgctctgtcgagtttactcttcgctgcaggtgcattgaagatcgaaccctagatgttaccagtaaggacctcgtcacccctgaccacaccgttgtcccagttgacttctctgactcagctggtaacgaatccaacgagaataggtattcttctgctttctctcttttttccaatatgtttgagtgtacatagatgtatattctattaatagttgccctaaatatttggactttacagtttgaatgctcttccttttttcttccatttcaaattttgtgtgattaaaattctgtgcatttcaatattattattgtctataaaaactaaatacagaaaatgtgaagatgggtgacttcattttcaaatgtattttctggaaaacatttcgatttacatttgttacgatgtaactattcttatattttcaattggatattttgtggttgaaggggggttatcattgtaaagttacgtcgtggacaagaactgaggctaagagccatagccagaaaagggatcggcaaagatcatgcaaagtggtcgcctgcggcaactgttagttttatgtatgaaccagacattagaatcaatgaggagctgatggaaactttaacgctggaggagaaaagaagttgggttgaaagtagccccaccagagtgtttgagcttgatcccgaaacccatcaggttccctgcttgtatcttttgtcattgttctctatttttatagttatctgtatactgtagtaattggattttaaaatgttttgttgtggcaatgtcaaaattcattactgtttttctaatgaagtggttcccttgtagaagttctgttagagaggcttttgtgtgaaatattaattgtcttttggtttttgtaaccatatgcctactgctatacttaattagttgtat

SEQ ID NO: 19394 - DNA, 1851 bp, Cannabis sativa
  modified_base (44)..(57): a, c, t, g, unknown or other
ttatttctgatctttattcataagtaaatctgattatatgaaannnnnnnnnnnnnnggcataaaacccaacagcttctagaccaggtggtgggtagcgtgagtgatctaacttcgaagaagtgggcgattttcagcagtagtgatctgacttcatctttattgttgtgcactgttatcttatgttgttgtgttatgccagatgagcttggttgcagaaatgacttccaaggaagtgggggccttaatcatagagcttggtcatgttaaagctaagaaccagtctctgcacactgataataaagccttacttgtcgtgcttgaaaaaactaagtctaaggttactgttgaggtaaacaatgtcaaggcaaaggtagaggattgggtaaataaggtcaaggctgagtgcaaggtctgaggttgattgtgttgataaagcagacagcgacaagtacctcaaaatgtacaatgaatacaaggccaaggctgattggaccataaggaggagctaaacacgcttaaatccaaagtaacctctcttgctggtgagcttcaacaaatgaaagaggagaaagacaaaatggatgctcgcttgatgattcaaaacactgcgctgaatgccaacctcgaagaggtcaacactttgtaaggcgagatttatgagaaagagcaggtgattcaaggcgtggttggcaacgttgcggatctgaagaaggagagggattcactgaaatccaagcttgaaacccataacttaatcttgcacagtgtctgtgtgactagtaacgcacgttttgacaccataataaagttacggaaggaagctactcaccaaccaactaatggtagaaaagcctttatctccatggcagccatgtagagggtcagagagactgttgaacaatccacagggacactagtgcacacattgccaaaatagaggctaaagctgagaggttctgtctttgctcactggagatatcctactcgatgcttcttcacaccctatggaaaaaagatcctaccatactcagacatcttggaccaaacgaggcacaatctacccagagggtgcacgcccttgaggacaacacttatcttgaaaaatacgaccttcatggtgatagtgatgaatctgtcgaagagttagctggagacctagaacctgagcattcaaccaaagttgtggtttctttggggaatgatgtttaggacctctgggaactcccctaggataaacctgaagaccttttagctccagcccaagactttcctcgagatgcacctccaaccccaactcaagaccaaatctaagataattctttagcccaagcacaagaccaatccaggactaggcgaaggagtagttttatctttaagcttttctttttattaccttttttgcggagactctttaattatgccttaaccgcgaggttttatgcaataacttagaaacaactttcttttgtttatgtatattttttttttgtttattatgcttgaattgctagtcttatgctttatattacttgctaggccattaggtagattgccttaggacttttagagctttttggttccaatggccaaagcttgatacctttagacttttatctttgaaagtgtttgttaaatcttggaagtgtacaaattgcaacttccccttgttagatgtcaaccttgtcaaagttccctttgtggcacttgtaaactttgcgagttaatcttagatggagggactgtcagcttattctcagatcgctaaaggagtcgcggagcttaactcccttccatgtgttacctgattagctgccttaagtagaacactatgttggaatatattttacca

SEQ ID NO: 19395 - DNA, 2870 bp, Cannabis sativa
agtgttaatgtttgcgtgtaatatgttcaatccaatatcttatattaaacgtttgcaatttcattgttttttttttttccgttcattagatggatacgttactagatacataataatcttttctaataatttactataattgtatcgtttaagcaatgattgtaatatatttttttataactgcaatgattgtaatattataacataataattatcagtttgatatactttttaattgtacgatttctcgtatgatcagcaatcgagcgatatatatatatatttatatatttgaacacatcgagtgttatatatgtacgttatttatttttttccaaatcagatattttatgtcatagttgtccaatcaaaactgtagtttaattgatagaatttatcatggagcatctattaggcaggtggtgttttgcaaatgtttaaccgtttttctaataataattattatgttaattgttaaatataaggtgtcattttaaataatcaatatttctattcaaatattttagtttgcaattactctaaataagtcaaatctttattcaaatatattcatgatatctattctatataaaatattacataaaatatcctatatgtaatgaaattcttaatttaattgtgtttttttaattttttacattactttcaatagaatattccaattaattaacaaattatttttttattaatttaataatattattatatatatatttaaaattaaaaaaaaattatgtaaatatattttatataaaaaaaattattttattatatatattaaaaaataaaaatcacatctatgtataataacttttatataaaaaagatatatatttaataatttatacattttattataatcactctcctaactacaaatttagaatatatttatcactatcattatttttttaaatatatgtttgaacgtaaaatataaaatatattttaaaagtaattaattctctaatcaaactcaaattttttcaaattttttcgaatataatcattatatatagaaatatcaatacaaaatacgtataacaataaaattcattcttttcttttattgtacataaaaaatatatatataattacatctaaagagcacatcaattaaccgcaatagttaagaaaaattctcaaagattaaaaatctcaaaccctatttcaaaaattaaaaaataaaaatacattacctaattaaaaaaaaattgaacatatatgtattgcactcatagcggacccaaaggctgtgtaaaccagaacaattgcaaagggctcgaataataaagggcccactgaatttttgcttttttttttttagaaaaatatgtatttcttcttatattatcttttaaaattttctctaacccactttcctgatcaatccccaaattaaaaaaaaactaattatacgtgtattgcacgtaacattaacctagtctatttaaatatgttcataaaggagcaacgacaaaaatagaatctattgacactaccgaagaaacactactaaaaatatggtatatatcttcaattttgtatgatacaaatataatatccgaatacaaaagtaaggagaaaaagaacaaaaaatcacagacctatatcttcaattattttaaaataagtgaaaacataattatgaatacctttatcttctattattttgaaataaccaaaaacataggtctccgctacccctaaggtctatgtcttcggtaattttaaaattaaccaaaaacataagtctccactaccctagccccatatcagatacacgtggaggcctatgtcttagattattttaaaataaccgaagacataggtctatgaaatcttaatttcaaatctgagactcctatttcttctttcttctccatcttttctctcaacgaaaaaatactgccaccatctctcttaaggctatattttctctatacataataattttcacccatctttcttttaaatcttctagttttatctctcatatcacatatacactataaaaattaatttaatataagatatgagagtgtatgtgagagtttaagctgacagttgtttagagtttttggagaacagtggttggctaatggcgacaattttaaggattttgacgttatcttttagcttgcattgaagtatacatcactttaatatatgccttttagctttcattgcattttttatgtgtatgatgtagggtttagatattgtggtggtggtcgggaaatccatgaagattgttggaaaatcaatggtggtaacagaattcttagtttaacggagttttttttttttagttttctacgttaactttaacagaatatcctaattacttaacaaaatgttatttattaattctataatattattatatatatgttatccgtatttttgcgagcgtgacacatggattttgattaaggaaggctaaaatgtagttagttgcccaacttcgtcaatggatacactctgggaagataaagacacccaacttccggggaaggctctccgtgaaggggagttccccgactgctggccacatgaagggtattcatgagctaaaatctccctccgttccaagaaccaaagacatccactactgtggatacgcattttcccaaaaaggccaaagcactttgagggtgcgtcagtctagggtacgcctttggcctgcggaggctctgcccatgcgtgtcaggctacagacctagtggtcaggctttctcttgcacgatgtcagcagttgtctcccgtgacatgctatcatacaaagcatgcgtgtccttctttattgggctaaatgatccaacggctagggataagggaaattcaaa

SEQ ID NO: 19396 - DNA, 3995 bp, Cannabis sativa
tttaatgagaagagaatttaaattactctggatcttggaaaacattgacactagacaagcgggatggacctgcttcttcgatcttttcgagcagctttgccactcctgcatctgcaaccttggcaatgaaattctcatcaacaagaacattggctgtcttgaagtttttatgcaccattggaggctttaggctatgcaagtggcataaacctgcatttgtttaggaagaaaaaacacactttccttttctaatcaaattgtttgttatttctaattgaagtcaagaacattcaattaagcttctgaggttatctacctttagctgcccctagagcaatggatagtctttgcttaaattctaatctagttggtggatcttttccagtatctgaaaaaagaaaacaatcaattcaaataggtaactatgaacacaagctaggagaaagaaaagattcataccatacaagtgattacaaacactgccatttggtaagtattcaaaaaccaacatctgggatccacgttcttggcaataaccaagtggagtaactaaatttcggtgacgaatctctgataaggaagctgcctgttggacatgtaaaccaacatctgttgttatatgcttgtcacaagtgatgacagaccatactttcatgtcattttaaagagggaagatttgatctgtgtacaaaacataagtgggataatttgtgggaaattcttgtctatacctcgacagcgaattcttgtctatgcgaaccagcacgctttttgatagccacaacagaaccatcatggagaaaacctttatacacagtgccaaaacttccataaccaatgagattactttcattgaagtgttttgtagcttgttccatctcctccattgtgaactgccttgctccaaccggtccaaatggagatagattctccacacctgatgagctctctccccttctattccattccactgtggtgtttgtgaagattattaatcaatgactttaccaaagaaagaaagaaaaaaaaaaacaatgtgaattgaattagctcttggaaagtcttgtagaagaataacaactcacctagtgcagatggatctgatgaacctgtgtctgaactcttgtttgtatacttttgccattgaaatttgcagaaccaaacaagtcctatgaccactaaaatgaatgctattgcacctgcagcacctccaattatggttgttgtagtttgctttgacatgtctcaaaactcctcttcaagtctttgacaataataaaaacaaacattgaacctctgatgtaagaagaaactggctttgagtagtgatcattgatcaacccaattaacttaaaacaagctaagaaaagtgatgagcatccatctctggtgccaaaactacataaacaaaaatccaagactatgacaagattttgacatctatagaggggaatttaacatctaattcatcctcttctggtttgaaatggttttggaaatactctgaaaaagtgctcataaatgcagatttgttgatctcaagaatctactttaggagagttgtataaaccaatagataaacacaatgccacatttgtttgttttttgtttttttggagataccccactttgctgtccagcattcatgagcatctcaacaagttggcactaagagaatccctcaacactgaatgaaattctatttactggtttgaaacacaataagatatgtgtatgtgtgtgtgtaaatacataaaacttaagggtggtctagatttggcattgcttagtaaaagaaaggaaagtgtcctatgaagttgtcctctgtgctcaaaagaaaagaaagagaaataacatacaaaaagatgattaactttaattaaaaagaaaaaaaaaatctttggttaaagatgaataagatgattaagtttatgttatcagttgtaatttagttagttacttacaagaatgtaagtaatatatgtatatgagtatatgttttagtaataggtacgtgccatatgaacagaagaggtgagaaagtgactttaatcaggttgggattgctgacaccagaagacataattattgaaatggatcaaaagaaaaaggtagtaatacatatatatatgtattccaagtctcttacctgattcactatctcttcctttttgcctcttttttgtcatctgatctggaaagaagaagaggagagttgcttcctgttctttttgtgtgtgtgtacagaaaaaaaatgaggactattcctcaaatggggtcatgacagctgagcaaaaacaagacattacctcagctagtttaactcctcttctcttcaatctattggttttatcatcttaaaatcaatatatatatatttctcttttgacaaacttctttttttgccttcaattcttctgtgtttgtacctgttgagatattcatatctctctgtattataattctatatttattgaactatggtggggaagattattgagctgtaatattgtatctctttctctgtctctctctctctctctcatatttatttattttgttttggctagtgattttgtaggcttgtaagtttggctggaaagcagaagggcattggtggaaaggagatttgtcatgttgtggtggacacttgattatatatacacaacaggcccatatcagaaaagccattccatgaagaaattaatatacagattagtattatagtatatactatcacaaagaagagttttttaagtttaaagatgctttctttctttctttctttttattattattatgactaattcatttggttttaccttgagaaaaatgtgtgaaaaaaacacacaaaaaaaaaaaaacagtaaaaagaaagaaagtctatgaggaatctcaaagattagatacatacatatactatacattatacatagattgatcaactacccacttttatgttaaagattgcccaaaatcaagaatcaatacattggcattttactggcttttatgtctgttttggtgtaaattgatgagatctaatgttagagataggggggaccataataagactactcttttggccattttttggcttcttgatcttggacccctttgcctttggttgtcatagatattattaatttcattttttttttctcttttgtagacttatatgaatcaaaaaccacttttaaggtttcataatacagttgttttgatgcttttcttttcattattatttttcttttaacaaaattatgtaaagtaggtaagtgggtttacatgttcatgtatagtttgtacattattttcatgagttcttattctgagtcatcatcatcatcataaagctaataattactcattaactatctaactcctctctctctctcaattgagtgtttcttcagttttggcatacattaactaataataattaaagtcttttaacacatttataaatctcaaaatgaaaatacacccactttgtcaaaacttgagttgacaaacttagtatccacaaattgactagatcttttcctataaacgctcctttcaatacaactcatcatgtcaggcatctttttccattttcattgctgtaaccctgcaattttctcagcactagcattgctacatatctatatatgtatagctacatacttgttaaaaaaaaatcacccaattactaacagaagatctatgaataatgttttgaacatttactatctaacttgtgttctaaattttaataatttggtaggaaaaaagaagggggtcctagagatataaagtatttactagtcctatactatagtggctttaagattttacccatgtaggattagacctttctttatcaagttgcattttactttatgtcctttctttgtattaaatttttagaataatagcaagaaaataaaaaaggaaatttgtctcctactgcatgtttattcagtcactatttcatctcattgattttaaaa

SEQ ID NO: 19397 - DNA, 5125 bp, Cannabis sativa
  modified_base (3798)..(3798): a, c, t, g, unknown or other
tacatttatgaaaaaagcccttgataaaaacaattatttggtgaagtattagaggtttagccacaatttattcataagtaaaaaaaaaatcacatagcacaatatgtggcttatccaaacaggcctttagaaatgaccaaaaaaaacactcttacactacatggataacagaaacagaagaggctatttcttattatttcccagcaaaataacaaggatatttccatttccttattgtagctgttgaaccgctaaaacctcagaaaagtctcaaactttcatcgttttgctcatctgggtccgatcaattttcaacatcttaatctcatgaaccattcatttatttttttctgatggctctagtagcacccactcgtcaattctacccagccactttcttcgactcattccaaagctccttctccaagttccatgccactcaaattcgtttcttcaggtacggttcttcaataacactgacaaaacaccatatctatgctacccaatacattgtaaaatctagctcagccccagaagaaaacccaggtagaaaatccacttttgtgagtaggaaccagactgatactcggtataaacctgataaaaacttatcttctagtaattggattgataaatggagcaaacatgaccaacacaatcctccaaaacagcctagggccgtattggattatcgggatagtgagactggaaatcagccgagttcaggtttaattaaaagagctagtagtaatggtggtaatgatggtgggggtggtagtacaatggagaagattgtggagaaattgaagaaatttgggtacatggatgctgggagtgagaataaggaagagaaaatagacagagtgattgagaaagggtctgtagaggatatattttatgttgaggaaggaatgttgccaaattcaagaggtgggttttcagagaattccccatttggaatagaaaagcaggtgtttggaggtgatggtgagggtgaggtgaggtttccttgggagaaacctaaggggaaagatggccaagaaggcagtttgatgaggagaagaaaccataggacttcacttgcacaacttactcttcctgaatccgagttgaggaggttaaggaatttgacattcgagaagaaacacaagactaggattggaggaaccggcgtaactcaagcggttgtggacatgattcatgagagatggaagacatcagagattgtgagattgaaaattgaaggaccacctgcacttaatatgaagagaatgcatgagatattagaggtttgcttgcttcttttgaatttaagcttacaagtttatgcataaatattccttatctttgtcttctaacaatggccattaccaatagctgttctcttttttgctgttgttttctattattattaattttattaactaagttttctgcatttgatactatgctcagcgaaaaactggtggattagtggtctggagatctggtacatctcttgctttatatagaggtgtgagctacgaggttcctttattgcaactaaagaaaaggacatataataatactgaaacatcttctacaaaaagtcttagtgataaatctacccgaaatctagccaaacttgcttcaggtattactgtagatacatccatagagaaacttgtatcggatagaaatgtggatacatccatagaaaaagttgattcagaaagtaatgtggatacatccaatgagaattcacaatcaacttccgagcagaagatagatacaaaaaagttttcagaagttaggtatgaagatgaaatagaaagagttttggatagcctgggtcctagatatacagattggactggagatggtccattacctgtggatgcagatatgctcccaggaatggttcctaattatgaaccaccctatcgaatacttccttatggggtacgacgttctcttggtctaaacgaggcgacatctttaagaaggcttgctagggttcttccacctcattttgctttaggtatgcattttgtttagttactaaactcattaatgttcatgaatttacttatttcattcgtaacaaaatctctttgtaggtagaggcaggcagctccaaggtttagctatggccatggtcaaactatgggaaacaagttctattgcaaagattgcactcaaacgtggtgtacaactgactactagtgagagaatggctgaagaactcaaggtaatataagctgcacaaattttgtgacagctacttttctgttgagatgcaccatgaagcacaatagtgtttttagcttcaaactagaattaaaagtagtgtgtttagtttcttaacatgcagcaagttattggatacagacaatgaccatctttattcaagcagttcttgcatgatgtgtgtttcttaagtggcagtgatatatacattttggtagtgttaacttagtcattattatattatcacagttctgttccataatgacaaaatgatggctattgtatacaggcattaacagggggcatgcttctatcccgaaacaaggacttcttggtcttctacagagggaaaaactttttgactaaggaagtcactgaaaccttactggaaagggagagattggcaaagtccatgcaagatgaggaggagcaagctcgtttgagagcctcagccataatcacaccacaatttgtaatagccgaacaatctgggactgctggtactcttggagaaacattagatgcagatgctaaatggggtaagacattggataataatcacaaggagaaagtgatgcgaaaggcagcaattatgaggcatgctactttggttagaaagctcgaaaagaagcttgcttatgtaagttccttgaagtttatattagactatttctaattgacctattaagactaatatgagaatacattcaaagacatcacattattttggtgtgatttttttttcgccttcggttctcatttttctccttcattgatatcatcataatttaaaaattcatatctttctatttatgcacagaaatccagtttaggggccaggagctaatattgtgatgtctgctagaaagttttattgaattgtgtattttcttccaggctgaaagaaaagtaatgaaagctgagcgagcgttgtctaaggtagaggagtttttgaaaccatcaaatcagcaggcagatccagatagcataactgatgaggagaggttcatgtttcgtaagcttggattgaggatgaaagcatttttacttcttggtaagaacagtcccatcagcttctctactctatcttttaaaataccttatcaaaatcctacttttttctattttatctcacacattaacgttactcatacattagtttcatgagctattatttggagctactttggctcatctgatgcatgcatcttcttaaacctttttcatatctttagctatacttttagcttattctatattttagcttgcctattgcaacaatagcggtaaacacaaaatttaagtgatgtttggttggaaggaatgaaaacatagaaataggaacgagaataagaataataatgaaatggaatcaaatttttaaaatgtataaaaaaaattattaacttttttctaattggtttttcctttcatttcaaaatggaaaactcattttactaaaatgatggaaagtctctctattggaatgacattccaatactttacaatgctatcaaacaaagaaatgaaataaaaattgtttcgtttccattccatttcattacctcnaaccaaacgccaccttagtgtaatgatatgtgcttccaaaatatgcacccaaacattacaaacagtagcacgtcattgtcatttttttatataacattgagttccatgattctatcttagataaatgtgatttgtcaaaataactatcagtccatgtagataatgtttgagtgcaaattttaagtgtatatatcattattctagattctatataatattttcttttgcactacaaatcatgtgagattgatttcttattccaggtaggcgtggagtttttgatggtactgtggagaacatgcatttgcattggaagtacagggagttggttaagatagtggtcaatgctagaagttttgaacaagttaaaaaagttgcattatcacttgaagctgagagtggaggtgtcttggtttcagtagacagaatcaacaaaaagaaatttgctataattgtattccgaggaaaggactatcaacgcccttccttgttaaggccaaagaatcttttaacgaagaggaaggctttggcacgttcaattgagattcagcgacaagaggtatctccaaaagttcttacataaataatattcaaatgctcatatggtggtttgattgtgaaaacaaagttccccaactcatatttctcatgttgaacaggctcttctgaaacatatatcggcaatgcagaatacagctgacagactcaagtctgaacttgtatgtatctttttcatttcacctagcgttactacaagatgagcttttccaaaattgcagaaggagctagctgtagctcccatacgacgattaggtaatcttaatccatctctttatcatggttggcaggaacaaatggacaagatcaaggatcagggagatgaagcattgtatgatgaattagattctgcttattctacagatgaggaagatgaggatgcagaggtcttgtgtttattttgaaggtgttcctttttgcttgtttacttgatgatccaaaaaaaattgaacccttgtttgttctatttcctaggaagaaggagatgaggcttatctcaaagcatttggaagtgaaaatgttgatgaagaagacacaagtgaggatgacaacgatgaacaatcagaggtctgccttgagcttgatcttctcttttttcgtcttttgtaccaaaccattgcctcatctgattctttataattctattttttaggaagaagaagacaccgaggcttatctcaagtcatttggaagtgaatatagtgatgaagaggcagacgaaatcaacgactttcgcaatgtttgagccatgtccaagatgaggaatagc

SEQ ID NO: 19398 - DNA, 2555 bp, Cannabis sativa
tgtgaattattctatgatcaactgtgagtaaatattactattactatcattattgtaattgaaaaaatgaagtcaagatactagaagaacagtgaatatggcagctcaagtggagaactattcagaagtaaagagagaacattttcttgaaacagcccaggtgatgaataaattattgacttgggtgatgaaggaaacatgtttgggaagaataatgtgaatgtaaaggagttggtctattattcactattgatgtaagtagtgggagccatttaatcattgaagctttagtgttgcaattcaatgttaaaggctcttcaaattttgtatgtttcagcaatatatttttgtaaattctgtgtcttctgttattattattattattattattatttttgcacattatccaactgcactttatatcgtacatactcatacaaacttattttactactcatgtttacttgacctatgatgcaccgaacttattttctattttaatttttatgttctctattgcactttaattagttaatgtttgatatatgttgtttttatcatacaagaccgaaaaaagaaaaggtgaatttttatttttacggtaaaaatttgtataaatacgaccttttttttttcttttcataaaaagtaaaatatagaaaaaatgtataacaattttttttttaaaggactcaagttcaaaatgtaaaacataattggataccctaaactgttcctcacatattttttttaattattttttaaaaaaatttaataaaataatcctgccacacatgttattttggtcacgagtgactaggtgagtaacaatgttgggatttgttttatcatagcacaatgcgagtatggatgtactactcatgagtgcttacaaacatgactcgacaagaattgttcgagagacagaaatgtgcacaaggtacacggttgcgcaaaaaataagtatattattattcagatggttcgaaggttgacttagtttggagaagtcaaggtgccacataggtgttccgtagcctgaaaaagtgatcctgtgacaactggtatctttttgatttttttagaaatattgtataaaaatttatgaactgtgtaatttttacaaaataaaataatgattagatttcttctgacaattttttttttctacacattttagggatgtagtgttgtattttagagtactcattttctattctatcattattaaagtaaaataatgtatatgtgtacctgcttaataccctttttaataggggtgttcatctaattcaatttacactattttgctcatagtgcatccgattcgcactaagtgcggacttcagtttttggatccaatccaatccgcacaataactcaaatccaatctaatccgcaaaagtgtaaattggatcggttattttgttttaaattgtatgtagaaaaaaatgtatatataagaatgaatctggttcttatactgtgaagtcgggttaccatttggctgaaaatcttgataagataaatgacacctctgcctcgacatctaaccgcaactggtggaatcgcctttgggctctaaagctaccgaaaaaagtcaaactatttgcttggagagtgattaatgatgctttgcctactgctgttaatcttatgcataggaaaattcttcaatctgcagcttgttctttgtgtcattgccagagagaatctttgggtcatgcccttttcttgtgtactagagcaaacaggtttggtccatagctaatcttaacaccgctattccaaatctataccatttgaatgggtttgagattttctcttcaatggctgctgtccacacgaactctgagctagagagaattctttgtcttatgtggagtgtttggaccgaaagaaacaaggagatccatggaacaaaaccgaaacctgcttctattgtttgttcttttgcagacaattatgttaaccaatacataaactccactctgcagccccatttatttgactcaaatgtcacctatcaacctgctggtacatataaaggacatactaatcacataggtctgattaaatggactcctcctcctgctggtttttttaaaatgaatgtggacgctgcttttgatgcggttggttctatcgttggcgtgggagcagtggttcgagattactttggtgatgtcgttggtgctttttccaagcccttgctaggcagctactcaccgaaagaaatggaagctatggggattattcacagtctgcattggattattagcaacagattgcatattgactatattgagactgattcactcattgttgcaaatgccatcaacaaaggatcttatgtaggccaagtttctcttttttatgaccttattgatgacatttctcttttattatcctcttttcctagggtttcaatttcgcatgttaagcctgatgctaataaagcagcacacgacttagcgagattcactcttcgattggataatatttgttcttggttggggaaaattccttttccaatccactctgttattgttatg

SEQ ID NO: 19399 - DNA, 4826 bp, Cannabis sativa
  modified_base (1151)..(1157): a, c, t, g, unknown or other
tcatatatatatatatatatccaaactttagcttaaacgatttggacgaacatatatatcatcaattataatggagagagagaaagagacggactcatcaaagccacttatatagtatttataccatccatatatacacaataccaataacttgctttaaaaataaattgaaatttcatcataaaaatctaacaaatgcttctagaatgttgggaccaatttgatgactcatcacatctatttctagaccttagcaactaatttaaatatatatatttaaaaataagatgtctttttctaattattttatatttagtgaaactccatcaactcaagccaaaagtcggtgtgattggtacataaatatatccctatagatatatatgcttttaatatggtttatggtttaattaattgcttctagccaattgttaaactcttttcttctttcttcttagtggtttcttttcttgttccctggtcatttgaaacccaacttaaattaaggactaagatgattaagaagagaaagaaaaatggattatatataataattatattaattataataagataccaaagaagtgttataataataataataaacaacatcatacatgaatgaacaatttgtggatatgttttaattgatgaatatatatttcaaaaaggggtgtccaaatttagaatactttgtatgtgtatgggcacatgacccacactatactatacatactattcatgattcacatatagtttggctttcccatatataataatattctttctaaaaagaataaaaattcctctctcgagccacgccggtggtcccacacacaaggtttaaacagctaattcatttttttttaatatatatatatatatatttttcttttttactttttaggctttttggtacaataattgtttttagtactaaggtttacataaatttttataaatcactcaaattaaataatttctccaaaccaaattaaataatttgacaaaaaatacaaattaaaaaacttgatgaaaatataataaagattagacaagttaaaaataatatcaatctgtacaactaacctgaactaacccgaccaatccaattaagatgatatttttattatatatatttatatatcatnnnnnnnatatgactatttaaaaaatataaaattaaaattaatatattttattagtggttgatttaaattttaaattcagtctatatatttactttattatcataattaattaaaatataacaattgtaaaaataaaaaaaaattgtgatacacgcgaacaaaccgactaattttattgagcgagttactatttttttttcttaattaggttggttgcacttagatttttgtaactcaatttttatattaagttgaataaatgtaccataatctgacaaaatcgaccgacgtaccaacctaaatccaataatataattgtttttaaaagcttcttgttattttgtagatcgaatagaggtctatttctacatagttacaatcttgtattttgtaaattaattaaatttcaatatgtatattttttaataattatattaaaaaaattaaaataagtgtgttctattctacattatttatgcataatgatttagaagatttatattatattagtagtcatataattgaattttaataattgagtaaatatattatttaatgtgattaaatttatataaaaagaatacatatttaattataattttttttaataattaatatatacttagtgataaaaatagatcatacatattttaatttaacaaataattttaaaaaattattaattaattagagctaaaaaagaaggaaaacttgaaaagcagttacgtcaataaagccaaaaaaagtaaaaagcaacacgccgtttcaaacaggtttagttaaataataaattaattaaataatgattaaatctgaatagggtaatattgtgtgcaatactaaagcttctagaaggttgaattgaatgaagttggatcttatcataacaagcactactagcaagtagtaatgtaatactacaccactctctctccatctctactttttacatttttgtttcgtaatggggtcccctccctaatccctatatatgtttcccaccacaacccaatctcttctcatatatcaaaaattgcttctagaatatcataccctcttctctttccctctctctttttcttttccaggttttctggccaaacttagccctatttagtatttatacacacctttcactcttttcaatttcattcaaatccttaatcaatcatggaaatcattcctgggcttccagatgatatagcccgtgagtgtttgattagagctaaacatcaagattttcccacaatagcttccacatgccgagcttggatggcccagattcaacacccggagtttttccaaacaaggaaggccgtcggattaagccagaatctaatcgttatggctcaagctcgggtccaacccggacgcgaatcgggttctgcatctaagtatttggctactcccacttataggcttacggtttttgaaccggagacgggtctttggtcggagttgaaacctgggttcgggttaaccgaaggtcttcctctgttttgccagctggttcgggtcggatcggatgttgttataatgggcgggtgggatccgaggacttggactgcttctaccgctgtgtatatttacgattttgtccaggctcagtggcgacgtggcactgacatgccaggtgtaccgagatcgttctttggttgcgtggcttctgaatccatggtcttcgttgcgggtggacacgatgatcagaaaaatgcgttgaaatcagcgatggcgtatgacgtggcgaaagatgagtggttgttgatgcctgacatggcaagagagcgtgacgagtgcaaaggagtgttccaccatggcaaagtccacgtcatcggagggtaccgaaccgagatgcaagggcaatttgagagcagtgctgaagtttttgatgtttccacgtggaagtgggacccaatctgcgaagacttcttggaagccagctcatgccccaggacatgtgtctcgggtggtaacaacggactcttgtacatgtgtcgtactggtgaggtggcggcgttagagaacgacacgtggaaagtgattggcagtttgcctaatgagatgcgagaaatcgcttatgtggttacctggcaagataagctactggtgattggctccccgagtttcggtgagccccacattgcttacgtgtttgacacgaagaattacacgtggacaaaaacagctgtgcccgaagaatactcgactcatgttcaatcagggtgttgtttagagctttaaaaaataaaaaaagaaaaaagaaaatggtttttagaatgtaacatgtttttagttgttgacatttgaagtttgtgagttttttttttctttttctttttttatgtgtacatacgaagaattttgttttgaactgaataatagttgttcaattttagctttcaaaaaagcatttaattcaactataaattaatacttctcgatcttgagtacataaaacatttatttgtttctaatttggtaactattactaatgacttttggtggtagtgaataaatacaagtaataagaattaatacaagtaattcaaaaagtcaaaaaagaaaagaaaggcgttcagtgatagtcgttggatgattatggggggaatcaatactatgggccgtccattttgggcccattgtcgttttctcgtggcatgtttcatgttggagctgaaatccctcatcaatgtatgtaagaaaaaacaaaatatgggctcttttttcctcgcgtgtaaggaaaaaagacagaccaagtcaccacaataattaattcatgtgaattatcattttattgctattggccataagtgcttaacttctaaaaacttctaaaaatattgtgttgtattgtgttgaagattagtttgtaatagtttgtaatattttttaaaaattattatattaaatttattaaaagttgttaaaagatattattgatatcatcctcagtgttatattgctattagtgtaattaaatattgacacgttatttatagatagtgctaaataccactagtacctaataataatacttaactactatatagtattcgatacttaattaaaccaataataatattaatacatcaaagagtggtagattcgatgatacttttagtatttctttaaataaaaaacaatatagaaaaaagacaaggccaatggtattcattcctcaatccttaaggcatcatcatcccatttccatagattcaaactattgacatgaaaaacacataaatagaattaaatgttttatagagagataaaaaggaaaagaaaaagataaaggcaataaatgatgatatgaatttaggagatgaggacagcacttactttaccactcaagctaagattgttgtaatttcttgtgacattgtgggtcaccacaaacccacaatttgcaactttttcaaattggtaagaacaccacctcagctcagctggcttaacacttttctcttttatccataacttttgttctttccctttttctcaagctaaacaaatcataattatgattaagttaacaacaccatatatcacggattaacttaagcatctttactagttgttttcaataacttttgttcattttttattattacggttatacccctccatatattttttttttatcagattccataaatttattatttttttttccca

SEQ ID NO: 19400 - DNA, 7241 bp, Cannabis sativa
ataatctggattacattgaaacagagttttatttagggcataaaacccaacatatcagactagatttttcacaataaaagctttagtttagaatacatttccatcttccacagaatcctccaaattttgttaggttcctaaaaacgaaatctttgactcacccagtaagcacacttcacatagaatttacctgagtttgctgctttccaaaaaagcacattcttatcttcctccaacagcctgatacagagaatgctacgttccatctcctcatcgaaacacgcctgaataaggtcaccaaccccgtccttttctccagccaagaataagtctgaaatcttgtaaaaagcgtgaactcggttatacttaaaactctccttaatctcttttatagtcttgtttgggatccaaggtctatcctagagattaatatttccctttcctattaaatacccgcaccatccaaacaaatggggcgcacattcaacaagccttgccagcactaggaattccctacccttttagagacagaccaagcatccaggacatggcaatatttttctgacataatccaaatacaaactttgttatcccccttaatgaacatccagtaaagtttaggaagtaaagccatattcatgtcaaaaaacttccttaaccccaatcctccacagctctttggttgacatatattgctccagctcttgagagcacaatagtgtttcttgtccacgttacctatccactagaaacgtacaacaaccttatctagctcctcacataaagttttgggcaacttggccgtagacatataataattaaggatactttgtaggattgacccaaccaaagtagttctaccagcctgcaataaatatttagctttccaaccctctaaacgagcaataattttttgtttcaggaagttaaaatcatcgtgttttctagcagagaagaaaaaaggattaccaaggtatttttctttagagttaagcgtgttgatactaagaactacctttaaagtctcatcttctttgcatggcatattgggggagaaaaccactctgctttttaccatattaactttttgataagaccaaccctcatattgtctcaataactccatgagactagtggcattacgataagaagcttgacaaaagaacacaacatcatgagtttagaacagatgtgtgataggtagtgcatttcgagagaccggcacacctacaatatctcccttccgttcacccgaagaataagtttggacaacaaagcactgtagagtatgaataaatacggagataagggatcgccttgtgttataccttgcttgggaatgaagggagccaaaggcgcgccattaagtaaaatagaatatgaaacaaatgttacacaattcataatgagcaggcaggcatctctctgaaatccaatagctttcaaaacccataacaaaaagctccattcaaggtgatcataggccttactcatatccattttaactgcattaactccatatttccctttcttgtgtttgaaagagtgtagaacttcttgagccaagatcgaacattttgtgatccaatgtcccggaataaaagacaactgatatggagagactactctatccaaaattcccttgagtcggtccgtcagaattcttgagatgatcttgtaacagaagttgcataggcttatcagtcaaaattgatcaaaggtcgaagcatttgtagtttttgggatcaagcacaaaatgtatgattaatttttctgttaagattcttcagagcaaacaaatcttgtatcatttcgcaaacttggcctccaacgattgcccaatacttcctgtaaaaaatggctgaaaaaactgtctggtccttgcgatttcaaaggatgaaacgcaacgatcacgtctcaaatttcttcacagctaggaatttttcaaatcatttcattttctgcctcaatgatcccttctgtgaacaaatcttcaaaatcatccccggtgacagggcattgagattcgaagacttcactgaattttttcttgaaaaaatctccaatattgtatgatggtgcagccacgaaccatcttcgtcctcaatacttccaataaaattcctttgtctttaaaccattgtggaagcgtggaaaaatctggtgttaccatccccaaaacacaaccaatttctcttggatttttgtttccaaatctgctcaattttttcttctatatcaagtatttcaagctgcacactcgcttcccattccagagcctactgagaaaaggaagaatcctagatagaaaccaattcctccttttgtttccgtaacttatgttcacaaaaaccaaatgaatttttaattccaaattttaagctcttttctatattccctagtttcttagacagaataacatcactactgccattaaatatgttactccaagatctgctcaccaacttttcacaatctgggctagtagtccatgcttctaagaatctaaaaggataaaaagtttatccgtataaccccaaatatttagtaatagaggagagtggtctgatgccaaaattagcaaatttgtgactttggcgttaggaaaggccatataccaggagacgtcagccatggccctatcgagcatcttgcgaatgcgataattgccccttctagagttgtgccatgtacatgtgacaccatgaaaacccaagtcgacacctctagtctcaaataagaagttcctcaaaaaacttccctccatgtccattatagacgtccgaccttccttcttagttttgtccaagattacgtttaaatccctaataacaacccaaggtttgtcacaacccgccactttacttgtaaaccagtttcagaatgctcctcttagttcagcatatggcatgccatacatacaaaacagatgccacttacccactcccctggcaacggggatcaccccatggaagccaatatcaaaagtctcaatcatatgaattacggtcccctgtatccaagctaaacaaaaccccccgccaataccaacaactggtaaccccaccacatttgcaaaacccaggcaattcataatggtactcataacttccattccaaccgtagtctcagaaagaaaagccacatccgcattagactctcgtatcaaaccccagagggttctctctatcacaggcctgcagagcctatgacagttctaagataggcacctcatggggacggtgggggcatgaaagaggctgcctcctcgccattgccaaaattttgctcatatgaaattgggatctcaacacaattagctaacaccacttccaaatcatatgttaaatctttacaatctgcctttgatatctcttcacgccttcgtcctctccttgttttgactcccgacattttctttgtagtagatgccagtttatctttgcctttgatttttcttccctgcccccttttccttgtactctgactagctttgccaacaccaatgtagaaattcagctcagaatttgcgacttccccggcagcaccaatctctgttaccttctcatcattactagggcaagtagggagttgaaaattcgagatagtcggatagggatgataccaagtgtgcattttcctcttacgacttccaagcaagtgtgtaatcatctggtgggtttgagataagtgaagcctaagtcctatagagatcactgtaatctggcccgtaaagcttgaaaaatagtctttgggcctcatcatcattattgggacagcagataggggtaggttcagggtgtagaagtggtcgttgggatcgacatatccaagaatgaggaacttccaatctttgtgcaattgtcggcccaatatcagggatcaaagcatctctaccctccatcgaagtaaaattgggctgaggtagcttcaaaaaagcaggcccagtatccactctaggtctaatagcattcaaactaccctcgtgaattatcacagaagatctattatccatgttagtccccacaccaatcaaattatccacgttccttgcctcaacacctgtgcaattagcattcacatgcacaacattcccatgttcctttatcgtacactgactgtcaaaggattcaagggggacggccacgcctcctcgtactattgacgcttttgaaagctcaccattttactgctagtaccattctcctccatctccgaccgcttagctttatcatcaccgtttaccaacatgtgtcccttccccaacgcacttgtacaccgtttccacatgcccttttatttaaaacacattttaaactcttttaattaatttattcttaagtaaaccctttatttaagataatattactatcatcaagtttttttcgtataataataacagttattatttattttgtgttaggaaaacttttgtcttaattttgttttaagtttgagtttgaattcgaaacctaaaattattatatttatttaactcaaaaataaatttgaaaaaacaaatatccctcaaaactctattattttaagtgtataaaataataaaactattttattatttattattaaataatcaagatagttattatattaaatttgaaatttaaatctgaataaatatctcaaaataataattaaatattaacaataaataattaatagataagttatagtagtatactatatatacactatattatacactacattatatatattatatataatatatacatatatataatagtgaggtttaatcgagctagggctgaccaccaccatggaccgctgtagccgacagcttgacaaccaccatggcctacggtggtcgtggagaccacgagaggggattcgcacgatcacaggtcacaattaacccgagacccaactgggtcttattttctcgaggtagatggggataggaccccgtgataagctcgaagaggagccgtgggtttgggatgaatggagaaaaacttccagggaggtcagtcgactgtctcacagcaaagaccaaagggtcattcgttgttcacgtggattgggtcaagaaggaacatatgagtctatgcatggctgggatgcattcatgtgggcatgatacccgaagccactctggtggttgtccatagctaggaaataattttcgagctaagatgcatgtgaatttgacgtgtatggttgggtttcaagtttagaaactgatctcacatgcaatgagcattacataggtatataatttacatatcaattaattttcataaaattaaaattacagaaaaatttccatatgccctttgatggcttacattattttctaaaaataaaaacaacaaaatttatatccaattataccatataactaataatccatcacctctcatatattcacaataatttaaccatacattcacatatatataacaaatataaatataaaagcataaaacccacacaacatttaatgtatacgcattcatgggactactctgatataaattgttgatttttatggtactaaattagatacgcaacggaaagatttttgtatttataattatcattgtaccatacctcaataaatctctaaatgtgtgtacattaaatcataacataaaatagtaagtttagaatatatacctcttgaagactatcagggtatccttaaaatttctcatatattgtatcccctaattcaaatgatgaggataatacaattagactcacaccagtgacttccaaaaaaatccacgacacaaaaggaatagtaagggctattaggataaagtttataattttgttcttaagttcttaacacatgagcaagaacaatttcttagagaaaaactttttcttttcatctgcctatttcaaaaaatagttatgtcaaaagttctttgttttctcaaagcacgcttctctttatagtagttaaaaactctttaataaaatcaaatataattagttaaataaataaagtatctataaccgaattcggttattaatattgatgagaaaatctcttaactacttgagagaatatctcaactactttgaaatatctttaaccacttttcaaattcaggtatttatctaattgaattaaatatataattaattaaccaaaagaaacaaactccattgggcgtaggtgcctaccttgtcctaattaagacaaagatagtgtcttttatcctcataactgttgtctcacaaaatcttgtcttgaaaaattttgttttaataaaatttctctttttcttatttaattaatttgaaaaattatttatttattataaaaatatataattactatttttccaattgaaaatagatttttttgaacaataatatactactctttatcccaatccttgacagtgtttcaaggtggtgattcagagaccatggacctataattctaagctccaataaactagattatttattgagtctcatcgaccaaataatccttgtttataaattccaaaactactccactaatatatgaaattgcactcttagtaattatagaattatatttattgagttttactacagtgtccattaatataatcaatttcagtgattagtcctccatgtgttggttagtaattagttttggttaaattaccattttacctttctaattatttctttatcctttagtaccattaatttacaagtggaagtacaatttagatctcatctagaattaacacttaaaggaaaccagcattcggtccaataggaaagttaagtttctataattgtaaatcatttttcaagccatccacattattagcttcccaaaacaatagttgtaagaaacatcttctctaagaaactttaatgagtgaatcaaagaaaataataacatgaataggaggtcatgattactcaagatttaggccgatctactattgatcatcatcatgataagaattaggtcattattgtaaacgacatttaagataaagacaacttcattcatatagatccttgtcatatataatctttattatatacaacaccttctctttgacgtcatactacatttgtgagtcgaaccaagattacttacaatgaaaaataggcatcagtgaaccgtactatcaacgattgattaaagacttcacaactgtagtatgttgttgactgttttattcatagctaagtggtcttagttttctgtacagttacaagccacaacctcatatatg

SEQ ID NO: 19401 - DNA, 3958 bp, Cannabis sativa
  modified_base (40)..(42): a, c, t, g, unknown or other
  modified_base (106)..(110): a, c, t, g, unknown or other
gctgcaatcaatgtgaggttttctaaactcttatgtgttnnntttcattgttttagagatattcatatttgggatgttaattcagcatacttgttagtaaatctannnnntggtaaaatattcccaacaatcccctcctcttttgttttggtctccataagaaagatacacttcggtttgtatctccttgcccaagcatgaattgctttggacgtcggggctctcagcgtgccccgacaattccaagataagagcctcattggggaggagggggcttgataaggaccgcctcctcgcccacttgaaaattttgaatctcttggacagcagcatcaactaaatttagttcaaaatcctctgaacacgagtcactaacctgctggcaatctgtgtcaaatcagttttgagccgcacccgtattgttggcctttctccggttagttcctcttgtactcgacgcacctttctgtctcttctccggccatcttttggaggaagaatccccaatatcgctgtcgactttcactgctacaaaagtattgacttcaagagtagggaggaaagactgttttccttgaggcccctcctccgtgttctctccttctgcctcaagatagactacaggaataatacacatacttgcctttctcttcttggggcccgccaacttttgtccactcagtgaaagttttatttcatcactagaaatactcacttgggccccttgagcttcaacttgggctttgtccaaaacattctccaccgcctccatcaaattcactttatcgggccagttaacataattgggctcggggtgttgatgtggagttcgagacttgcacacttcctcatgaggaatttccactaattggtctctggtaggcccaatatcagccatacaactcaaaataatcccatcgtctcttctcctattatcgatacatgttattgaatgggaattcttgttattacccgctagtttcacacactttgtaccatgattttccaaaaggttggaaccataaggtctaggaaagcgtggctttccctagacagtatgacccttccccaattgtgggatcctagccgagctactaccttcaacaccaacgtctttctgagactgtatcttctttttcgacatgtctctatcctcttctgtaattaccttcttgcctctattttctccattgctcgccgacaccgctccccaaaattttctagtctattcaagaattttcaggcgaataattacggataggcacacccaccttcatccacgcaccgtagagaggaacagcaccacaaatcagaggataggcaaactatgttggtctatcacaagactcataagtatgagcaatatatacccacagttaaaacacaatgccgaaagtttatgatacttgaattagatccattcctttctatctctagaaatattatatataattcagtaattaaaatccccttataaaaataggtctacctgttgaagtccggcatgggtccgataccaactaaacaatttgttcttatgatcgtgtgcttggtattgtgacctcttaaatatgggcttggtccagcattatttataaaaacagattaatttgtaaatacgatccagacgggtgatcagtttatccatcatatatcaaaagtagtaaaaaagacatcataaatagaattacttcaagtttaattaattagtattggagctgaaaatatgatcatatatttatatattcgtgatacataattaattaacagtcatattggttaattattttgcttggtcaaacttttcttttttgtagacactattaatctaactttgcatttagagttagacacccacgatccacaatcacccagcgtagggtagcctgcaaaaatatgaatgtaaacataataataaggctcagtgcataattaataatatatattataattaattaattaacaaattaaatatgaactcaccccaacttgagagaggtatcggaagtactatcgtaatcttgaggaggaccattggagctacatacattggtgacagactccgatgactgaccctcctcagtagtgattacatactccgaatcagtattagtagtggttccaccttctctagttcgtccattacaaatctccaccaccttaattaattaatcaatatattatatatgtgtctataataagcaaatcgagtaagatcggccatataaatatatatatatatatacatatacatacttgctgtcttaatctttcattctcttccatcaattgctttccctgcgaaaattaatattaatgccataatgctagaagtatatatataagagttcatatcacatatacgtacaagggcttgattaattggtaaaataatggtgttattaattatgtccatcatgcaccatatattgtttaatataatatttttccattttttttaaatttaaaaataagatagtatgcaaaactttgtaacatagattaatgttacattcaaatactatctttaagtatacttttctttcgattactttcgctacaattgtaatttaaatttcctaatacttgtctctttttttccatatgaacaaaagaactttttagttcttacaaaaaaaaaaaaaaaaaagattaacttgttagttactatgtatatatattaattgagccattattaattctttagcgattcataatagtaacttaattcactaaccttcatttgaagctcattgatttccttcataatcttctcaccctgaaggagaaaaattaataaatactaataagttgcaacaaacaaaaattagctaagttataaggtttttcttttccaatcaattattgaacctgactatttgagacagtagaattagaactttcaatcatatcttacattaagatgttgaacagttctctttgcttgcaattcagaagaattgatggctgctcattttttgaatggaaaatataattcaaatagtataaagagattgccaaaaaattaggatgcaattcagatgaatcaataattcaggcaacattttctttaaaaaaaataaaataaataatttagattatatataatatcctaatatgtacatatatagatatttatttattgaattggttgatcatcttaccttcttttcaatgactcgacttagtccaacttcaagggacttctctaaccgctgcagctcctctatgtttaatccatggagttcttctcctctcaattgcctatataaaatttggaggtgtttatatgtgtctgatcaatcaatatatatatatatatacatatattccattttttaaaaaaaaaaaattgaaggataaaaaaataagaatttatatctacataggtatgtaaattatacacataaacacacctaaggtgatggcttttctcagatatttccttgcacaatttagagtaggtgttgttctccactagctacaatatcaaacatttaattcataattgtgtggggaataaaagacataacaaattattacaatatatatttttaaaaagaaatataaaatcaatgtaaataatttcgtattaattaaatgctgagttgagttatatgctaatatatattgctaatttgctatacatctatctattttattttatattttaaaaattatttttgttacaaaataagaagatgtacagggtagtacgtgcatgtgtgttgctcctacatatatacacacttacatcgatagtatatgtaaattatacatagtattagtatctacagatgatgtagtatatgatgtattttaggtacaaattataattaaaaatttcttatatggtagagtgtatataagcttaaaataatttctaaaaatcactaatatttttttcaaaatagtataaaatagatctcgaactcaattttatcaatttttttttttt

SEQ ID NO: 19402 - DNA, 3911 bp, Cannabis sativa
gtaaaataatatccaacagtaccttcccttgttaacttgaccttgccaccaatacgctcttaacaaggcatccaactccctgcagattgaaattgggactctattcgtagacatcgcgtatattgacatagccgacgcaactgacttgattaaagtcagtctccctgcataagacagcaatctcatcttccaacctgcaagcttctgaagcatactctctctcaacttcaaaaaactatccttcttcattctcttgaacacaaagggattgcctagatgtctctcttcgccatccgattgcttgatagtgagcatctgcaaaatggccttcctcttgtctatatccaaattatttaagaaaaggacactagacttagctctactacaaacttgtccagaccatctctcatacagattaagacatcccattaagtttgttgcctcttccgtgtttgctctcgcaaataaaatcgtgtcgtccgcgaacataagatgtgaaattggagtagcagctcttgctattcgaataccatgaatcttccctctattttcttggctttgaataattttggaaaggacttcttgacagaggagaaagatatagggagacaaagggtctccttgtctaagacccctttgaggcttgaatttctttagaggcgtatcgttcatcaagactgagtaggagactcccgttatacacgacattaaaagaccacaagccttatcatcaaatctgtttgcctgtaggaccttcctaacaaaatcccattccatcctatcatatgccttgtgcatatccaatttaattgccattaagcctcccacaccccttttcttcctgatagtatgcactaactcctgggttaaaattgacgattcaacgatccaacgtcccagaataaatgctgattgaagaggagatatcaagctttccatatacgacctcaatctattagctagaatctttgcaatgatcttataaggaaaattacaaaggctaattggcctgaattgttccattcttgtaggattattgactttcggtataaggcagatgaaggtgaaatttaatccctgatgtacaattcctgatctgaacacctcttgaacagccgaacacacactatctccaacaacatctcagtactttcgaaagaaacaacccggaagaccatccggaccaggagattttaagggatgtatactaaagactatatcccgaatttcttcgattgaagggattttggtcagaccgtggtttattgtctcatttattttgctatcgaacaaatcctccaaatccacaggtattttaggtttatcagacgtaaatcactccttaaagtaagaatttatgatacctgaaatctctctggtgttatccttcatattcccatctttgtcttgaagatgccagacttgatttctcctccttctaaccgaagccgctgtgtgaaagaaccttgtgcttctatcctcgagctttaaccacagctcgcgagatttttgactccacatggactccttctttcgccaagtttcttgaagttgatcttgtataagaaactcctctctacaaaactcttctgtaatttgttgcctttgaatccattgcagcctattttccaatgtactaatacgttgatccagatctcccactttctctttcctccacttctgtaaagcccttctgatgttatcaaaattcttcaagagacttcttgttcccccccgaggcaccttcgaccacgccttgcaaatttcatctcgacaagagtcttcccttgaccaagcatcgtaaaataaaaaaggaatgaagcctttgcttttaaacatgaaggtatcgaacaaaatgggggcatgatctgatatcataatttgaaaatttaaaatccctgctgaaggaaaagccgaactccaatcataagacccaatacacctatccagtctttctctaattagacctccattaaatcttttgttttgccaagtaaattggcatcctttgaaacgcaaatctactcctcctgtatcctgaaggaagtcttctagccaacgagtatctgaagatgttactttcttacctcccatcttttcttcattgttaagaatacaattaaggtctcccataactacccagggcctgtcacaagcatttactttatgggtttacatctcccaaaaattagttttatctctatcataagggggaccataaaccgcaaagagtctccaattgaaatgtccctgggagtcatgaattgcaacttcaaaaacattgttatcttggtccaaaatcgtgaactgcagatcactcctccaaaagagacagaagccctttctctaattaatcgttgtaaatttgttcttttatctgtttcttctttttccaatctttctttttgcctttgtaacttctctcgtttttccctttcccctatttctttttcaaaccttgcttgttcaaatacttcgcgttgtctctgtttcgattcctcttgtatttcaaactttgtagctatgtaatcactcgagttggcacaaacgaattttgcagccaaaatagttttcttgagatgacattctaatttaaacaacaaattgattaaatattatattaattatctaattaagtatataaataatttttttgagataattaagtatataaataatttatatatattaaataaattaattaggctaactaattaccttgttggaataatgaagatggagttaaattctgagtcttaaactgatcgttcattattatattctgttataatattaagccaaaaaaaaagtattaacactagcaaaaccctaatcccattaataaagttttagtaattagataaatattaatatgtttggatgtaataaaaaaaatactagtaaaaagaaaaacacattttatatatttattaacgagttaggaaaataaaaatacttgaataaattaagaacacaaattttaaaccttttctatagaaagaatgggcttatattgatgatgatgacccgatagagcgtgagttggtgctcgagtttcagatttgtgcgataatcttgagaatggcattctctcagtaaatttttcaatttcaaattgcttctctacctctatatatatatatattataacaattaaataaattatataatattacaaaattgatagaaaaataaattatacattacaagatgattaatataaatatagggtttgaagttgaagctcaattaaccttattgtgattgtgagcctttagccaataatattcataagacttagtattattcctcctcatctcctctccaatttacctatattaattattaggatcagcttgaattaattaattatgattttatgtatcatccatattgttaattaacattttaattatttattgaaatattaatatttaagtctcaattatagattgatgaacacacaataaaatggaattaattttctcaccttgtcaatatattttgattaacaattaatcctcgagtagcaattaattaatacttgattagtaattataattaattaaatgatttagagagcaagaagatcattaacttaattaattagggctaaaaagtacgtatgtaaataattatggttcttatgttgtctttttatagccaaataatcctaatgctaatatgattataattattatgctttttaaattataattaaatatgattatttaatcataatatcatgattatgtatcttaagtttgaccttctaaattaatttaataaatgttctttcgttaaatatttcgagatttttagaatatgatggggacctaaatttaaatttactaaagagaaaattttagataagataatctcgtaataaatttaaattatttaaaaaaaat

SEQ ID NO: 19403 - DNA, 3712 bp, Cannabis sativa
aaggagagagagagagagagcgcgcgagagagagagagagatgattagagagatagattgagagagcaatggtggggaaaggggatggggtggaggaggagcagatggcgatggcgaatggggcagagaaggagaagacggagggtgataaaatgaagaagaaaaatggggaagaagccttcagacttaagttttatttagagacttttactagtgcaattcgatacgccagtaaaagtatccacatgcacaagggaaaggggaaaaaagccctaactattgaaatgcaccatttgaattagaattttatcgagtcatatttacgccacaaaactcttctctgatacagaaaagttatgagggaatattcccaccaatgtttttttgcttttgtcggcataaatatgtgctgacaaaaattaaaatgggtcagaaaaagtaattgacatgccaaaattatcctacctaaatataacacctttttctggtgcatattgcgccagtaaaggtgaccaaagtattgaaatgagatcgcaacaaatgatggttaaaattcttagttttgtcagtgtaatttactaattgcattgtataggctaattttgctgatgcaatagtgcactggaaaaagttttatatgaatgcttttggcacttccttgagtctctctatgctagaaacttttgccagtgcatttggccaaatgtaccagaaaaagtcgtatttcatgtagtgaattagcattttgtgttagattagaaagtcaaataggactataccgctgattctaaacacgcataatagttatttttacttttctaaactgaagttgaaggccctattttcctctaaacctaaatagcaaaatcagactattcattttcttctccaaatcaaaaattagggctagttcttgcaatgtttgaccccgctcctcctcttccattaatatacgacgagtggtcctcctccttctcctcttttaatcggccatgacatgtcttccttgactccttcctcctcctcctatttgaaacccacacctctgtaagtgtttttctctctctattggttgatgatgatgcaaactgatttaaatgagaatcattgttatatgcttgagaatctttctttttcttttcaaatattcttataatattaaaaatcttttattatgattatttgtttctactaatgatgagaattttatttttgtatagatatgttcattgatttgattttgagcctccatcttctacatgccatcacctccaaatgtcctaatattgcacaatatttgtttttttttattattattattattattattttctctaatcattttgtagttgtggttgtggtcatggttgtgttgatgatgatgttctttgtttgttgttggtgatagcaaattttaatggtggttgttgaagtccttgaagatgtgattgattcttaatgagtttttttgatgttcatgagatttctagtctctatctctggtagcatttatttgtagtttaatgtgataaactagttgctttatttaactacaaaattttgattggttgattattttatactacattatgattggaaaactcacattgaaaattagtttcatagttttttgttttgttttgtatcataagccttgttaaatttataatttgtggctcttcacgcacacacacatacacttttctctctactgcttgtaaagattgtttttgttttttcttgcactgaggcatataataaaatttctcatgttatattgtcaatgaataaattaggttattacaactatcatttaagggctttaatagtttagtcatcaactttgaatatttgtttattattattatcattattattattatggtaataatatttgtttatttctgaatgaatgcaaagtttttttttcaaatagccgaaggtataaaaaattaataagtttcttcaattttacttttagatatgtctaatatttgagtttgtagttaaagaagtagtacttttttaagggtcttgatggtgttgttagattacaaggtagtattggttcatgagattgtacaatgtcataaaggtagtttaattgtggtaaagttctaatacctctgttcatctatggtagtatatattatattatatgggtaggatttggtacttcataaatgttatctacatttttgaaagggtgacacgcgacattcacaagtgtaaagttaatgggttaggatctggtaaaatgatctaccaccagggaggcccaacccatacggaaggatgggtccaagcccatcttaggcctagaggacatgccttgaagacaagatttatcttgatccagaagagcctcctgcgttcctaagaagaagagatcaaaggcctccgggtgagcatttgggatactctggggatggtgtaccaagaggcacctcagagatcttgtacaagatgatatggtggccctctaacaccaaatgccgcaaattatgggtttgtcccccatgtcagagcctaagagtgcgcgcaccaccaaaagaaaattactcttttgtctaacgacacgaatctaacactacagtacgtacaaatagtgcacggatgacatttgtcaaggatcgtgtggcccttagacgtacagaatgcctctgccccacgagctaagtttcagctagtggacccatagtcatgtatttcatgtaattacccataagaggtccaagtttacataaaaaccctagcgggtcgaggatacacccagacccagttcctagcctataaatactgacttataccctcatgcaaggggtgagagatcaatgtaaaacactatagcaagaagctagggttcttgagtttataaaattcctattgtaatacatcaaggtcattggactaattacaattaattcgtagactagggctcattaatacccaaaccacgtaaaatctccatctctattcatgttatttgcttttttggcaagggacacgtggactctaggttagcatccaaggcccactagtgggcccgaagaaggtaacttgggccaagtcaatgtccaagaagaccctttagtaaggcatcttcctttcttgctcagacaaagctttttccaaggatagcccgtattcgaaaatagtcccaatactgcattttggaagtctagtacaatttttctttttatcaaattgtaaagaataaggaattaactctccataaatttgggctagaatatcatatcaaactaaaatgaaaaactacctaaaataaagatcaagtaattaattcacaattaattacccaaaactataggacatgataacgacagcttaaccgtgctcaatttgcctagtcagcaaactcattctcccatgggctaggcctcacaaatacaaccctaacttgtgtatttctcatgtaaactccccattagaggtaaagggaaactaagtataatccttgtaaactataaatactaaccaaacccttctgatgaagggttgaaatctcttacgatattttcttaggcaaaaatagagaacatatactcatcgtattcccaaattcttttctagctaaaatacataataatatcgactagtggattaaggatctttaatgctccaaccacgtaaaaaactttaagtgtcgttctgttctctctttgaattatttatttctttagttctaatt

SEQ ID NO: 19404 - DNA, 5631 bp, Cannabis sativa
  modified_base (4197)..(4207): a, c, t, g, unknown or other
actttttggtcagggtgatacttatattttgagaacgtggtagtacaattgagtgagagcgctaatcaaagatatagaatccagtttaattctgagtatatcttttatttcttgaaacattatttgatacaatgtcacttcaactagtgtttgtttgctgagtttttctgcttcttttcgtggttttgaatgaagaaacttaatagtgtaataaatttggtatacatatatttttagttccaacaatattgtataatataatctaaatttgacatacatttgaggttccaaaaaagaagactttagagtttaaagaccaatataattaatctaaacatgaaaatgaaagaattacaacaaaaaaattcataatttaacacagacaaattatcatccataaataaaataccaaagatatcatccaaacctttgatttcaaacgaagataaataatacaaaaaaatcatctcaccacacgcacacaatcatttcaaaataaaataacaaaataaattacacagaagtctttgtcccacactttaattggaaaatgattaattaaatggaaaacgaaaaacagtttcttaaaacgattttcaatccagccagtggtatcaaatttgggtgttccatcttctacccgtggaagtcggcgacaatgttgttgactgagatgttttgttttggagacaacatggtggtgtttaatgacctataattcaggattcaactcaaaattatttggtaaactcctttccttttattttctttaacaacaacaacaacaacaacggcaaaataaatctctcaaggctgtgacccatgatcgacaggtgtacttgactatttgccatataagtttgtaatgcgtcaataaaaatataactactataatggcagctgcgacaaagatataatgtatgctctttgaatgtttgtctcgtaacagaatcacaagggctgaacagaaagttacagtcattgttgcaatagaaaggaaaagaaagataaggcctgtcattagttttgtgggcaaggatgtgagaaaatctttttctccatagcgggacgtgagaatggctaagaatattaatactgaacatgtggcggagaggagtgatataacatcgaatgtgacaaagatcgtgaaccatttgtcgtttaagagtatgggactgccggcccttatgaggccctcgtccttgtctaggctgccgccaggaacagttaatgccactgcaaacattatggtaatgatgagggaacccaccaaactacaagcagtagctgtatccttcatccatttttctcctgcgctcttcaattccttgtgttccttggtaaacaactcttctgcttccaatatatcacgaggatacactgtagacttttgtttcacctcctacattaattgattttattactaaacatggattatttactaacacaacaaactttgaaattcaaagaatacctcgaaccattctagttcacttttcatttgtaaagctggtccagggattttactcaggtgattagcaggggccaataatgctgcatgttgtactatgctatacatttctccagttttagtcatactgagtgtatttgtaatcgcatttctactaggaatcctttgtaaaagagaaaatatattacgatgacgatatcgaactgccacattgaaaacaccaaatgcaattggcaggcgtagaattgaaggatttgcattatttatagtttcaaaaacatcaagtaggcctcgtcgagcagcttcctgcaatgctttatctacatttgccatcttcatgcgcttctcctgtaaacctactatgtgtttgtacatacaatttagaattgccaaggtacggtgatgatttagtttcggttccagtcttctttctgttgagatgagagcaaatgtaaatacatatggacagtttcagtttggcgaactacaccattctcgataggaagattacctgcatttctacggttctgaggaacgacaggttcggggttctgaggaacggccagttcctcaacaacttcggggttctgaggaacgaattcgtcggcagcttggagggtgtgaacaaggtcctgagtaaggttcttgcaaagttcaatgccttcagcagcgttctgggaagcttgagtttctctgagctgtctatcaaggttctgaacagcattgactttacgagaaaaattctgggcttggaggttctggataaggttgtggacttggagacttgtaacaagcaccgagctacattcaacagtatcgggttcaatgtgttgggcatcttgaatcatttggacaaggaaacctgcatctgcgagatatctggctctgagattcgtagcatagttcaaggcatcgttgacgtccctgtgaagcctctgggcatcttcaatgttttgggcaaggctttgggcaacgctttgggcaacgcttcgggtagcttctaagtcctgagcttggaggttttggagacgggtacgggcatttgtaagattattgacaatcgtttgggaagcttcaatgttatgattaaggttgttggcttgcaagttttgggcaaaattttgggcaaatctccaggcatttgtgatgttttgtgcaagggtttgggcttggagttttcgctgtgggaggttttggttatttgccatgtcctgtgtaaggttttggattaggaggttccgatcatttgtgatgtattgttgaaggttttgggcattttgcatgtctatttgaaggcggtttaggtcacccaactgattattgagattctgtctatttttggcaagtgtatgggaatagaggttcacgaggccctgggcaagattcccagtagcttcaatgttctcggcaaggttatgggcatctttgaccttatgggcatggcgtatttgagcttggtgcaaattataaaggttgggttggtcttcctgggcattggggagatgattttcatcttggcgatggttttgttcttggagtgtgtaagcaaggtttgcagctaagaggttttgagcaaggttctgggcaacttttgcagtagcttcaagtttctggagaatgttttgtgcaactctaaggttttgtgcagctccatgggcaaggttttgtgcagcttcaaggttctggtgaaggttttgtgcaactctatgggcaaggtcttgtatagcttcaaggtcttgtatagcttcaaggtcttgaacagggctttgtgcagctataaggtcttgagcaaggttttgtgcagcttcaatgttctggacaaggttttgtgcagcttcaaggttctggggaaggttttgttgaacttcaggttgaaggttctgggaaagatttagtataccttcgagattttgggcaaggttacgtgcatcttcaaggtcctggacagggttttgtgcagcttcaatgttctggacaaggttttgtgcagctgcaacgacccgggcaaggttttgtgcagcttgatcaacgttcggaggacggtgtatgactactgctctgagatattgggcgaggttctgtgcaaggttctgggcgttttcaacgttgatattgacattaaaagcgtttcggagtttcacgacatggttatgggcaacttcaatgtttggtctaagcaaattttctggaggcaggttttggacgaaaggcaattcacggagaacgttaatgcttcgaagaaggtatgtggcagcttcgacattcttttctctttcaatattttgaagtaagatattttcaactcctgtaattcctatttaagatgaaaatgaaattaaagaaattatgaattgatttattattcattgtgaaaaattctatgcaataatttatccaatatagtagtaagagttaatgagaggaaaaataatatcatagctagtgatctccgatagaagaagtatgatacgttataatggcctattggttgatacaacatcccaaaacattataatagtattcgtaccattatatatctgtctgtcagaagagctgagattacataacgcatcagaaatgtctgttgaaaatctgtaaattggagtttctttagtatggacagtctgagcaatagtcagctcaggatgatggtggagcaaatgcaatgcaatttctgaggtcaatcacatcaaataattaaactcatatttatatatatatatatnnnnnnnnnnngagagagagagagagagttaattaattccttaccaggaagagagtgaactatacagagtgttataacgctagctccatgttctctgttgtccccaacaaaatttagcataggcgtggcaacatacaaatagcgacccatttccttttgagcatattgtagggccaattcaactggcaatctttcgtcattacacacgtcaaccaaattgttgttcttttcaaccaagcactttgcaatgtcagtgataccagtccttacagccaatccaagagcattcatatctaacctatccttaatttccaagtcttctctatccatgctctccaccaatattcttacaattccgatattttttccaatagaaacagcatgatggagagctgtctcccccaaaaatggatgtcttgctcttactatgtctctgtttactccaatcaaacgaatcacttcttcttcttcattattttcaattgcttcaaacatcctctttaaatccgataacctaactattgcttaataacatatacaatacatacatataaatatgagcaaacattaaggtaatataatttatgtagtctttatataaataatgttagaaaaagatgatgaaaaaaattttaaacgaaaattaaactctccctctatatataaataattaaaaatgtcatttcattagatatatatatatatgtagggacacgattttgccccgtactttcacggaatgtattccgtgatatacagaatacattagatgggtcttaggtgacgttaacattttttaaccttaattatccctagatcaatcctaacccttagattaaataactctcccagttaacggctttcgtacatcactgaatacattccgtaaaagtacaatcatagaacaaaatcgtgtccatatatatatatatgtatattgagtttgtaatgtgaataaaaacataccattagtttgatggtcgccatatacaatgtgtatgtgtgtaacgatacaatacaatatggtggtatctctatcattactcataatatttgtcaagagaacaataatgaaaaagaaaaagaaaaaaataatataaaaaatgaaatcttacaataacatcccacctctcttaattttagaattagatagatcgataaatattttaagggaaatagtaacagaaatcataatttataaattatataacatagttaatttgtacttcaatatatataactgtacattattgtaggaacaaagatagaaactattaatacatatgttcttttgatcagtttttaccttgattattatcatgagctagggctgtacatcggtcggtttagtcggtttatactatatattttccaacccgacataaagatcgggttataaaattctgcatgcaaactgcccaatttaaaaaaaaaa

SEQ ID NO: 19405 - DNA, 2596 bp, Cannabis sativa
gaaaggggtaaaatggtaattttaatatattgttataatggactacattattatgtaatatgtttgttttattgtgtacaggtgaatttcgacaagttagtgcggtattgtcacaatcaaatattttggcttgaaccgggttcagggtctaaaatttatgagttatgtgttttatggtaataacgtgaaatatggatgattatataaggatatgtgtgatgtgaaaggacagaaatgcccttgtttcctaattgtgttaatttttagctatgaggacaaaatggtaatttgaccaaaaattagtaaatgaggtatacttattctttcagaaaaattaaaatcaaaacaccatttttttctggttttgaaaccctccctcaccaaccctctctctctattccatctttgaaatttcttgtgatttttgaggaatttgtggaaattaaagaggattttgaattgtggaattgtgtttaagttttggaaggatcgtttgaggtagttttaatttttttttctcttttgatttaatctctgaaaagtttttaagtttaatttgaatttgcataggttgtcatgaatggtataattatggtgagcttgatttggttttctatgaaatggtcttagatgctaagcttgggacttttgtattgtttgagctttgctacatcagaatatttaggccaatatctagttgctttattcatgtcattttggtgagtttaaacatgaatttacttgattttctttgagtttaatagcatgagtttttggtaattttgagcttagtgatatatttgttttacgcatgtatattttgaaggaaattttacctattatgattttcattggacttgtaaaccaatttggtaataggtatgaaagtttagttgaattggtgtattttcgaaatggtaaaaatttgggtgttttgggtttttaaacccaggtattgcagctcccatgagccccaaaaatataggggatctcctttgtaagggcccgccgcagcgccctcgcagtgctagttcccttttggtcttggatttttgtaaacttgttttgaccataatttttgactccaaactccattttggacgttctttatatcgttggaaagcctatgacgagctctattacttggtctagagttagaatcctaaatatgaatatttattaatgtgattttggatttaatcttattgtgttttaatcctaggattttgacaaggattaccagcatttactcgagagcacccgtaaatttggaattctcctcacactttggaatttaggtaagaaagtgaaccttgcacatagagtatagtgcaaaggcacatttttatgttatgtgagtcattagttagaaatttgagttagggttactaccgaaaagtttctatatctatgcatgcaatacatgaattaattgggtatatgtagagggttatgcgggcaaagcataagtactttaatatatatgttgtgagttgtgcagacaagacataactaggttagactcgataatcaaaactgagatataataaggccttatgcaataaatagacgtgtgagtgtaacatatagtgtttatgcaatatagacttaggatgcggtggcatcatcataagcacagtgacgtgttatattagtacggtggcactgttatctacgaagtggcgtattaagtgtgatatgtatgctttatgttatatttagattgagattatgctttcttgttgggccttagctcacgggtgctctattatgcagccaagggtaaagtagtgttaggctaggcatgagttcgagagttttgatggtgaatcgtacatattctgtccaagctagatcacgagagttgggtccaatagggagattgtatagaaatcttagttttaccgcttaggtcggcttgtatgtaaacaacttgtaatattttgaaaagaattttacaggatcacagacatgtaattaaattattttgttttgaattaaaggttgttattattattacaagttgttttgttatttaagttaaattatttttattcacttggcttattggaccccaattaatgggattagtaaaatgtaatcacaacacttggcgttcctttaattaagacgttacaactacttccttggaattcaagtacatcattttgttgatggtcaacatttgtgtcaaaagaagtacatcatggatctttttgttgttcaaaaattgattgtgctaattctcttcccaatccaataactagttgagaaaaattgttaggatataatggaaaccctactgctgatcctcaccaataaagaagcatcgtgggagctttacaatatgtagtaatcacaagaccataaatagcatatgctattaaaaaggtttctcaattcatgcataattcactcgaacctcatctgaaagtggtaaagaacattctaaggtgtcttaagggtactttagacaatggattacatctaaaaccttgctcaaaactggttctcataggcttttgtgacgcggattgagcatccgaccctgatgatcgaaggtctacatcatgtttttgtatttatttagggtcca

SEQ ID NO: 19406 - DNA, 7456 bp, Cannabis sativa
atgaattttttatcaattttttaatatattttaaattttattcatttcattcctattcttatttttatttttatatttttattcctcctaattaaagtccacgtaggttattctcaccaacattcatagaaattgacaattcttcatgtttatggaagtggtctctatttctgtggtcgacaataaattcgctggactgggattaggtgtgattgcagtattaaagtaaaaaagaaagccatgatataaatgttatttatactgtgcagtattaaaaaaaattgaaaaaaaaatatagatatgcaagttcccctcaaataaaggggataataaactcattcatcttcaagaagcaagacccaaaagtatgaaatatatcaacaatattaatcttttattagggtaagtacacaattaatcacaaagcataccgatagaataatgaatgataatatcatttcgaagtgtgtaaggagaagtgtcgtaatctttgacgagtgaccaaaaatatatatatgtatatatgaaacagaaaaagaaaaataatggaagacaaccagagaatggttatcgctctgctacacaacgccacaacagctagaagcatcaatgcagcaatagccaatagagctcttgtgaaccaaaaagaaatgacgacccagattaacaatcaagacaagactaaaagtacaaccacatcagccctggaagaaaattacaataccggtcaaaaaatacaaaatgtgggtactgactcggtcaagatgggatcgcaaacaataaaaaacaaacccctgatttccaacttcagaactcttttaagggtttttattcagctctcatcggtagccaccatattgttgttgaggaccaccgtagccacccatcatgggattataaccaccagggatgtttgacccaggacgcattcctgcttgcggttgccccatacccatattcattcccatgcccatccccatgggttgttggttcatgcctccgtatggccctaaattcataccctgaccaggaccaggaccaccgcccattcccatacccatcccagaaccaaccataggatttgccgggggcctaagtgcacctgcaccgacacgacccatcccagaaccagaccccatagctttacccatatttacagtagatgtcacaggagttgcagcaggcttctccaacctcttttccttacgattgatggcatcaaaatcaattcctatatccgctaatggatttgttttagctgcaatagaaagaaaaaaatagagcttttaactgatcaggcattggagatatgcataaataagcctaaagagaagtcaaaacttggtagaaatgtgatcttaagaaaataaattaagcactcacgtccagatatattcaaattgactagtccacggcttagtgtatcagtccaaactgttgatttggtctcaaacttgtccttagttggatgagaagccattgaagggtttgatcctgtttgtccaaggttaccaagaacattgctttgctgcacaggtccactcggggtatgataagcagcttgtggtgctatttgggaagcagaagtctgttgttgaaacgagttgccactgttcagctgtccagcgtgtcccattgtagtttgtggattcatggagacagcaggggtcccctgctgtgaataaaagttcccattatttggaggtgcaaaaggctgttgtggagcaaattgtccattgataaattgattttgtccagtgggcatttgaggaattgcatgtgaggtcataggagtaggtccagtgggaagataatttccataatgcccagcagaaccgctttgagtctgaggaaccatatttggcggaacagaaacttgagatcctggctgtggttgaaaactcccaaaagcattagcacctgactgtgctgtttgggttgatgacactgaaaaagcttgttgcgaagttatagcaggtgatggtcccgaatggggaaggatgtctgctagaatatcagtgttctgatgtgaagtgggcagctcctggggcaaaaattctgggttcattgaaggagtttgaacagtagagaaactaggtgtagaataagttatgccagataatgagtccccaaagtcaaaattggatccagtttctgcttttggaactatggaaagtggtagctctgctgtgaaagctgtgtcagaagtctgcggtggaacttgggtagagtcagaagggatggctctgaaaggtgtgtcaccaaatggatcttcaaatgactgcaccaagacattacactcaattcaggaacataatcaatatcgcaattaataattataagcaaaagaaaaagaaacagatgagttaatgcattctgccttgagaaatatttccctatacaagttcaaaagttcgaagccgtttccttctatgaacacatagcaacaagttttacgaaacatattactatgatcatgactaagttaaattacaatactcatcgcaaacatgtcttcaacaacagcatcagccgtcaggtttaaatattttcataccccaaaaaaatgttgtaacatggttacctgattcacaacattagatgccactggtgctgctacgaaagttgatgctgaaccagcatttgcattataatcagcttctgaggtggaagtagttggcacaatggccaatgacagggaaccaagcaagtccatttcagcattatttgcattagctggagtagctgataagcaagggataagagaatgagtttctcatgatacatgttatccaaagatgaagctaaataaagcctaagcttttgcttctaaaagacaagctaaaatgtttggttggaaaaaaaaatgaaaagttatgttcgtatgaattaacccatgtgcgtattaataactaatcagcaacattatcagaattctacaaattgacaacactgagagctcactaacaaaaatctacaagcacaggatagccaacaccagtttagctaaagttaggttcttgaactaatcacaagtagcaaagattgacaatctataaactctacaaggactcacctgaattcttaaaaagaatctttagcaataaaaatagcatgcatatcaaatctcgtgcattttgaacctcactggcccatgcaattgaaacaacaaaatatgtctactaatattattttgggccctgtaagatgctgatctgacatgttgcatctcaattgagtaacaaacatgcattccattttaggaaaactagtatgatcttgagcaattatgcatcatcctatataattatagttttcaactgttcattagatatgcaaatatgtataccagaaaagtcaatacaaaaaagattgatacagtaaaaattatatataaagattgaatgaatgtgtgacctttttaaccacaaagaacgcacaaagcaatatttttaacaaaaaaaaaaataaatctataactcatcctcacactaaagtattgtgcaagatggtttcacaataaggacaaataagtataaaacagtgtcaattttgattaagtgtagcagttgaagatggtttccaatttaaacatgtcatggggtaagttcgcacctgaaactgaccctcttggatcaaattcatcgaaagtctgtacttcctggttaggaggaggaagagtagtatcactgttgtttggttggtttggatggtttggttggtttggttgactgcttactggtggagaagttggaacgttgcttggtggagaagaacctctaggagcagcagttgttggagtttcgacatccctgttatcaagacattcttggggaatgagaactacatgaaaacgtggagcaaaagactttgttagcttaaatgggaagaaaaataatagaacctctcgctgtgaacaggacttcgagagtcacttatcgcctcttcataactaggaggcgcaccaatattttgttccgagtatttcctatcaaggcgcctgctaaaaaagaataaaaatttcaaaaggaaaaactgtgtcaatcactttgctctatgtcaacctcacctaattaagagtaccaaatgagcatgcatataataaacacgaagttaccttccatcctgagaatcatcacctctaggcccactgccaagtaagataaaaggcataagctaggtaataattttgagtgttaaataatttcacacttgacatgatcttagtgcgaaagatgaaattccatgataaactttgcaagtaccacatgcttaaaaaataaaaaacacaagcaaaacaagaaaagcaaccaaatagacaataagacaacatctaaaaagaaaaattataaaataattaaataattaaatgccctcaaatcagatgttaaaaaaatctattaaagtaaagcacacaccgagaggaatattgaccatcatcaaaagaagaacgctctctgtctctatcagagcttctacttcttgtaccatagttatcatcaacactctgacttcttcccctgtaatcatcatctctgtaaccatctttaccatagcgctcctcatagtctctgccattgcgatctccatcacgagtataggagtccccgtttctgctatagcgatcatcatctttgtagccccattccctttccccatttcttccatatcgatcgtcatccctgcttccataacgttcatcttcatatctgtcgccatatccacctggacttgaaccaggcctatacatcccacctgatgatgatgggctgcgaaacctgttctcatagaatattaataatcctcattaatttgaaaatgatcaggttatatacattgcactacactagagttagctcttaaatttaaattcaattatttaaagttgaagacatgaaaaattaatgcatcataataaaggatgagaaaatacataaaaacaaatacagttacagaagaaggaataatatgtactgataatgataatagaaataagacatatgcatgcagaaaaggatacaattccacctttgtcatgatacttgcattgcaagatttaaaaacagatttagcagcttaacaggaaaaaattataatttttatcttttactttatcatggttaattttactgaatatttcaatttcatttgaaaggaggaggttaactatttgaatagaaattgactcatcacagtgctccttacctaatttctcttaatctgtgagagaaatttgttacattaactacaacagaaaaaagctttaactaaatagaattaaatgtgcattcataagggacttcaaaactgataacatgagctaactctgaatattaataaaatcgtggaaaaatgggagagaggtgccatcaaaagccacaacaccatggccatagagaactatcaaatacatgaaaagaaaggagaagacagaaactatatattggaagtaaactcacttgtccctatttgcagctgctttctgtctaacttcaattattctttctttatcgttcactaggactacaagactttgagatttctttctgacattgcttccctgatctcttccactggaatcaatgtattgaaaatcggacagtgtctgacacatggacgattatgtaattagtggattaattaaggcaaagcattttcaaagtgattaaactgctgtaaaactagtgaaaatgaaatagtgatagatcacaaagaaagctggtgattactgatatttgataagaatgttccttaatctcatctatgacccgctctgacccatgggctactaggtattccaaaacggttaatgcctgatgaacaacaaaaataaatcagttttaaggtgaaacacaattattcatctatgattaaataaataaaagaaagtttacaagaatgaatgtccaattattaaattaaagaataacattaactttaagaaaaatatcacataatagtgatagtgactacaagttaaacattaaatttgagtgtgggtgcacacaagaaagatagataaagaatatgaccttgtacacatgacgccaattcttgccagtatcattaattcgcttccaaactaccgtcatgatcatctgatattcatgactgcagaaacattcaaattgattaagacaggcataatacagataatctaatccaatccaatatgctaacacacaaagcttactagtttcttgttgccaatgcaatatcagcaagaagtgatccatggggaccccaaggctcattgctagttgcatcaagaacctggataaaaaataaataaatatagccaccatgatcatgtaatttagaattcgaactcataaattaatgcaagttctgtaaccaaataataaccttctgttcaattccaggaactttgagaactttcttattaacctctctcttactgcaaaaagcgaaaacacatattaagagcataaaaaaattgggcatttttctactatcaatacgaaacaaagtaaatagagatcaatatagtaacaaacattgaaaaagtattccaaaaaggatctttttctgatcatttttttccttctggtaattagaaagaggaaaaagaaacaaacattcgcatttaattgaatacttacaggtccctaacagtttgaccaatgaccttcttcatcgaaaatattgtatgtagccgcttcaaagcctactcgtccctgttataaagaatcgaaaaccatcaactttagagttacagcattgagattcaacagcacatacaaaatcctcagtatccaatccaatccaattcaacatacacatatgagctagattttatcaaatgttagttgagatcgaacctcaattggagaatactatcaagactaatttctcgatgagaataataatttaaaacaatagcataatcatcagaaatgaagaaaaaatttaatactactatttttcaaataaaaaaaatgaaaatttaaaataaaagagaaagagagctgaaattaatacaagaaaaaaaaaagtagatctggtaggagaagaaacctgatccaacggcagcgaaggatggatctggtctgatctgacctgatctgacggcagcgtggggaaggagataaacgcgaagatggcagaggaggaggcgagatgaggaagaagaagctgctgaaaccaaaggctttagcttagaatgtggatgttggtccgaaggaaaggagagagaaaatcaaatacgaaccgacacacaaagaaatcaaagagagattttgaattttctgtttgttttttctttctataatttcggaccaaaataacaactattaccaaaaataaattaataaaattacgagaaagacagcgcaacttctacgcacatacctcaataattaacctttccttcctttacttttaattaataattaatttgttaaaattcatttatttgttttgttgaatttttttt

SEQ ID NO: 19407 - DNA, 2605 bp, Cannabis sativa
actatgcaatgctcccgccactttttaaaggtgtataatggctatctttttaaatatggcggaaagcattcttaagatcttcatggatgatttttcagtatttgggaaatcttttgacacttgtatagctaacttggagaaaatgttgataatttgtgaggaaacaaacttggtcttgaattgggagaaataccattttatggtaaaagaaggtattgttttggaccacaaagtctctcacaagggtattgaggtggacaaagctaagttggaagtcattgaaaagctaccgcctcttaccacggtcaagggtagtataagtttttttaggcatgcggggctctataaaagattcatcaaggatttttttgaagatttcaaagcctctttgttcgttgttggaacaaagctgtccatttgagttcaccaaggagtatatgaagattgtacatatcaaggaggttgaacctgtagagttcgattccttaggatagcatgggatcatttgttcaaggttgagttgtgtgcttaagaacttagttgctgagaattaagggggattcattcttgggagatatatcactcataacgatatcatgatttgtcaagatcttgttcgacattatgagtgtgcaaatgctaagccaaattgtctcataaaaatagatattcgcaaagcttatgacacattttattgggacttctttgagaaattgcttgaagctttttgatttctaggacactttcaaaaattgattattacttgtgtaaggtctccttataagtcttcctcgatgatcaatggctctcaacatgggttcttgaactcaaaaagcgggttaagacaaggtaatccgatttctcctcttctctttattttagggataaaatatattactagaaccctgaagaagattgctagggatgttgattttaagtattatgaaaggtgtgctccgatgaataatattacatataattatattttgcagatgatgtaattcttttttgtcatggtgacttcaacttagtctacaagatgttaagaggcttaatttttttttctcagacttcaagtttacaagctaataatagtaaatctgaagtgatttgtagtagcatggatgaggttaaagcgcaaaaattgtaaccacttctggatttaagagagagtctatgctttttcgataattggagatggctatttgtactaaaaaaattacttctaaagagtgtgaaactctggtggataaaatgggtacataccaggattcaatagtggagctttaagaatatctcctttgctagtcgtttgttgcttgtgaaatctgtgctcatttcccttcactcttagtgggttcaacttgtggtgcttccaaagaaagtttttaaaagaataaatgctatttgtagggcctttctctggaagggtgtggtaatggcccgggaagtgtagcttggaaaaatagtattttatttcttcatattagcaatgagtctgtggtcttttaaaggtcattcattataccacactttttgtaattttcccgcttcaagcctccattgagcattcccccacgaatttatagctcttatacacgagtgcgtcactctggctgcttcctagaccgacgactggccatacagaccaacacgagtattttcagtgtgctttgtcctcacttgcacgctttctgaaaaaagtttctaagaggtcactatcctgaaattaccttaggtgaatcccacttaactataaagttctttatgaggagctactagaaaaaaaagatgcactttgttgatatatgtaatattaatcaatctatttaagtcattttttaccgtgtagtcccatacctagataatctcaaaattatcacacttgaccttccctaagtggtgtaggattgcatagcttactcgatatttttctttatggatcacaatcgagactactaactgtcacactttctaagctcaaacgtgagaagtttattaattattaatgtatgactaactctaattaataatattgattaaattaataaaattttattgatcaaatttaaatttaagatactaatgcattattattaaaaataaagagtactatatatattttttgagataaagagtactatatattaatttgaatttttataaaacacaaaataccaacttaaaagagtatattccccatattaaatatgcattaattatgatacatatgtaataatgacaaaagaaattgagagatatatctgtggatcgatctatatggacaaaattaacaatcaattaattaatacatatatattttataacgtatatctttgatatttttaagctaaaagccataatattagtccgagagatctggtatatatagtagaatatatacaattatataaatataaatacatgtagatatataatataaagtgaaaagaaaatgaataaaaatgaggttacttgcagcacacttatatatttatataaatatataaatatggagaggagacatatacagtttatgatataaattgacaagttttacatgttggattgagacataaattattatcaatcatattatataatt

SEQ ID NO: 19408 - DNA, 3411 bp, Cannabis sativa
cggatatccgcattttgcggattggatcgtgctgattggattggatcggatactttgtgaacacccctacaaacgacaccataagattgaattgatgcaaagataattccatccacattgatcttgattttatttaaagcgggttaagttcaatgctcgcaaatactattagtaccagcaaggactaaaagtagctcgaaacgacgagaacgagcagatctcaattgatcaagaaccatacgtgcaacaaagataaccacaacaacaacataatcttttttattccaaagcaagttattccgagcctcgcaaatggacatggcaaccaacaaaaaccaacatgtaaaatcaggttaggaagcaatgcccacatccacacatgatctgtccaaactgactgagcaaaaggactggtcacaagcacatggaggatagtttccttctcctgacagcaaaaaacacaatgttgttcaacatggacatgtttctgtttaagttcagaacaagtagggagacaaccagtgattgctctccaagcaaaatggagagttttagggggaaccaaaatcttccaaaactttttccaatcttccgaagtcaaaaaaagcagcaataactgaccttagacccaacaagtgaaaggatgattagaaataacaaagggattaataggatttggaagccatggagcattgggggtatcgattccattctaatacgggcaccatttcaaacaagcccttgagtttaaaaatgctacgccatataaaattagaattatggcccaaagtagcactaagaaaagagtcttgaggataataacgagccttgtaaatacgcctaactagagaagagagtcataaaaaagtagtcgccaaccttatttggagagtaaagataaattataatcacgaagacttgagataaccaattcctccaaaatctttatgctcacataaacggttccaactcatccaatttatcctttttgaacgattagaagcagtgtgcgtgtgccaccagtatttagacatcaatccttcaacctcatgacaagtttcaacaggaagacgaacgacaaacatagcatagctgggtaatgcttgggccattgacttcaagagaatctcacgaccagcttgcgagaagaaatgaccctccccactctcaattctctttcacattttttccttcaaaagtcccaaaatacctatcatttcgcgtcccattatacatggaagacccaaatacatagaattctaatcagctagttgcatacctaaactagaacaaattcaactttgcatgtcatcacgagtattaaggctaaaaaggatagaaaacttagcaaaattaaccttttggcgagaggcaagcttaaacaaatgaagcatttgaagtacattagtcgcttcttctttcgttgctctacaataaacataactattatcatcgaaaagtaagtggaaaacggtaggagcccagttagccactttataaccctttaggagacccattcttacaaattgactgatcaaagacgagaaactctcagcgcaaagaaggaaaagataaggagataacgagaaggatggggctatggttcgagacagagacttcaagattgaacaattgcgtaaaattaaattgctggagccaagaagaactaaccagagcacgatcaagacagacttctacccaggaatcactaccacgaccacagtcccaagtaaattgataaccagacaaatccaagtcatgaagattacaatcatttagagccttacaaaatcaattaattagccattgcgggtaaggattacctccatgttttttcactctaagataggacattatttaaatcaccaatgatacactaaggtaatgaagaatccatcgacaacatacgaagcaagtcccaaagttttatgaggaaagagagtgattaggttctccgtagagacctatcaaacgctcaagggtgccttgacaactcaaggtttcacaataaaaaacaaaatcaggtttcttttggctcacaagattcgtaaggaattgaaaagtctatgagtttccaagcccacgaaaattccagcttaagaaactcataattgacagttggaaaccatagcccaccaaagatccgttgttttgaaacttcttttgtttttttttttcaaaaaaacccttcccaaatgtaaaggccatttcaacatttaaatttctaggtccactaaccaaattatccttattttgaggactatcgtgagattgaattggtttctttgtttgagtatttgtcaaatttttactagcagttttggtaacatgttaccaagttttttttttttttttgtttttcatgtggatcaatgactgaaatgaaatgtctaagaacactcccaacaaattttctattctatacatcttttaaaatatatcactaaaattttattttctttatttcacaacatttttatattacaccatacattaacttctttaaaatacatcaccaaaactctatttttttaaaaattttaatatattttatttatttcaaatgtataatattaatatatccaaatataaaaataattattaaaatctaaaacaattactaaaacatgtttagaataattaaagctattctataaatatggaaattttaaacaaactttaagaagtaatttagagtttctactgtagtgtgtttttagtatgtttctttaaatattttaaggtttctctaatttagagaaggtgttgtacgagtgctctaattttgcgtaatatcagttatatgtacttcttttttgttttaaatttgttaactaagttagatgattagttgtacacactctttagatggatggacaacttgttcgactagataatttttcttttttcttttgaaatgcatagtcctttagtctgtacgtatgatattatttaattttcaataatattagtatgctttcaaaaaaaaaattataaattttttgattacattaaaagtgggtttggaaataattacatattagcgtaattacacttattttaaaatattttgtgttcagatgttaaaaaaataattgcatatgaatttttatttttcatgtttgacaaaatgagttagtactaaacaatttagtgacattaattatttaaaaaaaagtaatattttgtaattacacttaattcttatgagatccactgtaaaaattagaaaatgtaattgagactctttaattattacctccacttacataattactacacgtgccaaattttgttattactcagaattaaactcaattttaaatacacagtaactaatttctaaatgcatcctagaagatctcaaaattcaacattaatattttgaagtttactttttttttttttttt

SEQ ID NO: 19409 - DNA, 3573 bp, Cannabis sativa
  modified_base (3495)..(3529): a, c, t, g, unknown or other
tctttgtttatgcagacattattgctcagaaacaatctcaatatcagctctcatcaattgaaaaacaattaaaagaaaaggctttcaagaggaatacttcactttctttatccaagtataaacatttgtgtaccaaaagtaacataaaaatatacaacaaagttaaaacaaatacatatttatgatgatccaaaaaccatgataaggctagcagttgtttccttttcacaatctatttctagagaaaaaggtagcgcgaaaagtaaataaccgaatctatagacgacaaatgaaaaatagcaagcttgtagttgtaacatcattgtgatttttagaaatacaactaacctgtaacaagcagtgctagacctcaattcaacaagcaaaacgagtgaatcggagttgaaaaagaaactactttatgtaaataatatcttcatcaggatcatcactctcccaatctctgccatcttcaggagcatcagatgattcaatttcctcatcatcttcactttgtgcagtattcttttcattttttatcttatctaaaattgctatcacctgaaacaatcaactttaaccgattagcatggcacttaaaaacagacaaagcttaactaaattttttttatggcctcgatagttcgaccggtagacctcccggacgcaaacaaatgcttgtcagcactttccatactaaatacaaagaagtgacgaaacttaggcaactctaaatatttcgataaataaattgacagaatcactagatggaacacctaaaagggagatttagaaagctcttacagcaaatagcaactttctactgagaaaacaaaacataattttgtatgaaatgttgtgagagcaagggcagttggataaaatgacagcaatttctaaaagagaattttataaacctcttaattgcaaaaagaattttctcttaatattaagaaattggcagccaacacctaattcttgaacaataaggataaaggtgaagttttttttcaccaaggattaaaaatcaatttattttcgtaccccagcaaactcaacttagcgaaaacaaactaacagaattccatatgaaaatccaaaccccaatatcataacagacctacaaacaaattatcagaacagtcttgtcaagctctatctatatacaagcattttgctccaattcataccaaccttaatgagctcatgagtgacctaaagcaatttgtactaagttcaaaaacaaacatgtattttaaattcaagaacatgaatcataagctctctagttgaagttgtaacatattgacacaattagaaagacatgattgcaactcaccctgcttcctctttctaaagactcatcttctatgaaacgaatttcgggagtcaaccgcaacttcatacgccttcccaactcaccacgaacatatttggctttcgactttagcccagcaagagcaacctccttccctctttcatccccaaaaacagatacataaactttaaccacctacatacatttaaaaaatgaaaacaatcacataaataggcctccttcaatttatataaagaaaatcctttttttccttcctgattaactccaacatcatcaactacaactgaacaacagttcaatacaacttcaaccataatgcatcatgccataaataaagcaagacctcttcaaaccaagaaatcaacaaaattgcaatctctaaacaagtatctatgatttcacatactacccctaccattctctaaaataagatattacatttctaaatatacaaacacaatccaaaacccaaatgggaaccaataccagtccttaaaccccaataatatcccacaaacacttgctcctagtcccactcccacttatgttgaaattattctagtagaacaatactaaccaaagagaacccagcaaagaaaaaggtacctgcaagtcagatgaaacttcaacatcactaatggtggtaagagaagagagataacggtcagctcccaaagcagcttcaggtaaaattgcgtattgtaaagtggtatcagtgagaagcatatcagagagttcccttcttatctgcttagccaccattgccactctcctcggcttagccatacaccttatcgttaataaagaccgcgaactgagacgaaccccatgattcgtgggtttactccacgccgttaaacttaaggataacgataatgacgaagatgacgatggtggtgatgacggagtgtgacggcgatattgggagggtgagagcggtggatagtggagaaccaggtgtgacattgctataaaaatttcacctttttgcgaattttttttggtgtaaatatagaaaatgattagaaattaaaacattatccagaaaaagagtagatttttggaaactcaccagtaccagcaagagaagagaagagtgtagtgagtgattttgggttgaaatttggaggagaaagtgatgaaatttgggtcctcactcctcacttcaattatctttgatttcttttatcttctgcttaatatgattttgcttctctaatttttaagataatacctttcaaaaaaaaaaaagataatataaaaattagaataaaatttactgattattgccactaatctggttatataattcttaattcttttgtagttgttttttgaagaagtttttttttttgaagcaaaggtcgaaacaattttggtttgaaaggagtgctcgtaaaaggatgaattatatttctaagttgtagaatgatagtggagcttggtttactaaggatgatgggttttctcaattagtaaaagactattttcaaggtctttttactgccttgaatgtcgagtgcggtaacatgcttgatgatattaaagtttcgatttcagcttctcaaaataatgatttggtgtgacctattttggaagaggaagttcgtagggccttgtttaaaatgcattcagagaaggctctgggtcctgatgggatgagtttaggattttatcagaaattttggcatattgagggggcgtatgtggtaaggttggtttaacaggttttctcttcaggtgagtttctagttggcattaacgataccaatattgttcttattccaaaaaataagagcactatgaagatgggggactcaaagccaatctctttgtgtcatgtggtctacaagattgtttctaaagtgatggccaatcgttttaaagtggtgctaccattggtaatttttgacacaaaaagcacatttatactaggttggttgattttttataatattattatttgaagcgtaaggtttttaggatggaaggagttatgacgttaaagcttgatatgagtgaagcatatgatatggtaaagtggaattatctaagggttatgcttcagaaacttagtttttcacaatactgggtgaaaatggtttcgtcttgttttttcacggtgaggttgttggaagttattttaccaggatctnnnnnnnnnnnnnnnnnnnnnnnnnnnnnnnnnnnaaatatgaacttctaaaacgacatgaaattaaacacataagagt

SEQ ID NO: 19410 - DNA, 3885 bp, Cannabis sativa
aaaaaaataaaataaaataacagacaccttaaacttacaaatgaatgtgaacttaaaggagtattgtcaagaaaaatatataagtattaagtatagaaaataaaatttaagagagttttatcattaagctattatataggtatggcccccttaaaaaaatctttataagatttttccgttttagcttggcccccatgaaatggacaatctagctagtttggtccctaatgtaatactcaaactcaatggatcataataattgagaatattggcgccttagaaaaatataaataatattataattttaattaaataattaactacgtcccatgcaaatgttaaccacataaattttgtgtaaatatatagttacatattccaccacaatgtatagtaattaaggagttaaatattaaaagtgatgttaattatatatgtaacgcatagttttctacaattaatgataataataatagccttaattactaaatattatcaaaaagattatgtctatattaattacattctttgatattcgaatatatttgaaggaatataccttaatatataaaatatatctgcacagaattcttatgaaagatatttctctgttttatttaattactgttaataattagattgtgttaataattacagattattgtatgagaaatatctgtaatatgtacatttaagttcttaataaatttcaaattaattttctttcctttacttgaaatttcaattgatcaaatacaataaaaatctgaaaacggcattacttccaccgaccaaattttttcaaccaaaaagccgaataaaatgtttcaaataatatactatatatgtttttttttaatttattttgaatttcaaaaaataaaaaaaaaaatatattgtttatatataatttatacaataaaatatttcagaaattgtaatactaattatattgttgataggaaaatatatatatacgaaaataatataaaagtattttgttaataatatatctattattccattatagtgaatatatagagcacaatattttttttgacgtgcatagagcacaatatttaaatatatatcatttttttagtgatgtcattgtagccatttaaatttttagtctatcatataaaaaaatttctccaaataatatttaaataaataagaaattaagcaataactagctaggtaagattaataataaaatttttacgtaataaaccaaaattttaaaaaaaaaattacaaaaatatgtaaacgagaaaataaaaaatttaccttttgaatttttttatttacaaaaatattacttttttttgtaaaaacaataaacagttttttgattgttttataattaatttatagttatatatggtaagagattgattttttgttatttttttaattgttttcattttttgttaatatttttataattttaaaactttgaaaaacatattttagtatgaataaaaatttagatcgtataaaattataaataaaacataaaaataatatttttaaaaattataaaagattattaattaaggaataatgagatggtaaattagtaatttataattaattaaaaaagaatatgcttttgataattaaagagattcgagatgaagtttgttaattaatatagagagtcttatgcacttaaatacggacccaaacccttctccattttccacatcatcatcacattcttcttcttctttcttattctcactctctctctctctctccatttctcactttctctcactaaaacaaataataagaatctcaggttcaccaagctctgccattttcgaataaggtaccttcacatatgtgtacatatataataaatatatctattattatatatgcattattttcttctcatgtttctgcatttttattattatatatatagttattattactttgtaatttataatgtaacattttcgatgttcttcagcttcattatttctaaatagaaattctttttttttttttttgtaacctttttattacgtctatatttatatacatatatgtgtattccttaattaattaattaattaattgtttttatcagtacttatggtgatgttagtgaagggacattttttttttcacaatggctctggctagttttttagaaacatagacatgataattatacgatcgatttgactattatttaattatataaataaatataaatatgtatatatatatttatacaaatacataatgcatgaatgaatgtatagaaagttgccacatttggcttttatatccgtgatttattttcaaaaatattcgttactttcttttccatattgaaaatttttatgtgatattaggtaaacataattttcattttttttgtttacagtttttattattataattaattaatattttcccattactatttggggaataattatcttatatactattttaaaaaatatatatttcctgtatgagttgtttttataatttttatgtggattggtatttaggttgtttgttgttatgagtttttatataaattttcgtacaataaaagaaaattattttaaagtgtaaaaatgaaaattattattatattgatcatgacactatttattataagactatttaattcatttttctaaattgtattgacttatttttgataaatattaattggaagttattttttttaaaagctatttaggtctaacaagtaagaattgtttgtccttttggtttattttgactcttatatatattcgttttcattcaaaacctcccataacttttcaacctcaaaaaataaattaaataaaaaatggtctcaataatcttttttatatttactcagaattacttcaaaggggcgcttatcaattgaattgtcattttcttaaagaatcacatatattagtttggttattaagagttgaaaatttgagccaaaactcttgtattgtcattttcaaaattagatgattttccaattctctgtatacctaaccaaaaaaaattactatatatgtaaaataataataaagtgttataataacatgtataaattaatgttataataaaatgctatcttaagtctcaactcacacattcactattctatacatctttctttctttttcagagaaaaaaaaaaaagccatggctggcgaccaattacaagtacttacagctcttgatgtagccaaaactcaatggtaccatttcacggccatactcatcgccggaatgggattcttcaccgatgcatacgacctcttttgcatatcactcgtcaccaaactccttggccgtttatactatcaccaacaaggctcaccagaccccggaaagcttccctcacatgtctcggccgctgttaacggtgttgctttcgttggaacgctctccggccaacttttcttcgggtggctcggcgacaaactaggccgaaagaaagtttatggcatgactcttatgataatggttctttgctccattgcctcgggtttgtcctttggtaaaaatccaacttcagtcatggccactctttgcttctttagattttggttagggtttggtattggcggcgattaccctctctccgccaccatcatgtctgagtatgcaaacaaaaagactcgtggagctttcatagccgcggtatttgccatgcaagggttcgggattttgaccggtgggatggtggcgattgtcgtttcttccatcttcaaagctcggtttcctgccccggcttatgagatcgacgcaattgcttcaactgtaccggaggctgactatgcatggcgtgtgattctcatgtttggcgctctcccggctttgttaacttactattggcgt

SEQ ID NO: 19411 - DNA, 3445 bp, Cannabis sativa
tacaatacaatacgacttaatatggcattccaaacgagccctaaaaaaattacataggcattttttttttttttttgcaacaaaccaaactatataggcattactgttaaaaaatttacactgcatttttttttttttttgcaacagcataattttttttatgctgaacattataaacaacttgatatgattctgttggtcatttaaattagttttgtaaagaaattctttttttatgcattttattgaatcgacctaaatttgccaattaatatatcttcaaataaataaataaaattatataacaatatttatgtcaatatacataatgctgtaaaaaaaatatatttgaaaacaattaatttattagaaaggattgtgggggagaaaatgaaaaagataaatgtgccaatagacctactcaattgtaaaatgaagcatgtggtggaaaatgtgattctaagactcagtataacaagtgggatcattttatcttataaccaagatgcaaagagtggtatgaaaaaggaagaaagctccccttcgttcataattctcttctcctgtactagattctccgaaataactagccaaacaaaagcacccttacccttgtaatggaatttaggtaactcgttagctatattttacagatatagctattttacatggcttacccttaaaatggaagggtctcaaaataaactatcagacaatggctgatgaaatcgcctttgtctgagtgggacgccagaatgatttctgaacgcagagtaaaccttccttgtcatttgaaaaaatgaagcggacatcccattttagagacttggccatactttcaacctcgtttatgatttcaacattatctcgtactatcagcttcccttcgggccttaacatcctatctgcttctgccataacttgtcttagattgcacctgtatagaatcagaagaatatttgttttgctcaaaaaataaaagttatcaaacaagaaaaaaaaaaaagaagaaagcttagaagatatatttttgacaactaaatcaccaattaatataaattaataaacctgtctttaagcactgagaagagatgatctgcatggaggatatcataagatcttggatatgtactgaaggattcacaccaatcatgatatatcccgatcaaaccgcgctcgtagattattggcagtgtgtcaggagaatcaattgggaccacattcatcacccatattttcaaatctttaagtgcagcagcaaatctagaagcataaaattgagatagcagacactatgaataagaaaagaagatctgaggatgttgctatccatgacataatttcagtttatcattttaagttacttggcatcaaaactagcagttatccttagtgccttcagccactgaaaaaggataactatatagtagctgagctagctcacagttttagtatctccgttatctactagtgcaagcaacaggattgtatatgcaagcataaaatccgttagctcacggttttactaacaatgtagtctctaaaggattgtatatgcaaacaacatcaatggatgtttttaagaagattaattaccctccatatacagctttcatgtccatgacattcctcacagaggaccagctgattcccattccttccaagtaggtctgagagactacatttttccagtgtttatagtctgcagcaaaatcttctggtgcagctttgccataaactcccacctgagaatttaaccaataaggagctttttctagtcttgaaggccattgtgcaggccaccgagatccacgctttgattcttcctctggcacttcatgcatgcatgcctcgagtggcacattcctgctcacacatagtaaaagcagcctcagaagatagaacatttcattttctcgcagatagaaggttaactgcattaaacaaagataataaaatatactcagaaaaataccaggctgcattagggtcatcagattcactgcatagtggaggctcgtttcgtgatctatttgaatagcactcgttagaaatgggctttctatagattgctgcacccactccgtttaatctgtccttattaaccacaatcagatcccaacacattgcttttgttaatctggacattgctgttgtaaatttccacagaacaccatatatcagaagaaatccagataatcccatctccataacaaatatgcatgaaatggaaagtactgtacctttccaaatgccaacatcttcaggaagcttctgataaacaggagtagcagaccaaacaaagtaaccaccaggtcttaagacacgattcagttctagtaaaagtttaccgcctgtaatatcccacttatatttattacactttttgaattttgaaaaaacaaggtgactaaagaaactcaatagaatctagacatcaccttcaacatgccaaggaaccctacagcgtgcacagtggataagatcaaagacagcaccagggaagggtagtctcttggtacccatgacagctgatatagcagggatcccacgttcgagagcaaactgcacttgtgcttcatgctcatccttgggagcaaacgacattgccagaacatctctttcaaaaaggtaacctccaaagctggccaccccacaccctacatccaaaaccacacggcttctttttccccaagcaatcttagggagagactacaaaaccaccacaaaagcataacttgagtagtaaatattaatgaagataaggacacaaattacatgagaagaactcaaaaatgtatgtgatacaaatttgtcaaatttctgagcaggactaacatattagatggaacttcaagtactcaaaaagctagactgatcaaatacgcaacattaatgaaaatttaactctacacaagtggaaatttcaatatatatttatatacatatatactagtgacaactccacgtgcacgcgaaacaaatattatgcaatcaaacttatggtataattgaaaaaagaatcactatattagttccgaaataattaaaactcaatttacaaaaaaaaaaaaatagtataactcaaacatgccacttataaatccaacaaaagataatatctttagtataaatttcaccaattaggttattatatttggtgtgtttaaaacaagtcacatattagtatgcagtatatatgaatgaattaactaaccaagcaatatgtatagttttagttttggaaggaatgaattgactaatcctattgtgaactgtacactttacatttttaacaatgatacatcttgtaatgactttatgatccaaaaaagaaaatatttcaaggtctccaaaattcatatactatggccataagagcagctaaatacaatggtttcttgatcttggacaatgtaatatatattatatattttagtaaaaa

SEQ ID NO: 19412 - DNA, 4947 bp, Cannabis sativa
  modified_base (226)..(226): a, c, t, g, unknown or other
tttttttccagattttaagttttttttttttataaatgtccatatttttcaaaatggttttaagaaattccatatttataaaaaattcccttatcacaatgagggagtgttagctcgttaagctttcaccacctctcttatgagttgtcattattttgttgagggagccctttcccacttgtgttggaatatattttaccaggacttagatttactaacaagtatntttttaacatcctaaatatgaatctctaaaacgatgaaacttaaacacatataaaatatgaaaaatcttacattggttgcagctgaattaaatgacttcttccgctcagatttttaacctttgtattctctttgtcgcagagtataattaagatctgagtccaatactccttcagttgttaataatcaaaatatcagttgctaagtttatcaagattttaaatttttaataatacatattcaagattaataatcaataataattattaacttttaattttttttaataacacgtattcaagattaataaccgataagaattagtaacttttaaactttttaataatatatattcaagatcaataaccaataacgatcaataattttcaaaattttgtaatttttttttgataattccactccgattaattaatacatatacagtatatttagaactgtaaagaaggaataataaatcgacttcgtctctctgagaatataaaattacatgacaaagggtagattgaagtatagatgtgttgagtgcggcaaaaaaaaaatctttgattttataattattattagattttattttttatttattttttttttaaaagaaaaaactaaatcatttgaaccaatcctggactaacatatttattcgacacaaatattgatgataagattgagtgtagaattacatctagttaaaggccattcttactatttttttattaattaaggttatgtgtgtaataattttaaattttaagagttttgttacaaatatttttaacaatttaagtacaaaaaaattaattgctaaaagatccttatttagtaacaaattgcaaaaaattaattaataattattagtaaattacttttaattaagattttataagaaaataaagtatcacgtttttatcaggttacaagttatttatttatttatgtattttaatttttaaattaatcacaatcattcaatagtgatccaatgactaaaaataaatgtaaccatgatagttacatatttgatgtaaccattctaatctcctcgatatatataaatatttttgctaccaaataattcttttacacttcaagcaaatattctttctcatcttgatatgaaaaaaaaaaccaacaacaaaaacatctatatataagtcaataaaagtttttagattctttaactatttttcatacaattagaactgatcatttcttaaatatatgaaaaaacttaacataaaatttatttatatgtatagtaaaatattattttgtagccaatataatatatatttttttataaactataaactcaattatattataaaattaattttgaacttatactcagcgacgaactcataaaattctactaacgttgatgtaaaatttaaataatatatatgaataaagaaaattttgactattttggtaaaaaattaaatattatatgaatctttaaaaaataaaaagaaataaataaaatatattaatataattattttattaaaatattaaaataaaaaaaaagaaattatttaaatttaataaaaaataaattaaaaaaaaaaaaaaaaatatcagtatttaaccatgacaactcaatattgctaatagaataaaaatttaaggacttatttatcaaaagataaagtttagaaataaatttataaaaatatatataatttaagaataaatatactaaaattaaagttttttgaaggtaaatttactaaaatcaatataatttaaaacccttccgtaaaaccaaacttttgtttttttacttaaaaacttttctatgttaggaggatgagatgattacaatagtcggccccgccttctttttatcactattagaacataatggttccctcgtaatgatctattggccaaaacagcaaaatatcatataaaatagctgttgtattcggaaaattaaaatcctatagctggagattgctttaagatgataacaactatttattttatttttgaaaaaaaaaaatacattttccagcaatatatttagaaacatggtgcaagtatgtcacctacttagtgtacttgtaaaaggaaataaagaaaaaggtatattatttgtattttaaaatttgacttaattgcttcttaaaatatcttatctccaaatcttattgaagaacaatcttattaagtcttctagtgcacaaaatctttattagcataatctatatataaatattcttgacagctcttgtggcagtgcccaaacattatattttcgtaaggaaaaatacaatttattaagataaatttaggacaagtattcatctatacacatttttttaaattaataacaaaaattatcagtgcatgagtaacgtcaaatgtaaaatgacactaccagaaccaccacaaatagcagctattaaaaaatgaatgtctaaaagaataaaatgaaaattagcatttgaatgtgaattattaactcaatcaatcaccacagtagaatcactattaataatggagatggtgaacctaattgattcacaaaagtcaagcccattctagtagcaagcaattctgtcacattaacagaatattcccccagacatccaaaccactcacattctgtcccgaatcaccccaccaaacccaaacaaacccctgcccaacaaccactgaagcatcagttgcaagagcaaggagtcggtagggggcagtctccattaagcagctccttatccaattgggttgaacatagacccaatctcttgaaagggttgttatcccgaattaaaaataaaactattggaacaaattatcgaatgaagtttctaactgaattgcggactatgttgctctctttaagacgtttcgctactctacccaaagtgtacacgacaatctataaacaacgacgtccccattataaaaaaacctctgtatactttgatcgtgggtcattagcaattaaaatagatcgcgtttattgcttctatataacgtgtttaaaaaataattaattaataaataaataatatttatttaattaaataatttttttgtaaaaaataaagtgacatcacaaccaacctgccagctcagcacaacacagttggatggatgacgatgatggcgcacgcacatgtgatggtttggtgtgtgagtcctcatccatgcacacaaaacttggtgaccctcagggcccgaaaacccaagtctcaaggttacactttatatacacttccaaggaagtgttcctatcccatgtgggactcaaagcactatcgtacacttcagttctcatatttttgtaaaattttaactaagttccaacaatctcccacttgaaatttagaaaatattttctcgagcaatatcggaaaataagacagtgcttaaacaatgatatattttgatttgaatctttgcatagtgaatgtaattccaatttttatcctcttgacgtggcatgcttacgtggacaaaattagtgtcacgtgacagtacaactcaccaataagaaggaaaagtaagcacctaagcaaacggagaccccgtcactcaagcattcatcaagtgacagacctgctccctcacaagagctggtcgaccacccctagaactgcaccatggccggctagcctgccctccacaggggcctggtcggccaagaggtgctctacagggttttcagtgttcttctacacgtggactatagttcacgggctgcgaattgtgccctaaaagcccaacataatggttgaataatatctagattcaagggaaatttagttttttgtaattatctaacaaactatgcaaatgtctagggttttaaactttaatctagggtttaggcctcctatataaaggccttaaccctagcctagaaacctaagttgaatctaagcctaaaacctgcctccaagctctaagccttagtctgacaatctctctcttcctcattttctctctctctctctctcacctgcctacactagcatcatctcaacactttagttttgttataattaattcatactttgtatgcctaagggtgctataccacctatggtgatgtggatagtattaacactcagtaccaatacaactaaatggggagtaggttgttacccgctatcataagggggccaaacctctataacaaatatgtcgtttattgtttttcaatcttatttgtgaagacacgtggcaagcatccgatctacatgactgcgctgacagttgatcactttttgaggtcaatagttttgtactttcattgagagcgtggatatcgtatctcatcaaacgccacaacacaagaagaactcttgtcgcaccatattcatctctgggtctccctcaagaccacagattgcagatcaaagtacgtattcagtgtaacgccctattccatagggatgcacgtgtgtgattttataaactagactaatactaatatattaattaattattaaaaattgtgagaatattaaaaacttaagtaaaataaaagattgaaaacggatattataacaacagtataaaggtgttccgaaaaagatttacccaaaagaatatagacaataacaattaaaagcaaaattcaaaatacaacagatataaccagtctaaaaccacttctggcaattcggcacacaggccggtggggtcaatatgtacactgctagagaaggtagtcacctcatggca

SEQ ID NO: 19413 - DNA, 9134 bp, Cannabis sativa
  modified_base (1714)..(1719): a, c, t, g, unknown or other
aaaaaaaaaaaaaaaactaagttccttgcttatcatctgtgtttccaccattaattatcaatgttgattcatttcacattttcattgactacccaatacttggaacctaattatgcatatgaaacaagttcaaatcttctctaaggctcagatctaagccaaacttaattatcatcgaaacgtcattaaaaagagtaaaaaaaaacataaaatgtttctaaaccagcagaagtctcacatttcacaggtaaaaattgtgtaactgtcctcttcccttcactgaacttttttaaccgaagtaacgactcaaaagcattttcctccttttttttttctagcaatccaaacagatggctacccaaacaagaaaataaaatgcagtagtagccaacaaccacatcaaaatattagaattcgtaccttatcaaccgatacagatccgaaacgtatcaacttccccaaaatgatttgatttcttgataaagaaatcaagcaaaattaaaaatccacttgaaaccaacgtagattataagcaaagaaaagaattgtcgctcttccaagaaagaaacacaaagaaacacttcgtctgaggcaaaggtcagagagtggttgtgagtagtggactcgtcgtcgtcgtcgtcgtctcctggattttccctctagcgcgcgaaaattttctctcactttctgaggacccggaaaatatgctaccaaagaaaaaaactagtttttccttctgacactgacagtcaagagagagaaagagttaaagtgagtgttattagtggcattttgattgatttgatcggacggtccagatgtaaagatgaagaagaagaagcatgaggctattgagtagaagggaggtggtaatgtgggccccagtgggcctggattctttcatcgtcacgaatcccgggggacaaaaattggggcccacaggccgcttgatgttacgtcagcgagatgttatgattgggcctggcgtgggaattgggcccctgaggatgggactttaggtttctagagatgtttaatttaagaccaagttctttttccttttttccttttcttcgttgttcagtttatattttattttaaaaaatatttatctatttgttttggattttatttttttttcttttgttttggattaaagctgtataatgttggacttcacttgatatttcttctttttataatctctcagatatttcgtcgataaatgtgtgtaaatagtatagcagcctcattagaaatggcacccctgtggtccaattgtatattgccacgtgtcgtgctaaattatccaagattgttttaaaacgtttgtttttagccaaaatttgataagagtctaagacacatatcctcacaaatctttttaacttacaaaaatcaatatattaatagcccatctttattctttagtagctagaaatataagaagtcaaagtaaccatggtaaaagtccttcggtagggttcagtttagcctttttttcaatgacttttctgttttgtttgtttgttaaatgtgaatattgaatatgactataccagaatagcaattgttttgctattctttgtttattgccacatatgttaatccacaaaaaatatggcataattaaatgtttaacaaaattataacacataatcaaactacaagtcaagaaataatgaagatacattataataataataataataannnnnntaataataataataaggctaattacgatttttactccccgatctttgacgtgtatcaaatcatgctccctgaactattgagattattgtatttaagaacttttgtctaattttagtaaaaaaaaaagtctaaatggatgaaagttcagggggcattatttaatacatgtcaaagttcaaaagacatgatttggtagatatcaaattctaggaagcatagtttagtatataaacaataactgaaatagtaaaattaaatgaaattagacaaaagtctttaaatttaaaaatctcaatagttcagggagaatttttaacggcaagaaaagttcaggggacatgatttggtacatgttaaagtttaaggggcgaaaatcctaattaacctaataataataaataataatcatcattcatattcacgtaaaacaagtgaaacattgacaaatttcaatttgatgaattggaaaagtgaaatttgagataataatgaaaaaagaaagattatgaatttgaaaatgtaataggaatattaccaaatacattttttttctttaaatcaactatcgcacgactattgccgttttcattctgaatcttcttctactactgcacgagcattgctccctcacaagatattgagattgtgtactcttttggggagatcaacatttggtaacatacaggagatttttttattagggtaaaatactttgttattataaattaaacaagaaattcatttacaataacagagtatataggtagagaatatatttcaatcaatagcaagcttcatttattcctaaagcatatctagtcaaactatgagcagctatattagttgtatgtttgacatgaacaacatacacactaggaagaaagaaaagaagactaaaaatatcaacaattaaactcttgaaagataaaattgcagaaaagggccacttaaagaattagaaactatcaaagcatcaatttctacttgtgaaacttgtcattgcaactgaagggaccaattcaaactaagaaacattgcctttgcttccatttcatgagatgcgaaattaccaacaatggactaggagagggcagcaactacctgagcagaatcattacaaattataggaccaacccctatgatatttttttggctatctatagccgcatcaacattgagtttaagagtgcctataggaggaggttgctatgacaatgacaaagcagggtagggagagagaactgatgtagtgacaacagtagagacagttgggtggtattttgcctgtgctgatatgaaattgttcatgtagttcacagcaaaggaagtaagattgcttgtaggcttggcagtctaaccatggaccactcggttcgttcagtccaaatacaacataatgtctaaataatttgctctagacggatgtgaacatgatagtcccctttatgcatagaacaagattttgaccaatcaaagggcagataaatatgggcaccacacagcccgggcatatttacaacaaaaaagtgcatgtcctattaattcccaaactgtatgacaaatagagcaagtggagtctgtgatgacttttcttcaaaccagagatgtaacaaccgaaagatcatcatgggaactcgccacgtgaagattttaattttctgaggtagctttagtgaccaaaagtatttccaccaagaggaggctaaggatgaacccgaagaatgataagttttatcaagagaagtcccaagatgatactcgactggacagtatagagatctaaagtagtgtgatgtcaaatcaggttgtcattgttcagaaaaagtttagaggtaaggtattgttaaaattctatccacataaatcatcgaaaaatattcatcaagtcaacggtgttccattgacgttcctcagtgatgagattatccactactgcatttggaggacctaaataactgattggagagaaaattatatggttaagaatctgtggggctgatccagaattgatgttcctgcgttctccaatgttccaacacaacccatccataagttctctcgcaaaaatgatacatcaccaagtcaaagaaggagtgttgtcgtgtggtgcgttaaggaaggaattgttggggaagtagtgactctttatcagctgaccgagaagggatgaaggattgtctaggagtctccaagcttgttttatgagtaaagcatcattaaagtgcacaaaagagaaaaaactcataccaccttcagttttggttttacaaagtagctttcaattatgcaagttaattttcaaacatgtgtcattagaaccccatcaaaagttagacatcaataattcaagctagttgcaaacagtcactggcagtctaaagcaactcatgcatattgggatagattgaactactactttaagaagtatctctttttcccaagagaaaagatcttcgttccaagtgcgcataagtttccaaactttttctttaatgtcactaaacaattattgtttctcatgtcccgaatatgttggaaggccaaggtatcttttgtggtgttcacaaatgggcatggataactacctatggaaaaaaactttggctgctaaagtggtattaggtgagaaagacatgactgatttgtcaggattaagaacctgacccgaggcacgatggtagatgtccaaaactatcttgatagcaagacaagaactcacattcgcattacaaaagagaaggctatcatcgacaacaaacaaatgagagattggggtagcacgtcgagtaagagagtaaccttgaagttgtccaataatttcctcatgttgtaagagcggagataaaccttcagagcatatcaaaaatagatatggcgatagtgccaaggtgtagacattaaatttttttactgtgacattttgtagagcatctggcgtgcaaaacacaacaatgtgattttgaaagtgccaaggttccttgtttaataccttgaatttttctcctgcataaccaaaagaaaccttaaacatatcatccctatattcagagataacagcagggaatcgaccctttcaatgaccagatatttgatccaagaaggttagcttatggacatagttattagtggggacagaggcatgtaaaacatggatggacagtgaaaccgaggacaagacaacatcatcactaaaaataaacataaagctctttcttcggtaaggttgagagtagtgtcaaggcaacgcaggaggggatccatgacagcaaaagatgcagcagaaaaggggcgcaaaggaaaaatgagtggcagttatggaggggttaaacctagatgatgaagtaaattgtaaaagaaagaaaagggaaagtataaaagtttgaaaggggtagttaaaaaccgaagttagttgaaaaaatgcgcataactacaataaacccaaaacagggcacaaaatgtatcatatatttttttttgcaggagattgagctagtatatgcaatagatttcttcaaattctaaataatttattttccttctaattttttaaatttttactttattttgttaatgttttcaattttttaaataatataattattaaattctttgctttcaagatctatttatatggatatggaggaggatattttaatggtaaaattatatatgtaaccatgatggctatatttatttttagtcatttgattattattgaatggttgtgattaatttagaaattatataaaaataacttgtaacatgttaacccaaaaacttttcctagtgacgtggacatgaatatttaacacatggcatgaaggatgacgtcatagagctgagtataccctagccatagaagttaacctgggatgggacgctagccttgtgcccaagttgactttggaatctttgggatggaagtttggacttcaataacttgaatacccactatctttcaatattttgtaccatgaagacatggagcaacctaatctaagcccgagagttgaaattacacgaacttgtaacttggaagcccacttgggcacctagggtttcactcaatgcccaggttggcatcctcaactagggtttcagtttttgggaccgtcttggtgcaaaagggtcaaaaattgtattggggacatcaactaagcataccacagacatatttgatgcatcaaaatcagagtaaattgattttgagcactcgagaccctagggccccaagcacccagcacccaggttgataatctatcaatctaggtgccttccaagcatctaatcagagatctaatttttgcatcttctttgtcttcatcaaaagtatggaaataggtatttttagagaaaaaaataacacttcttgttcgaatgggtgatgcgtgtctggttgttgaagttgattcgacgtgaattgattgagagtctcttcagttttagggcattaaatgcctcttaaaagttgtacctcgagtcacgcactggcgattgagtgacactgcatgtgtgacaactgtactcttataatgagtgcttaatgttcccttttggggggtggggaaaccccaaattttgaattttaaaaggaattaatttcctcttttaggtacctataaagggggacttaaacctccaaggcatattttcatacatatttaatttcaaagaactagagcaaaaaattctttcttaattactctcaaatcttcgaagaaaagttgctggaaagtccattgatgataccctgtgagcatatcaaaaagcttagaacaggaagtcatttttcctttcactttatgcaatattcgtttaatatacacattactttctaaatttcttactgtgaatttatctgttcttgaactattcttgacagaccatagaatagatgaaattagggcttgtaattgtgactaacattctattagacctcttaattctctaactgcgtatcatttttaagttgaaatcattcattttcacccactcgtgggatcctaaagatttctagatatctttcaaggttttgaacttttggttttggaaattctattcttgaatgaaaatccttctttttgtctttaatctgcttggttggcatattaaatctatttttcaactttccatccgtccaactctcattttcttgtctcccattgtaatatctcgaaaatctaattatgaataattaggatttattatataattatgggttaattaagtagtgttgagtaggattctgatcgtgctaacttaatttagcataaattataaattttgctataagtgaataaataagcgtaattgtaatgactgcatgttagaatatgaattagtgaaggcaattagcattgattattgactttttataaatatttatgattttattatgttgtgggtcccatttctagaaatggacactagagttataatttctcaattctgaagatttttttaaactctaagagtattatatacgttaaatatgaattacacaatttttatgatttttgctcggcgacaacgaaaaatacaatagatggctgtttgagtcacatgggtaagtctagaacctttttcttagtaagataaatatttgagatgaatagaataccgaatttaagcgggattatagttttggaccattttacctctaggtttagattggcttaagtttaagtaacaagggcattttagtaatttaattagtgagatgtggtggatgtttggaagcttgatagctgaccatttgattatctcagctaaagtaaatgattttagacactatatatttagaaaaaaaattaagaaaatcaagataaccttagaaaatcccccttttttttttctctctctctcttgctcgacttccacataaccaaaaaacaagccaaccaaacccttaatttttctagatttcagtaaggtctcaacaagattggaatttgttcaaagtcaaggtaaaccctaaatcattatctttttgttatttaagcttttagttaggttttagcttgtgatgtatgatgtagtggctgttttaggttaggttttactctaaggtcttttctgaggttgttttaagtttgaactgattatttgtagctgggtttgttgctttgcttgtgtgatgagcaattttgagcttgtgagctcatacttgcatcattaatggtggagttggattctagagttgtgtgtttcttttagtgcttgaattttgttgttggatgttattctaggtaatttagaaagtttgggaaagtttagacacgttttggacaaaatttggtctgcttggggaaaactggtgcaaactggttaactggtttgccaggtcttataaaactggttaaccggtgtagggacaggtttctcgaagagtccattttgtcgattcgtgttattttcagagccttggttggttaatttcttgattcttagggtattgttatagtagttaccaatagcagaacccttagttaaagtttgggtttcttggattagtgttttgacatatcatttatccgtttacgtgaatgtgattacgacatccatctagcacgaagtttttcgttcaggttggtcaactcacttgaattcagaaacgaggtaagaatagcatagaatatattgtatatgtgaatgtatgtacgtgtgatatatatgcatgcttgttgtgatttgtacacttccaacactagcacgatagcagtactgagtgcattgatgtaaaaagtacattacggtgttacaagcactagtacggacaggtacgtagtgtgtgtggtacagcacttagtggtacttggggtaagaaacaaaccctaccaacactcgtacaatagcggtacgtagtgtatgtggtacatggtcgaacctgagtaaagaatgttcttacttatctattaagccttgtagatgggtgtatgggtacctagatccaagtcaaaattttattatttgttatatgcttttcttactgagtctgttgactcacaatcgctacctccatgtgtaggtaaaggaaaggcaaaggctgaacaggagtgagctccgggcttggatggtgattgtacatgttaggaaggtacgacctggagtcttcaatctcaggacatcttggatagtattttgtaattgctatgcgacatgtatatgaaagtattttggaaacatttgtaaaagtttaattcgggatcccgactatgtaaatatatataagtttataaagtttaataattaaatcaaaagttttaatttgacacaattttcaaggaaaatcctttgattaacaaaggtggcatattaattgaaaaattattgtaacacgcctaagtgtcagggcgttacagtaatttattaattacggagatttaattgacatatgtgaatgtaatatgagctat

SEQ ID NO: 19414 - DNA, 2798 bp, Cannabis sativa
aaactttggtatctcaccagcattggagaatctcaatgtttcatacaacagattagagggttctgttcctgcaaatggtgtactaagaacgataaacccgaatgatcttgtgggcaatgctggtttatgtggtggtgttctcccaccatgttctcaaaattcagcatttcaatcaagacaccatagttggcatattaagcatgttattgcaggttggatcattggaataacatctgttttagccattggaatagcccttttcggggctctaactctttacaaaagatggtactcaaatgggatttgctttggtgaaagttttcaaatggctaatggtgaatggccatggagattaatggctttccaaagacttggttttacaagctcagacattctagcttgtgtcaaggaatcaaatgtgattggagttggagcaaccgggacagtttataaagctgaaattgcgcgttcaagcacagttgttgctgttaagaagctatggagatcaggagttgacattgaaacaggaaacagcaatgacttagttggagaagtcaatctcttggggagattaaggcatagaaacattgtaaggttgttgggatttctgcataatgattcagatattatgattttgtatgagtttatgcctaatggaaaccttggagatgctttgcatgacaagcaaggaggaaggttgcttgttgattgggtttcgcggtacaacattgctgttggtgtagcacaaggacttgcttatctccaccatgattgtcacccgccggtcattcaccgagatgtcaagtgcaacaacattctactcgatgctaatctcgatgcaagaattgctgatttcgggttggctcgtatgatggtgaggaaaaacgaaacagtttcaatggtggctggatcctatggctacatggcccctggtgagtttcttcacttcaaggaatttctacacaaaatacttaaaatcgcacttttttttttacaattttacagattttttagttacatttttttgtacagaaaacaacattgttttcacattgcaacaacataatataatgtagcagcaacgtgaaaacaacatcaacagtctgtatttttgtaaaaaaagtctgtttgaaaaatcccatgttttaattgttcttccatgttgatatgattaacaaagctctcatttttatttctttttttcttatcagaacttggatacacattaaagattgatgaaaaggttgacatatacagttatggagtggttctattagagcttctaaccggtaaacgaccgttagattcagagtttggcgaatcagtcgacatagctgaatggacaagaagaaagattagggacaacaaatctttagaagaggcattagatcctaatgtaggtaactgcaaacatgttcaagaagagatgcttttagtccttagaatagctcttctttgcactgccaagctcccaaaagatagaccctcaatgagagatgtcataacaatgcttggtgaggctaaaccaagaagaaagagcaatagcaacaacaatgacaaagacaaaaccatctataatttttcacctgtcaatggccttgttgtctaagaaaaaggaacataaaattgagtttctttttattcttaatttgtatgtagaattgttaattgtaatttgatttgtctacacatatttgagggtattttgttgttgtaccccttttgtattagaataacaaggaaattgctttgtaagtatggaaaagaaagaaaggctcaataaaattcttaatgggaattattgtagcctaattatgtattggcttgacttgacttgttctaaataatatcactctgtatatttctgtctttcttcttttaacttctttttttttttcaataaaagtgtctgaaacagtcaagtcatggtgatgagagcctattagaaattcagattcaattgtctcttttggggaccctataatttactccatatttgactaagttttgggtaaagtcaaagttctaaaaatgaatgacaatgtcatttattatattatttgttttatagtaccaaggattagaatcctgtcttgtaacagcaatcaatggcattcttttgagaaattctaccttttaaaatgggtaactcatgcaaatttaaaagtataatttaaggtaattactattttaaccttatgtttaataaaaattactaattagactatctattttattaaatgacaaaatatattttatattttttaaaatagtataaataagatcctaaattaatttaataataacccgatctaaaaatattatgataaaattagtaatatgttttttcatctattcgtgataaaaattgtcttcaagttggttatattaaaaaatatatcgaaaattaaagttaagagtcctacttgtaccattttaaaaaacacagtccattttatcatttaacaaaacagataaagttcaatcagtaacttttaaaaaacacaagattcaaaataacatttactctataatttaagacatttgatgtcttaacgaattacaacataaaaaagagagattataatttcacagatatcaaaataggaaaagggtgttacgaagagagggagtatcagtacaaccatttttgggtgcaacctagaagcaccccattgttttttatctccattcagggtgtaaatgagaataacagtagtagtaaagcaagaaaagtactagtgtcaattgtcaaagcatgcaaaacttgatcccttgaaaggtatttaagtaataat

SEQ ID NO: 19415 - DNA, 3061 bp, Cannabis sativa
cgtacagtttgcagattttcgagtaatctcgggtgagaacattgtagccggtcgacatccgagtatctgctgcgatcacacagtaatccgctccggcgattgccacacaggatctacaaaagtcggccaaaaaatacattagacccagaaaaaagggtccgtttatgaagagaaagaagaaagcatttacccgccattgttgtcgtaaggggaccagttagcgtgctgcttgttcatggtgaagggatgagtcagagcaagagaagggtcttaggttagggcttaaagagaagtgaaattggagaattgtggtgtgacccttttcttttcttttttcagatcttgccttcggctgtctttagcttcaagaaaacgaaaatgaagaggccaaacgacgtcgttcgcgtttaagaaagagaaatactcttttgggccttaatgggccgacattccaaaaagtgaacatcctgatccgctaaaacccggatttgactttagtcgcactacagatgaatgagaaatttgtagaaatgctatatttatagttttattaaaaaaaaacatatatatgttaataaatcatttttttcctaatttatttgtttacattttcctgaaaaaaatcattattttatcttgttttcatagttatttctaaaattactttgacaaattttcatatttttaattttcttttacattgatatttgattaataaataaatacaaaataaaaatatacattttatgtaaaatatagtaattagtggggggcatcttaataattgttaacagtgttaatatagtgcccctaattccattaaacattatagaataattagtatttttatctctttatttttttacactaccaagttgtgtctcttataatacaccgcatgttttgttaataatacccctcgatatataatttttactggtcctttatatattctattcaattttattgtgagacaaatgatgcagtagatgttaattgataaatagatacaaattaaatatatttaaccttttttacattaatgattagaaaaactaaaaataaaagtataaattcttataaaaaaaaaaaagaagaaaaatcttttattctattatttattaacataaaaattttaaggtatttaatttagatccattaatcaactatcatctaccacttcactcatttcatgataaaattaaataaaaaattatatttcaaagaatataactaactagtcctataatattataatataaagggtacaacttgactgtataaaaaatttataagtcaaaaatattaattattcaaaattatattatagaatgtacaaaaactaattatcggaaagaaaataggggatatcttctaagttgctcatcaattaattgtttttgttttgataaaatcacattagctattttgggaattttttgtcttagttaataatcaaatgatggatttctgctgtgttttgaagagatattcaaaatcataatatttatgtcaacctacgaggaattgataaatttctggagctgacacagatatgtgtcgagactgagttagtagcggttaatattttagtaccatttttatgtcaaatggatattagttaattattttttcctaaatagttgattgttggtataaattaatatagcactagccataatgtacattttcacaatttaccataaaacagaaacttttttagctgtagaacccagatctgatttacattcttgtcatatgtgtataaataatcagcctaaacaaacacaactgtaacacctaatctgatgaaccagggtaaaagcttgaaacacaatcctgatcgacatctgttacttaatagtaaactatgacaatacataaatggtttgaaaatgcaactttatcgtgtaactcttggacagagagcgatacacagagaccattagaccatcaggtgcttccttgaccctttaaaataagcagcctgcattcaagttatggaaacaaaccaccatttggtattataatccccacctagtaggggaacagaactccataaacactcccaagacatagataaatcatcaagattatgatgacaagttacatacatctgtccgtaaagaatatacttcaccatctaaaggcattccatgaaattaacctgtaccttctggtggtatccaattaattgtgtatagcataaggtcaaattaatgttgaagcttccctaacatcttcaataagagcctggtctttcaggaaactctgtcaaaagatggatgagattttacaacccatccaagagctgattgatcaccaagcatgcaagaaagcattttggtattacttgtacaaaaagaaactatttgccctgcataacaagaaacagtatccactatccaggtgagagcactctattacttttgtttgttgcaactaaattgatctacaggaaagaaaaaagctgctgaagtttggttttttctaaccgtaactgcaatgagtagcttctgcagcctcctctagacatcgaggtgggaataaatagcacactatctgatctgataatctaggactacaaagtatagtttgtaggccgaaagaatgagctccgtagccacaagactaataaggattattgatatcagcgtatccccacaattcaaccactgactatggtctaaagaacaatatgcagaataataagatttagaaataacatgttatgatatataatgccaaaaaaccaacataagtaatttgggaagagctctggcagtacacatagcaatggtcaaaaaaattacacaacaaatttcaagtcctggttgtatgaaacttctctgttgttctaaaagtccagtaaattatatatgatgcagaatagagtggataatgaatataaaaattctgcggtcagctgctagttaacaggaaaatgctcacagcttgtttcatggtgcatatcgacaacagtggcatctgggtacagaataatgcgtgaaagacatacattgaaacatcaaaatacataaatatcacaagtcacaaccta

SEQ ID NO: 19416 - DNA, 3368 bp, Cannabis sativa
ataaatataattagatgaccattgcgataataattggattggtttggtcagttatccattggatttccaacaactgatccaattgaagttttaaaattaacatacgattcgatccaattatgattggatatctgattttattagatcgtataggattggatcagtcggttgtaattggattgaatgactttctgcataacccctaaattatttttgtcacaatttgtttaaataagatataacaaactagtagtgatagaaataacgaaaatataaatgaaataatgttattaattcatagaaaaaaaaaagtattatatataagtataaaaaatatattaaaaatataattatttatgccacaaatatccctataatatattaatgtaaatatatatttttataagtaattaatatgaagttagttctatagtgggttagtacaagtacttatacatattgactaaaaggtaaatagtataagatataaattataatagtaaaagatgataaaatagaaaacttggctgacctaaaatgtacaaataagatgataaaagctaccataaatagtcttcattaaagttaaacttcttactctatcatcatctacaaccctcctctctttatataaatatatgtataatgaaaaataataaattattaatttttatatatatacacagagataaaatttgagtggttacaccaaaaaaatatataaccatgataattttaaaaatatatgtatatttatatatacccatgataattacagtaataattaatttagaattaaaaataattgataaattgtccttaacctattttattttatatttttataaaataaaaaaaatatttacagctagcataaatatcataaatttttgattttatatatttaaatatcatattttttttaacgaattaaataccttaagttatgatatttccgttacttcctttttttattaaatcatattcaaatataagagtatctgtggcataaatatttattattttaaattttatatatttatataccatattttattttcttttagtggattaaatacttaaagttaagtttttacattacttttgtcattatcacttcgagaaaattctattaaaatagactaaattgacacgtgtcaacatattaatgttctactctgtcaacataattgttacatttataattattttttatttaaaatatgactaaaccactaatatgttaacgaaaatgtaacttatagtatttaatcggctagaaaaaaaacatgtagtgtatataattgtataaaatttaaaacatcaggtatttatgtcacaaatactctatatttgataggatatttaacagaaaagtagtaacgaaagcaacagaaatataacttagggtatttaataaaaaataagtggtaggtattaaagtgtataaaatcaaaaacttatagtatttataccacaaatatctttaaaaaaattaaaaaatattattaaatattttaattaaaaaattaatttatttaacttatataattgattataattaatctaaattttaaaatagaataattacttgttcgcaacctgttataataggtcatttagaaattataattaaatttttactataaatcaacttatattataattatattgacattttttatttaaattttttttgaataatttataattgctcgagatcaaaaataaaatttaaaataatcaaaacaaccttgcccaatagtatgtctgataaatttagtttcgacaatactgcataatatatttaaattttcaaatgctaaaatactataattttgacactataaattatatgaaattatattttcatataaaaactttaagttataatttctatttttgataatagagaagtctctacaaatcaaaagtggttcactctaatgtaaaattttgttatacatattaatatacacaaaaggaagaattttatttattttttattttatttttttaaaaaagctatatatgtatacatgtggaattgggtggcctattctgatgacctataacaatagattttttttcttcctttttctcattcattgaatttaatttggtcaaatatattgaaaagagattccacctcttaaaatatttactaatacctaacttgttataattaagctgatattagagcatgaccactatttttcttcctcatgcttattaattgaaattatagtccccttataataaatattcaaatattatgagtaaactgtttgaattttatttttaaaaattttaaattatttagaaaaattaaaaaatttgtaaaaaatccttattaactatattattatacatcgccgtgttaaaaaaagaaaatcaacttatttatataccgaaaatactatataaattaacacacacacagatccttattatggtagtgagaaacatttttctcattattaattaataaaataatattttatatatttttaagtcttagcaagattttttttttaattaaatattactttgatcaataataacaaaaaaataattttattaaaatgtattttgtagtaacatattatcacaatttattgaatatatataattacaaaacattttgtaaataataatcaattatagttttgtttgactcaatagatataggtttataaatatttaatcataatcaattataattttatttgactaaaaataaaattttgcctaccaagttaataaatagaagggatacaaacttaataactatacattaattttaaaagatagtactaattataaatataaagtggtgtagttataaataaaaagtactattacataataacatctatgatgtagctatatatatagctagctattagctagtagtgattgcatcattaaatttctttttaacctttgaaaaattatataaaattaaaattaatccactatttacaataacctatatatatatttatagtaattcaatcagaatacatatttggaaaattatatatactgcactacctatttttttttatattcagatagttttaaaatattttagaaattttttaaaaaatttaaaataatttcacatactaaaaataatatttaaatagtattttatagcatatgttttttttttattttatacgcatataaaataaataatttcatgagctttacaatctgtagtgtatattattttaaattttgtagaatctcttaaataattctaattataacgaatataataagattaccctatatttttaagagtgtactagtagaaactctatgcattatagcaaattagaaataacaaaaataaaaga

SEQ ID NO: 19417 - DNA, 3642 bp, Cannabis sativa
  modified_base (3359)..(3375): a, c, t, g, unknown or other
ggcaaagacatggggaatcaactatctaagttatttaaacttaataaggctggaatttaaaaaacaatcatgctttattgtgaaatccaaaagataagggaagatccttagattacatgatgtagtagtagtatagtgtaatagtagtaatagtcaagaaagtttgagttttccacaatcaaaactagccttcttcaacagcaaaccagctaagaatttagccaaacatgtatctcttatgaaagtcatcaatttcccatcactttgctggaaaaaaccaactatataagaagtagttatgagatcaaagcttctccatttcctctctttagcatacttcttcaaccccatctcaatcctataatactcttcttcatcacttttcttgttgattgattgtttcattaaggcctcagcaagacaccttgctaaaacaatgccatcttccaaggcacagcagccaccttggccgacatcgggtgtcatagggtgaagggcatcccctgcaacacaagcattgcctttgctgatgtttccccataacaacttaaaggggtttctatatgttaatggggatgacataatgcaatctagtgaagttttttcaatcacagccttaactttctctggcatttttcctaacttgctcaatacaaattgcttcatttcagctggatcattttctctacttttcttctctacacaacaaacatgtaactaattagtactaattttgagtgtacaagttattgttttgttataattaatgtaccttgttgtgaaggtgtccaagtgaaaaaccagtagacagagttaacatcacaaggcaaaacaccagatcttacaccttgaccaaagaactgcatgaacttagggtcaaatccatggcttttgttatagaaagtacagcctctaatggcacatcttcctgtaaatgacaccttccccaatcccaaccattttcccaccactgaattcactccatcacacccaatcaacacctatttaattccatacagttaataagattataagaccatttgttatacatagtttcatatattaacgagcattgctattaggtactagaagtgtctagcaattggctattgatattttataatagttattaaattagataatatgggatacaatacttaattcacttaggtggcgtttggttgggaagaatgaaaatataagaataggaatgagaataagaatagaaatagcaatggaatataatttaaaattgataaaaaaaaaattgatatgcattgaaatggtctttctttccatttcaaaatagaatagtcattctaccaaaatagtggaaaggtcattatattggaatgacattctaatactttaatatccaaccaaagaaagaaatagaatgaagattgtttttttttattccattctatttcattacgtttaaccaaacgtcaccttaatcttgtatagtaaagtattttagtttaccttggtcctgataatggttccatcagcaagatgaagaagcttagagaagcctgaatcctcaattgaaaccaccttagaagaaaacctgatagtaccagttgggagttcatttgaaagagtttccaatagaactttccttactacacacctaacttcatggtctcctctgataatatttatacaaaattaaataagtggaattattgtatggcccaaaaacaaataatacatatatatatatatatgagactcactgttttccattggccttaaatgacttctctgaggtctgaactcctgaaatggtagaagtggtagagatcctgtgaaattaaccaaatctcttcgtttaatgctcacttgttacacaaatatgtatacatattggaaaatattagtgatgttttaatgtaaaaaatttccaatatatgttgatgaaagcagaaaagtcttttattatgatttaagtcgaaattccaaaccatgttactgcacggacaagttgctcgagatgctgagtttaattgggccagtaagaactagagagatggcccaattgaacccagcatctcgagtcacttacccagcatagtacttactagagtattattgacctaattgaattgatagtatgactacttttgacattcttacattattttttcttttttatttaagtgtatatattataatgtataatttgagactttaggactactaatacacacatctttttatgaccacacaagaggtgtttgttataagtaagctcaaggagataaggtgggagagagagaaaaacaattttttgtcttgtttctataatttggattgatggtatgactacttttaaatattaaccagcacaaaaaagtaacatattattatgagaaatgaaaaaattaatggtgtttagtactctactcgttagatattattattagtgtaattaactattaaattttatataatttaatataataatttttagtcatctttaaaagctatctctaaaagctactagacactacgatgcccaataaaaatattcttttattattagtttttttttaatattgagtccacacattaaatgttaagtcatgataatattaggcacccaaaaaggaatggttgattaaaaaagtatatcgagcattctattgggtactatatcttttacaagtggcgttttataattgattagcgatactccttaaaagttattttcttaagttatataagacctgatacttaattacactaatatcgatatgatatcgagaaaaatactagacacgaataatatggatatacccatggaagagatcatgtcgttggcgaagggagtcaccaataccaactgcatctaaggccttccaagcattagtccaagctgtaaaagcaaacccagttgtcctcaaactatctgaactttccaataccaagcttctgataccctccctattcaaaacattttaattttttccattcaaaaatcatataatcaatatatataaatagaagataaaagggtcaattttatgtacctgtgaagtcctaaggaggtcgttagaccagcaattccagctcccacaatcactatatcttctctcacttccattatttttgttttcttcctacaatgactattgcaataaattgaaaagggtctagttagtatttatataccttgagttgggttttttgtttttaattgataatctataaaattagaggcttttataaaataccaaattcaatttgtattagattgaaaaatctaaaatttatacttgtaggtatgagatgttgattaacatgtaaaagtactaattcattcagtccacacatatttatatattttttaaaannnnnnnnnnnnnnnnnaatattttaatataaaaaatagtaatttaatatttaaaacttaatagtttagatgtatatttcaatattatttatatgaaatatataatctaaaacaaaattaaatattttttcataaaaatataattttttttttaaaatttgttattttttattttaatttattgttaaaacataaaacaataataatttattttatttcattgtagctatgtgaatgaaaaaatatttttttaataaataatgtagggtgactattcaatggtt

SEQ ID NO: 19418 - DNA, 4465 bp, Cannabis sativa
tatatgtttataaaaatgtaaaaattaatggacttagacacgtacaataaataaattatatatgtccaaaaaatttaaacaaataaaagatgtagaaatatgtatatatagattcactttgagtcagtactttactgctacaaccagtaaattcaattattgtgtcattttcattacagcctttgcatctttttgaaaattaatgatgtgattatttaataatattaatcaatataattattaatagcatgacaaatatgaaagccaagccagccaactcccaaagctggaaaagataagtatgacacagatgcatgcatgcatgcatgcatgactccaacgctggataaagataaaagtactacacaacaactaatactacagttaaagtatgtctccctctttctctgaatataatccaaataataataacctctactatatagcctctatcaatctcaaaagtaagacccatatagctaggcttataacgtttactatcttgaagtgggggctctaacccaaaaaaacatgcatgcatgcactgtcctcatcttaactcacattacattgggatagtacacacacaggtgtgcaacacgtccatactgtgccgtgttataaataattagcaatttattaaatcaaaatgtataatactcaatattgaattacactatggttaatttttaattattgaaaccgaaatacatcaaataagcctctaatacacattcattgcctatatatattaggcctagctatagcttcactaaggctttgagaatgtgttagtgttttcattccatgttataacagacttttactataccattgcgtttaggtatcaaaacgacacccatcaaccgtgaccatcatattccttcttcttgtctccaaatacaaagacaaaaacatccgccaattcattgggaaccaaaccaaaccaaaccaagttgtgtttattcaaatatttgtcattcttgcaatgagtcacactttcttataccattactgcaaaaacaacatgggaaattgactatttgaccaacttgttcttatttaatgtttctcttgtcttcttacaagtggggtcacccctagacttatttaaaccccattttggggtagttgggggagattgtattgtatgtctctaaaactctaatagcataaacagatgaatagtactaacatatagagctggcaatgacttttgactttggaatatgatcttcatacaaatcagagaagtacaatagacactcctttaataccctttttttttctctcttttttccattatagagtatgtacgaaaaagaattagtatccctttcgagtaacaatgaagctgacttgaaaataagcaaattaaaaaaacagtctcaatgcactttcatactcttgctgatgtgcaactattagctataacgcttactcattttcttttttctttcttttttctgagtatgtacaatgactgtagagtgggggagaaaaaaaggagaaagaacaacccaatgagtaatgcttcatgtcccacaaagaagaggaaaggaaaaaacagaaagaactaaggaaatttcaagatatgtagatggttggacaagaaggtattgggatattttctactgaggtgatggaaatcgatgatgtagaaatgtgggggtgatacagttctcattactcgactatctttgggcctgtgtacggtgctccacggacggctaagccttcaggtaaaatcctctcttgcagccatgcgtaattttctttctgctcttcttccccttctggcaattttactccttcaactgaattacaatgcaaaatcgatggatgagagttaggacaacacttttccccctacacttttgagccttcagtgtaaaaagatttacctgaaaactctgaaaatgggaaatcatggtagtacgtgcagtgtcggccatcagggtcggaatatgggggaccgagtacgtctagcacagcacacgcagtcactgctgtgaagcgatgcatgttgcctccatcggctggatagagaatggaagcgttgcaaggggcggtgaagtcggagtcaaccttgatttttgccaaccgggcattaggagtggtgtctgcataacaaaccagagtacgttcagccaacattttaccttttcttttttcttcttttcggcaaacatatagaaaggacatcatcgaaaattcggacaaaaacaatattattttcagcagatgacgcatgctattgtgtatattttatctatattcaacactttagctcaactctcaaatcacaagttccaaagtttgaacactgaaaacttacagtttataaaaagaaatgatgaaacaagtatgctatttcactaattaaaaactacttaacataagctaaaaagggatacagaagaagtctccaagcatgtacaacaacttatgaaacacctacattccatcaacaatttgaaaagatgacagcaatatatgattaagttacctggtgcagaatccccattggccaccgccgatgtgttactaggaccatcatccacccagtcgtacgatttgatgtgcattgtcccaaataagagcttgctaaaaactgtcattccagggtgattgtggagaggaatgacacccgatggcggcaagcaaaatatccccatctgcaataggagaacaataaaataagaggatatacatgaacaaacataagaaacaactgagtatattcattattccacagtgatttcccatgaataggattcacttacagagaagttttcgcactcatagaggtgaaggtaagtaattgctggtgttctgcttcttaacaagggattgaaataaagcaactctggagtcaggccaacatcctcaggtttcatatcatctgccataatagttaaacttataagcataaagctcaaacaagcttttcataaatttgttcaccattggatagctacaccaaaaaaccaaaagggaaaacagaaaatgaagcctaatctgaatgcccaagcgaaacagagttcataccccttccccctatgaaatgagagtagtgatataaaaaacagttatatattgtgtttattgtgcacatccacaaaatatcaattaaaaatctttgttttgttattcataagcatatatctctattaaaaaattggttaaggatagtgtacgagaaaacagacacacacacaaaacaaggtatttttttaatcagaacagccaggtacctaggatatcacatacaatatgctatgtatatagcctacaaaacataaaagaatatataaatgcattgaatcatattaagagagccagagatatattaaaaaagaaaaggtttacgctacaagaccataagaaagagaatccgaattgaaataaagtgaataatcacaacagtgaaaagatgaaaccaaaatttgagctggagataaatcaatactactaatcaagaattatggtcccaatcaaaatctgtaaccacaaaaagtaaaaccctcaatctaaagcatcaattttttatggaaagatcaaatcccaagacaaaacccacattgacaaatatattcacagtttcttaaattttctgtggaaagcttaatttaagattttgaatggaagaaatgggtgagtaaagcatacccaaaacagaacgaaggcgttgaatatcttcagaaggaggaacaatcccagttgaagcagaggcaaaaacttccttacaagtctcgaatagcttctgaaccggcgacatcttcttctgtctccgccggctcttcctggttttgttatttgaattcgtcactttcggcaattcacaaaagtcctttcctttccgatcagccagagccgtctcaatccccattcacactcaaaattccagctttaattactttgtttctctgttctttccttaattaattaaaatgaagaaaaaacccaatacaaaattaacgatctcaggtattgaccccctaaaaataacaaaaacccaggattttcccgagaaaattacgattggtgggtggggcaactagaaaacgaacaaaaatttcaaattcctatctggggtacgaaacaaaagctcgaaacaacccggtaatagccaggggaagaaaaatatagagagagaaaggttgagtatagagagagttagagagataaggggggtaccgttttctagaagggttttgtacagatgtagaagagatagtaaaaagaagacaaagatgtgaaatttggtatctctgttgatgatggtgggtgaggattgtgagaagggggtataaagggggacaaatacaagacctagggttagctgaaagcaaaatacagttggtttttcgggagagaaaaccaggggccatgcttccctttccagtgggctattccaacagcggattttcctctcaataaatctccctctctctctctctct

SEQ ID NO: 19419 - DNA, 4554 bp, Cannabis sativa
  modified_base (353)..(354): a, c, t, g, unknown or other
tagatttttcatttgttttggcatctagaataataatttagtataatttatttttaataatttacaatataaaaattgtgtttaaatagtttatttcacatgattataaaataaaataattatatgtgtaatatataatttgaacactattttaatgcatgtttacttaaagggaatgagaatgaatagtttggtattgattcccatacaattgtttactaattgtttactaaattttggaaaggaaaaactgggacccacacaaattagggagaaaaaaaggaaaggttcaccccatttttatagggaatgcctttgtctttccttatttaatttattttaattttaatttnnttaattaaaaatgaaaaagacaaatataacccttaaaaatctataaacagaaaataattacatattctaataatagcaattttgtcaaactaaagcattccgattaccttttctagttatgtaaacaaaataatatgattttggttttccttacggacagtttagtaaacatcataataaaatattgtttccgattattttctattttaaatcgatacatttctcccattattctgattccaattccagtttagtaaacacgcttatggcgtgtttattttattttattttttttgaatttttcaaaattttataagaagttttaaataaaaacgtatcggtacacttattttaaaagatattgtagaaatttattatattatattatactaagagtattgttattgagcatcggtagtgtccaatactttttatattgtataattaaataacgatattttctaaaaattattttttaaaattatatgtaacctactaattaattacactaatagaatatgatattaagaatagtactacaattttataattcttttcatcaatagaaaaaaggtttttttctcacaaaaaatttctaccagtcttaactgccaattttgtggataggtacaaaagactcagaatcacgtgtagcatgaaccaccgttgtctctcgttgactgtacgataaaaccattggctgccgcagtttcacgacacgtggcaaacttgcacggcgttttctagttcttcaaaagagttcacttacacttgaaattttatcctttctctcttttcttttttgaaaattcttcaaacttattttgatgcctcaaaataatgctcataaaaaatagcgtaattgatcaagatggacaaatggtatccatacaattttacagtttaacttagtggaaacttcactcccattcaaattcaaaactaatatgaatagtttgaatgtagtagttttttacaatcatcaatactcacctaaatgcagaaagcatagaaaaactaatatgatttgtttgaagacaaactaaggcaatcggtctcaagcacaaacgaactccaccattgcattttgatcaagctaagagcttctcggatctcgatggcctcaggcactactggatcaatagcaccttcctgaaagcaggcatgagccaccacaagacgcccataacggtccgttacaacccagccaaacctttcttgcccttgagcttcaaacaatgctgtatcaacattatcttgagttctagcaattgaggcttaacccgaaaatcaacaccatttgccatgatataagacgacaaatgtaagttactgctgcaacattcgaattttttctgttggttaaggtatctttaaatatatcatctacctgtgtactgttattactcaaaactagcacagaccaacaaaccatggcaatctcacacagctagctttaactaacccgagcactaactcgcaccagccaatccatgaaaacaaccagatccgccaccaaacatcctgctgttatggagcagaagactgcaaaatagtttcgtcccaaaggtttaaacatcggacactcatgctgaacaggcgcatgcatgagatgcaactggcactaaagattgccataccgaatctttggccttacggagaattgacatatgtcacatggatgcatatacaaagtacaaagtcatgtagtgagatagaaaaatgtaaaagaaagcgtttagcatttctattagcagtaattagtactaaagatattgtaagtatcaacattaggcaaaacaaattggaaaaaaaaaatgtcactcgagaaaaacagcatagaacactattatgtcctttgctgaaatatgtattttcttctttagaaacaaccaagaatttcaagacctcttgagcagagcagttgagttgttacaattaaatttattgacttttccaatcaagtttggttctgtaatcattcaaactaaagtttatattactataataatttaaactatatggaaaatcacagaaatttaatattatttccttcatattttcaatattacttctttctttcgttaagggttaataagaaagagatcagttccacctcaggcgaactgtatcaaagcatagattttcaactagagttcatcttgcagcaaccgattcatgactcctcgtggcggatatattgaacaagtttagatctaacctctgagggtatccggatagggcgatagtttttatctaaccaaactgctgtggcctgtgcctccacaatacgctgtggataatacatgttataatcagtcatacagaatgaagaagttcctttcagtgatgtcatttcaaagaagagaaagttaaaaaaaaaaaaaaagagagagagatacctcttgatttggcagcttcaagatgagatgctcgatatagaagcgagctgctgaagagccagatatccttaccttcacaacaaacttgtctccactctagtgaagcacagcaaggtgacataagtaagagttatcttgtagaaagtagaaaccctctttaacagaaacactaagccaggacaaattaacattaaacttgtagattaaacccatcattgaagaaaatcaaaggctcaatagttttaaagcattttgcaaataaagcaaaaacattaaatagacatactcttagaggtgcaaggaacttcaatgacaattccgacaatgctaatgcatcaccgctgcgagcaactgcatcacagcttagaccaagactttcgaaaagctcatgacgacctatttaaggtaaagaaagaacaagacagataccacaaacgtcatatataaagtataaacagcagaagcatagcataaaggagaagagaggaggaaaacaaagtaacaaatttggctcaaagtatttaacaaaatagaacttattataaacttttcatgcctaattatctagagaaatgttaactataagtaactgaaacacatcacatagggttttgcaaattcaaagaataattcattagggagtgtttaaacaaatcttggttcttggattattctacttctcctacaatagctaacactaacaggacatttattaaaatctttatacgggatttgaacccgagacctcaaggttatgagccttgcgcgctaccaagctactctaccccgcgctgacaatgggaaccaggggtaaacaaggattgaatagctcatttgtacagaaaggtaaagagttgagccagaaaactgaagacaaattcatactactcaaaaaaaaattgtaacttcatagttgaatttgataatgaagaaccccaaacatggatcaccaaactaaaagctacaaaattgtgcctaaaaccagagtatcacattcaacaattctgctctatcaaactatagcatttgaatttgttacacttgaaaaatgatcaaaaaggaatgtatactctctaaaccaagaaaaaatgtgtaccatgttggcaataacttgcataaacagcattgttcacaacaccatactgatcaagctcataatcacgaactttaagctcaatttcataaaactcgttcattctgcaaaaaaaaaaaaaaaatcccaaaatattgaaaccctgaatttgaaattaaaaaaaaaaccaaataaagctcggaaagaagaaagcaatgtaggtaccctttgccacctctgacatcgaacggaacggaattgcatgaggtcaaagtcgaattggggaacgagcggagacgaggcggagtgaggagccgccgagtaagtgggaaagcaagtgatgaagatgacgaaaacgaaggggaagatgaaatggggcgatagagaatcggagccgcgtgaggattgtaggaaggagacaaggtgagcaacatgttggattgtaattgtcgccggaagtagaagtggatgatcggtcggaataggtccgagcaaaagtgtatgtaaaggctaagaaggtgcctttgttattaacggcccaactaactctgtttattcatttaatgactttaaagtctctcccaaaaataaatatttaaactttatgggcggacttacgtagactcgtagaggccagagtgttcctaaaaaaaattgaaaaaaaaaaaaagaatattatgtattgtagttagttagagatactaccctaactatactctttaaata

SEQ ID NO: 19420 - DNA, 4618 bp, Cannabis sativa
  modified_base (4428)..(4428): a, c, t, g, unknown or other
cgattccaaaattagacaaaaataggaaaaactcattgcttaaatattaatttttcttttttgttagacgtaaaaaaacaagattttaattgcttagtaacataccaattattaactggctaccatattataaaaagattcactatatgaaaatgatctcatattcattttaattacttataaaattatggggtctttttcaaattatattattttgtcttttaaaaaaactaatgagtttataataaaatacaaatagttaatttattaccaaaatttatactaattagttaattttaggttatatagtattttattgttattatttaatatacattttagtaataactttcaagtttattttggaaactaattagttactataaaatataacaagttactatttttatttaatagttctatttagtataaatacatgttttagtaacatatatatatatggcattcagataaaatataacaataataaaaaaaaacttacaagttccttttagcaaatagtacaatagatacttttgaagcttattaatttaattttttaaataaattaaaagcaactacaaaattatttttcatatataacataaattaattaaccaaattatatgagcaattgcaacggtagaatttccctaacacccaagatcatcttgggttgtgtatatcagttttagaaaaaagaaaaaaaaaacaatttaaaaccatgatgaatatattaagtgaggtcgacaaaaatgtgaaagagcaaagttatttgggcgtgcaaactttggtgtattggaaatcagcaccacatgcttagtttgtacacaaattcagtattttgattcttttggatttaccgtatttttggttttggaggtttccaaactccgaagagaacattcataaaaaattcaagtacaattgacacggttatcaatatttatccacacctgcccataattaaattcaactcggtttcctttgtaattagtgaacttaattttcttttcttttttgaaattaaaattagtgattttttttttttgacaaaatagtaataatttaacagcatctccaatggtactttgagaaaaagtgcttaatactaactattagagatagttgtgtgtcacattaaaaagcaatattataccaaaacttggcattgatgccatacttttttttttttaataaaactaaaataaataatattaaataataatgtatggcatcataataataaatttaaagagtatttattattagaatactttaaaagtaagagtgtgatgttaaaaatatagaaaataattaaaatattattttttcaataatgtggaaacaaccattgaagatactctaattagaccatcttcaatgcactattttggtctacattttttttttcaccataagaaaaatggaagaaaccatctttggatagatataaagctcaattagtttagtagctaaagaatataatcaacaagagggtattgattatacaaaaatcgattaatgtcaaattaattttggctctagcaacaataaatggttggcatctccatcaagtggatgtcaacaatatatttttacatggagatttgcatgagaaaatttatgtgactttaccttaggggtatagtcctataataagggggagattctacctcttaatctagtgtgcaaactctaaaaatctctaatggtcttgaacaagcctctaggccattgtttgctaaattttcaagtgtttttctttcttgatgaaggatacacccaatcagtcgaatcattccttatttactaaacatatacttatgtcactttcacctcattactggtataatgttgatgatgtgatcattaccagtaatgacattgctaaaattgatgcactaaaaacaagattaaatgataggtttcaactcaagaacctaggaaattcgaaacacttcatgcgcattgtagttgctcgaacaaataagaaaatcctattttctcaaagagcttatgcactgcaattgcttagaagagtttggcgaagttggatccgggccaatcaatacggcctataaagcctaatttgagacttgacaataaaaaatgtgagatactgcctgatgttcagaaatatcgaagggttgttgcgaaactttagtaccttataaccataattagacttgatatgcagtagataaattgagtcaatacttgattgttcctcgattacctcacatgttagatgcagaaagacttttacaatatgtaaaaggaagtcctgtacatggaattttattttctacacattccaaggttcaacaatcactgcttacacaaatttatattggggctcatgtcaagatacacgaaggtcaacaataggtttttgtgtctttcttgacaagtttcttatctcctgaaaaagtaagaaacaacaaatattttttaggtcttcggctgaagtagaacagggtcagcccaagcattgggcagcttgggccattgcacaagacccctaattttttttttttaaaaaagaaaaggcctatttttcttttcctattatataaataaaaaatttataattaaaaatttatgaacgaatctttaaaaaaaaaaaaaaagctagtaataaaattgtagttttaatgtacacaattttttttttgtaaggagcccaattttaaaattttgcacaaggcccccaaaatgcttgggccgaccttgaagtagaatataaggctatggctaatataatatgtgaaatcatatggctcattttcgtgctaaaaaagctcaaacaagattatcttattgctgtggaaatattgtgtgacaactaagctgccgttcacatagttgccaatccattttttcatgagcgcactgagcatattgagatagactgtcatgttgttagagaaaaagtctgataggaatcctcaaaacttccaatatctcaactcaagatcaaatgacagatttacttaccaatgcaccatttcctaaccaactaaactacctcaaaactaaatgagtttaaaagacatatatggcctaacttgattagaggaagctttagaatagcttagttggtataattctattatagtgctgctatgcaagtaaggttgaccctgagtttgaatatgccttaggaaaaaaaattagatttttattataagaatgaataatatttttaaaaattatttaaaaaaatatatttttaaaaagatattttttttttatttaggcccttaagattagtggatctaaacacgggcctaacccttagcttaaggctctcgttaagattgatagtttatgaaggttgtagttacaagttgtaataattagtaactaattgtttctttgtactataatacaattgtaataatttattttacaatcaatgagaatatacatttttttattattattgttaattagcttatttgagatagaatatcatacatcttaacctataccaaacctttactatactttctccatcacatttcacagcacgatcttcaaactaagccgtgtgcagttcacttcagcgagcatattaacattttaaacaatgaatactattttgatgagaaattaacagtttttttttctctatgtctctctcattcaatgtcacacacgagttgccgctgtaagtcaaattccaattttcacagcctctattgacttctactttttttttttttttttttaattcaattctaaatgttgtattaaaatgaaacatcagtaattctcatatcaataaattacatacaaaattcatagtgaaaatagttatttacttctaatacttcgcaatgaaattccctttttaattaaaaagtaatagtactgtattaggatatttagtttcttattaaatttggtcactcaaaaaaaaaatattgtgaaattttttcttttgaaaaattattcttgctttagcatatatagaaatgacatataatttaaacattaatgtgcaaattatatacattaaatttgcacctaacaacatcaagatataacttactgcatatttacttagccattttcttttaatataatattagagaaatgttaattacaatctcttattataacttcttagtcaatttccacgtccgaattcacgtgtcgaaatattttttttaaaatttttttttatagcggtatttgttatagttacagtatcattcctataaattttttaaaaattccgaatagtttacggtgcgtactaaaaatagagtttctgatattccagtttaccacgcacgttcaaaaaccttcaaacgtattttcgttactataaactattcgaaatttttcaaaaatttacagggatggtgttgtaagcataacgaacacctctctgaaaaaaaaaaaaaatttgaaaanaaatattccgacatgtattttcgattaactaagaagttgtaacaagaagttgacaatagcactccttataatattatattgaaatttttacaccaaaaatacaaattacacactttattacatataaacctacacacggtcaaatcaacttttttaccttttctcaatattttattacacatataccaca

SEQ ID NO: 19421 - DNA, 3882 bp, Cannabis sativa
acaatacgacctaatacggcattccaaacgagccctaaaacgacaatattacattttgttttgcctttacatattatatttaaacgacatcatattgttttgcctttagatattatatatttcttttccaaaccttttcaattagacttttttgttaaaaaaaatgaccttatttatgtcaagtaacgacaaactgtcaatccttgaaacgacctgtcgtatttttacattacattcagagtcagagacataaagtagcaaaataataataataataatgatgatgaactaggtagatgacttttcttgcattgtttgtagactcattaaaataaaaatagtagaacattttctaatttaaaagaaaaagtccaaaaatatacacacacgagatgagtgtacatacaattgtagtctgaaattgaagaaactcattcatatttatcacataccacagatacaaacgaacatagaagacccaaaactaaaccaagtgagaccagtcaccccctttttttgagctccatttttaacaagagaaaaaagaaaagatagtaaacatgagatatctactaaaatcttaatggttgatacaaaactttgttgatcatatatatgatatgtttactatcaatgaatgaatatcatatttccatatctgacttacccatagcattgtttgttggcatcacaaggcaacggaatctgtaagtaagactgtatgtaaagtgtaaacaaagatgaatattaaagtacattagacccctatccacaagaagaaaatctcaccaccattcactatcaaaatatatgttcccccacctatattagagacccaccatcatcaaatgaccaaggatgccaccgtgaacacggactggaccagacccaactgttttgtaaaacagcctcatcttcacttgctcagccagtaaataaatatgagaaaagtgcacacagatgcaacaagcgagagtatgatggtgtccatggacttttttctctttatcgaagaaagaatatgatttacctacaacaatcaagatatgtgtaacactcaattaggaagattttcttctcttcctgctaaacatgctcaattccaatatttgtagcctactaacattttcttttaaattattttttttagttattgattcatgacatgcaatacaaacccaaaaaagaaagaaaaaaaaaatcatttacgagctaatgtgtaatgtgtgaagataatacttctgttttatagaaaattaaaattataataattgaaaaacaatgagcaaagttaagttccataccgttggcaaacggctgccaatattgctgagcttcgaattgataccaccaaaagttgatcgttgcatgacaagagaaccaagtgttgcttgagcttgtgaaattacagtatccatctgcaccaacagtataaaatgagagaagttagcaacttaatctcaagccaaagagcacttcgagatatttgttgtcagaatgaaatgattaaatatagttagtaatctatagtacatataacccatatcaccagaaagaaagggggaaatgaaaaagaagaaaatgataacaattgagtttcaaataaaaaaaatctttcagaacagtaactgttgtcttctccttacaattaaattagaacaactaacaagctgagatggccaaaactcagccaccgctagcaaacccataacagattttcctccatgtcaaaaaagtaaagatattctgtattgcctccataaaaatcctcatacttacaaaaacccacaacaacgattattatcacagattttttttcttaaattccatttttaatgaaacaaattccaccaaaagagctgatagttatcaatcaggggaaaaaaaataagataatgtaatgaatatcatctatactcacctgccctgtacttcgactaatagatgcatgctcttttagaagaccttgctcggcagaaacaccaccctcttccaagtctaatcttgttctatcaaactctctaaaaccatcaagaagcgaggcatgttctttcttagccctgaggctagagcggagacgataaaactcctgcacttcaatcacaattaaaaagaatttaatgtctagaggttcatttcttaatcataagccaaaaaacagattttgaaagacacaaagatcactaacatataccggagccaaaattagtgtttccttttaaacacaacattttacaacaacaaccaaggtaatgttaataaattaaatgaaatagatattaaagctcattgattaattagacatatatatgcccgggatgcatgtaaagtaacctcaagcacctacaagtcctttcaacaataaattacatacgagagtataatgcattccatctatgttacaaaaaaacaatttaaaaaataaccgtacctgagtgagatcttgaagaatttcttgatgcctagtcaaggtatgagaaaccatttctgagccagccgaagaaacccaagcttgcatctgggagttcacttgctgaagctgctttagtagccggtcaatcccagattcaagatcattatctttagcctcaattttagtagaatcctttgaagaaaccaattttcgataggaattcatctgctcatctaactgagcttccaatttccttgcctgatatgatacacaaataaaaggatcaaccacagctcaagtcccatgatatcaacaaccaactcaagtctatttacatatcaaatgagcatataactctccaagtcattattagagattgatcagcataacatcaagttagtaactcataaaattggaatgcaataactttatttttaactcgtttgagcaaacctatcaaccatttctttcgttccaacaccatccaaaattcctaacttcaactctcacgtacaaggtaactatcaacacataaaccagaaccaaaatacaattcaatgttgcagagatctacctgaaaaatcttagaccaataaacccaattcaagtttcaattttttcgcgatttacaagtttaaccgtatatcatgttcattactctatagtttttgtccaaaaactaagtaacaaaacgttcctaaaaaaaaaaattcaaagatcgaattcctaaaaaagaaacgaatcaatgaaatcaattcaatcccccaaattctctcggtcaaccaacaaacaaacggacagtaaaatcttcagaatccagaatttccgtctctttctcataaaatcctcaaaatttgtatcaataaagaaattgaagaagaagaagaagaattgacctgtttacgaagggcgtcccatgatgagcttgagacctccatggacaccgccgacgacatggatcttccgaattctttgattctagagagagaaagaggagcgagagagagagagagagagggtaagggggttgtttggagacggagataggagagagggtcccaagtccggtctcaacggcaatttggcgcagttgagttgtacgttgcgtgcgccttaatgcaatttacatttctcagatctccacaaaatacctttcttctatttaccattttacccttcacatcttactctttcattgtacttttttccctaaaatgcccctatttatttttgttattattattaccgacgattatgtaatttgaaagcaatgtacacagctggcatttatttttataattaaattactatttttttactttgactattctcgattgggcactttcggtattgtcttacatggttaaacgatatgtcgttttcgctgcatggagttgaaaattaacagaattaaccgtctgtaatgcttacgggatacacatctatgtcaatttttttctttttttttt

SEQ ID NO: 19422 - DNA, 6166 bp, Cannabis sativa
catcccaacgcaatagacttccactttcaacttttgataggttttttttccccgaatgcccccgattggagagttgtggaattcagctaatatgatcttcactaaaggggatcccttgggaatcactaccactgccctcgcatcctttacagtgaaccccaccagattcttcctatactgaatgtcttgtctaatgccctccaggaaggcatctttctgaacctcctcttgcaattgttcccagtgctgccactgaggaatatttactccttaagctccatacaagctaatttccttgataaagcatcaacaactttattactcgatccaggtttatagaaaatttcaaatcatatgtcataagcttggcaatccatttttaatactcgttaccaattactcgttcaaggagatatttcaagctttgttgattcgttcggacgacgaacctcttacccaacaataggctaccacttgtttatagtgaacacaatagccatcaattcgttttcataaatagattttagctttcctcttgggccgagaatgtgactataatatgctattggtcgaccctcttgcattagcacggccccaagaccatagcccaagggcgtccgtctccactataaaagtttttgaaaaatctagcatggctagaactggcacagtaaacatagcttgtttcaagtcaagaaaagctttgtttgccccctcattccacccaaaactaactcttttgagttgttccattaaaggccaaacctgccacaaaccttcgatagtatcccgtcaaacccagaaaacaacgaagctcccttatgttttgtggtacaatccaatctctcatggctgccactttgctcggatcagccagccacagcttgaccaaaaataatatggctcaaatatgtcatatgtcgctgcccaaattcacactttttcctgttagcaaaaaacttatgttgctaaagcacttgcaacactatggaaaggtggtgttgatggtcctcgctgtggctaaacaccaaaatgtcatcgaaaaagacagcacaaacttcattaaatatggtcggaataaatagtgcattattgactgtaaagtagcgggagcattggtcaaaccaaaaggcataaccaaaaactcatgatgttcatcatgagtccgaaaagcaatctttgggatgtcttattcacgaattcttatttggtgatacccctatttcaaattgagtttgaagaatatttgagcctcatgaagctcatctaatagctcatcagtgactggaattggaaatttgtctggaacagtagctcgattcaaggctctataatccacgcatattcgctaagtatcatcttttttcttgatcaacaacatcgaacttgagaaagggttgtggctgtctcttatgattcccgcttgcaacatgtttgaaatttgttgttcagtctcatttttctgacattggggatatttataaggtcttacaccaattggagcagtgccttctttgagaataatggcatgttcttaccctcgagatggtggtaagccttccaattccttaaagacagatgagtgttgctctagagtaccattcaaaaaggttggaatagactcagttgtagcttgtttacactctaccaatgacttcagacatctcttgtggccaattttcaacatattcttcagagtcactgaattttttcccattggcggctcccccttgacagtcacagtctgcaccccctttttaaattgaaggatttggtgcttccaatcaattctctattttgcccaaggtagtcaaccattgcatgcctagaataatatctgcactgcccaacccaaaaggcaaaaaatctcccactatagtcaacccttgtaactccaacacgatctccctacaaactctctcatttttaatcgacttttcggacccagagtcaccccattttgcccagttttagttattggcaacttgttcttgtccactaaatcttttgaaatgaagttatgagggccccaaaatcaacccaaacagttaccgcttgactcccaactatccctttatctttcattgtacttggagtttccattcccgtggctgaattcaatgaaacctccaatgtccctataatctcagcactatccagagctaattcctcttctccgttttcctcagtatttgggtcctcctcttcttctcaagatttgatcacattcagttctttctttgcacaatgatgtcccgaatgccacttgttatcacaacgataacaaattcctttacgcagtttctcttatgcatccgcaatgattgattggcgaaactggcccattggtttttgttcattgtttggattcttgtcccttttcttcaatataattgccgttgcccctgtaattccccaaatttgaacgattctggaataaagattagtcttgctctcaatcttgagagcaaaaactttattcaaatccccgggttcaacctaagtcatcctgaatgcctctctttaaatcattcaagaattgactcaaagccattacttctgagactccatccaatggtgctaatgactctaagaaaccttcactgtaattctctacagacccttgttgaaacttaagaaattgttcattgagggatcctttactgatgttttggaatttattcaatatgaggagtgtcaaatcttcccataatacaattgagcgtcgcctaatttctcatctgtaccaagagccttgtcctaaaaatttaccacaacagccttaaccttctcttcattattgtaacgttgtagagtaaaatatttctcagctcataacaaccaaccatcggtgtctacgccttcgatgataggtagttccaattagcggaagcaaaattcccgtcgagggtccccatctgctttcgttggtgtagatttcgcaaaacccggcggcgtttcttgaatcggctttgctagacctcgtgatgtgggttgactggagttgggttctacggtttcggcgaagctgctcccttctatgattcgactgcatggcctttaaatcatgaaaattcatccttgaaatgttgaaggttgtctcgggctaaccccactttttcccggacgtttgccacttcattccgcacagacacactctggttgtccctcttctcttccaactctgacagatcctccaccttttcttgatcattcttggacggtttcttgggcatcgttccttcccattcgaccagctctgataccaaatttgatacaactctgttcccgcagcaacatagcaaaacagaaagaaaagagaagaagaataattttattgatgtatgaagaaattacagaagattgttccaagctcttcgagtggcaagggtgagtccttgagtatattctactcctttacaattcaatcataaaaaaaaaaaaaagagatgaaaagaatattctatttgtactaaattgagactaagactaataaattttgactgccatatcagcaggaaattcatcactattaaatgccacgtgaacaacaaatttcttttcaattacatggcttatttcttatttcttctagtagtgtaggtcttaattgaaagtataatagatagtcaagtatcactttctatacaagtattagcacaattcgtttagttgagagaggaaacttccttcatttgtatgttggcaccatttttgttttttttgttttccattgatttgggctattgttgtttggtaaggtttccatgtgatgaatttattatgacaggtggttgacatattgggagacaaacttggggaacccttgaaggtggtcgttaaaagagccaaaaataatttagtgactctaactgtgatccctgaggagtccaatccggacatatgataacatccaacaccaacccctcttttttgttttttgtttttttacctaatactgaatagaataggtactttctttcttgtacctttcaggaggagtaacaaatcagcttgccaagaaaagaagcaagctttaaagttggagggtctataatttttgccttttaaaactgtagattcataccaactagttcagcttaaaatcacatgttgcacacaaataaatatgaacttctataacaattttttgttttttttttgcttctttctttcttgtttttctaacttggattggatgaatataaacccattattactcttctcagaaatggacccttcatcagctaaagtgctcaagccaaaaatgtgtttttaattctctggctatgaaaacataatagatctaaacatgtcagataactctttagcttttactgtttcctgaaaaaatataacaatgaagaactagaaaaatagtaagaaaataaagagaaaaatactctgatggttcatctagaagttggctcccatatttcgagcaatctagaagactacaatactgaagttttacaagatagttttatcttttatatttgcaagagtaatagcagtagcgaaatttttaaatatccaatgccattagttattttttaattaacttcattctaagtagttatgtttgtcaattattggtccattagttagagctggtcaaagttcattcttttactcttctaattaccatatgtttttttaggattcgtttggtatgccgtattacaccgtattatattgtatagtattatattaaattgtatttcatgcaataaatttatgtaacacaatatatagtattgacttgtgtgggtacataaatatataatatttagtataaattaaagtttaacatagtattacatgaaaatatgatatataatccaatttaatataatataatacaatacgacttaatgcagcgtaccaaacgagcccttaaggataattaattcactagtgtatttttaataaataatccaattataaatttgaaattatttaccgagatttttggaaatcgattataaaataatcaagcttaagaaagaaataaattaaagtagaaaattaagattttacgtgtgacattaatgagctttagttcagttttagtccacaaatcaatattattgagcttgaaaagtttcaaagtatctttacacaaatgttttcgccctagatgaagaatcctaattcttagctcttagtagtagaaaaatgatttctctaccaatctcattgcatgagggatcatgttctatttatatgctagaaccaggaatgggtgagtccaaacctgataggatgtagaggtgtcaactaggcccactgatgggttaaaatacaatacttactaactttaggttcattgggtgaggctcaattcacgagataatggtcgtccgtacaagtggggaccgattatgatgtaatgagtcgtgtgctgcagcgtcggtatcgggaatgtcaaagaatatggcgttagacaaaaatgtggttttcttttggtggtgcacgcactccctaagtttgacgtcggggacagacccttgacatggtggggccatgtgtctggaggccgctacgtaggatgatattcaaaggcttccagatgtttcgtcaattgtctattcggattaccccaagagggcacccgaatagatcctgatggacccttcgccttttgggccaaacaacattccccagaccaaagtggtctggccttatcgcgtctgtaagttggacttacatccagattcagagcctagcttgactccgctagtgggttgatctgttaacttgattgggcccaaaaatgggtcagctttagctgaggttggatttggaaaatcatacatcagttatctcaaaacacgaataacatttactcccaagccttcggggctcgagagtcgtggaggcttgcagcctactcccagattcattgttggatgtagatccatgaataggtgcaacctcttaaggttccaaagtagtaggtggcaaaagcctaaaattctttcatttgttaacctaagatatgtttccaagagaaggccaaattggaaatttaaactaatttcggtaaattgaaactttcaacacaaaactatgcaattaatcaaattaatgaagtaaatgcaaatatcatggcaagcaaatatagagaggaaataatcaagcttgtaaagtaaagagtttaagg

SEQ ID NO: 19423 - DNA, 2456 bp, Cannabis sativa
cagccgctctatcccaagcctgcaaccttggcctttaccccaccaatgcatttggtaagcaatgctcagctcacaagcccagcaactagggaaacaatagttggggttaatgagccagctgtgagttctgctttagtccaagctaggggcttacaacaaggcagaggggggattaacagcatggctaatgttggtgctgccactggtactgttacagttgggacgaggtctccagcaaatcacatctcctcaaatgtagttgcaaaggctagtgcagtggattcaccttctgtgtcaccaccagtcccttatatgttcagtagaggaggcaagtgtggccctggtttggagaaagttattgaaagaaggcatagaagaatgatcaaaaaccgcgagtcagctgcaagatctcgtgctcgtaagcaggtgagatccattgttagttgttgtactttagattaagcattgtaagtactaatttgattgttcttatccagttaactttgcttctaaccaaggtgtttaatgtttgggttgtagtttaacatgtatgctggatgtctggaatggcagctgtttctgcatgagtccagattctagctaggctagctgcaacttaggaatgcactgtcatgattttcacacacataattcatattctttttccttatttcatttttagagaaagttgaattctttatcccaaataccccaatcttctttcttgcattaccaaccaatgtttcattatttgtttcccattattataagtcttcttggtgtaacatgtttctctagcaattttggattaattttatttaatgggtttgtttactggtaggcatataccttggaattggaagcagaaattgcaaaacttaaggaagtgaatgaagagctactgaaaaaacaggtttgtaatttctttaacttacatgttatcatgttctatctgtatactcttgctcattaacctcatttgatttttggtctattcaggaagagtatatggaaatgcagaaagttcaggtacatattttcttctgttattttattatctgaactaattgagttaaaagctgagtcccaaaactttgaatcttgaacatgtttgcacttagtttgatgttatggatagactcttcaatgaagaaaaaaacaaaatcattagttggttaaagccaaagtagttaaaagacaccttagtactgtttcagcttattatatgttgattaggactatcttgaccatcaatgagtactacacattctcagtcattaaatataagacatagacatttacaaaatcatgccccttgaacttttaagccccttaaaatttttccgtaaactattgaaattgttggatttaaggagttttattcaattttagtaagtgaaacttaacatggatgaaagttcataggacatgattttgtatatgtcaaagtttaagagatataatttggtagacattaaagtctaaagagtataatttagtacatggataatcactgaattagtaaaattagatgatattggacaaaaattcttaaatctaataatctcaattgttcaggaagaaatttttaacataaaaaaaatttaagggacatgatttagttcatagaacaaaaattctaattagcctattgttgataaccgaacaagaaaatatctagaactagctttgagctggcatagatttgctttctatctttctcttttacatacacactacacctgtcaatttactagtggatgcaaaagagatatttgacatactaagtaagtttgtgtttggtttggcagatgttggagacaatgaatggatggggaaacaaaaggcaatgcttgaggaggacattgacaggtccttggtgaaaaaatgatgagtgggttttgacttttatatataatatattatatatgcaaaatatctcaatgatatgaaattctgtgttgtaccaaaaagttagataggcttagtttatagggtgtaaattataagctaaggttagtttatcatattaatgtacattattattaaacttttgaactcggccgtgtgatttttgtttggtttccatttcatagcttagaattttttacattttcttttcttttattttttcctcttcaataagtttttgttgtttatattttaatttctatgccattctcccatacgctttacttatttagcaaataatgtttttcatttcaatattaatcaaatacttaattacatggctaattaaattatttttatatggctaattaagtaatttggctattattttttttttaatttaaatagtaaatagcagcataagaagttctgctgcaactattttttttttctgtaaattaatcattgacattttccacgttttcaaatttgaagaaagttacaaaatatttagtaaaaacaataaaattaaactaaaacgacac

SEQ ID NO: 19424 - DNA, 3358 bp, Cannabis sativa
gatttactacatgtcaaaggtcaggagaaaaaattactaattagcctaattcaaataaaggaactctatatttatttaaccaatataatacaatttgattttgaattttttttacactaaaatatgatctcaatctaatttcaaaaatactacatataattaatcactataagaaatgtcacttttaccagcacagttcgctactgtgctggtaaaagtaacttttaccatcgcatttcgtaaactgcgctagcaaagagatcaaagttttaccagcgtacatttgcaatggctaaaatttaacttttaccagcacatttacgcgctaggaaaagtcttttttgccagcgcttttcattttatgctgacaaaagttctaataccaacattgatttgccaacccctttttgccaacatatcataagtaaattctattttagcagcgcaataccaacttttgccagcacaaaaatgtactggcaaaagtgacatttcttgtagtgaattttatcatctttactaaatattccaattaaaaactttataatataggactcgatacttaattacatcaataacaatataatactaaaaaaagtgttaagcaccgagttcgttttagcaattctcaaatccaaaatgtgtacaatttagtgggaagtgactcttaaattgaggagcaaagtggtcggaccatcactaaaaaaaagctgatacttttattgataatattttagttacaacataaattttctgtgatgaaatatgacttttagtcacagtaaaaatttacttgtaactaaaatacaatatttagttacaagttgttactattttagtgtaagtcacaataaatattgtgactaaaaatacttttagtcacaacaaattgtaatttttgtgattaatatttttagtcatggattttttagtcacaatacaataataataatttagaattagccacaatttttttatctttaattacaaattttattgtgactaaaagtaagattttatgtagcgcatatactatcgctgcaggcaatgaatgatacatgggccacgtggcaagatacaatgccaagccaagagatgggcctcttctattgattaagtcttggacttctcatgcaaatagttgaatatcaagttgattgaagaatggatagatgaagttgggcttgagcttgggcaatgtgattgggcctgttatcttttataaagggattatttgataaataaatagtgttatttttttattatttttgaaaaaatattattaggtgatttatttttacaaattactaaattttctcaaaaaagaaaagtttttttatttgaaggaaaaataagtcataaaaatgttattacagtctttattaatttagacttttaaacaaaccaaaaaaagcagaaacaatacagtaccaataagaaggagtagaagaatcactcatacaaatttttgtaattgattttgtttcgaatgattgtaactatataataatccacatggcactgccttaatatgttatttgaattaacaacaacaaagatagaatatctttctcttgagtcacaccatgcgagccctacattctctaacaaaaaaaaaaagatattactattacttttcttaaaatataattattattaagctaaattatatatagacatgtaaaaaaaatcaaaaagtgagagtatataaatggtggagaaagtagaattgaactcaccaattgaatttccattattggatgttaaagagaatttttagaaaaagatgatccatagcagcttcttcattattgtatgactcttgtggatacaaacaaggctttggaggcatttctagacattgaacatcaccttctagcatttttatgacattttgcattgaagggcgatcgctagggttcaattgtatacaccataatgcaattataatcattttttttattagtttatcctcttgttcctcacttgtaatgtcttctagtacaatttccttctctttgttgacttgatcatacacccataaaggaaaataaatttgccttgaatgctcagcttccgcgttcaaatttctcctcctgctagccatttccatcaacaacattccaaaactgtagacatctgctttgtacgagactcttcaaatgtttttgtaaaataattttggggcaatgtatccagtggttcctctcactgcggttaaggatactgtgtttctcttcaatgggcataatctggctagaccgaagtcagagaccttgggaatcaaattttcatccaaaaaaatgttgtgaggtttaatatcgaaatgtaaaatttgcatatcacatccttcgtgaagatatgcaataccacgagcaatcccaagtgagatattaaatatttccaaatcgcttaaggaatcatttattttttggtctccggagaagattattattcaaagatatcccttaaacatatattcatagataagggtactttttgacccttccagacaaaacccctccagccgtaccacatgaacatgatgaatctttccaattgtaataacttcgttaatcaagtcttgccaattagtgttacatttatctaacatcttaattgctacaaagttaccactacgaagtttatatacagttccaaaccctccgtcccctaattttgtattaaattcttttgatatctttttaatatctaaatatgcatattttattggcacgagattgttttggctttgtaaaaattcctcaattgaatgatatattgataaatgtctcctacgccatttatagatgacaagaccaataacaaatgaaattccaattattgttctggttgcaagtagaataaccaaaatagcaataaaaaaggatcatgagtgtatattggtaccatattgcattaaatttaattaataatgttttatatgtaaatttacatagaatttataaatatatattggaaaatattgagtgggcaactaaagtcctacataaattaaagtaacaagtgtacttagagtttaaaatacaaggaaaaattcttcaattggtatgagacctttttgggatgaaacctaagagcaaaattgagagggcttgacccaatatcataccaaaatgaagaataagtggagtccgacaattctacaagtggtatcagagttaagatcccaaataaccccaaacaaaatgggtgaagccaccgaaagaaagatcacggttgagttctatcagactgttggtttgatctgggtgaaagaagagagatgacctagatagagaaaaagaaggctcgtgagattgacagactcgatggataaaagattatttgaggggag

SEQ ID NO: 19425 - DNA, 4698 bp, Cannabis sativa
aaaaaaaacacgaaaaacaaagttaagcaaactatattataacatatacctctgttaaaaacacagaatctgcatcaggccctttctgattctttaatcgcttaactgctacggttcttccatctttcagtttgcctcgataaacatagctacttcccccgactcctataagatttgaatttgcaaagttttcggtagcattttgcaattcagagtaggaaaactgcacaataactccatatatttttcctgtttcgttccctgataaacaactcatctgaaagcaatctacaattgaataatcaatcacattagttcaagagaaaagtggagcttcaaatatattctcttaaagttaccacaaggccattgactaacctgtgatatgtttaatgggcaattgagaatccacaaaaactttagtttcgggcattgaataagtcctatggtttatcaaattggtggcactgttgcagctagtttctcggtctgaagagaacactgatggtttaatggcactcttgtctctttgataaaagtagcaagcgaccgacaatagaaatgcaagggtcgtgagtataacgcatagtaataaaataatgactatagctttgcttgacatgtgcttttttgaaggttgagcttcattgagagatcctgtcaagaagcaaccacaataccaagtaagcatagaaattctactagtagattcttcaacactaaaagaagcttcaaacaaacacgacacacccaacttttgaaaaggcattggcatgcagatgagtgagactagaggaaagtaccagatgtacaattgcatgctgcaaaacagttgttgtactggttatcagttgcaactttaggaagtccatcagcaggacatttacaagtccatacgtttccagcatctacaaaagagatttgcagttagcttatccagacatcacaaaagcgtgtgtgaaaaatatataagaatgacggttgatacaacattgccaaactcatacacatttcaagcacttatgataattgatttactcattgataatcctaatgcttttagactcaaaaacacataacaaaagtttgcacagtttttttatattaaaggttaaggttaaatctacctccatactctcctatatctatttttaatttagattacaaaaataaaatataaacataaagtctattgtagtataatatttgtgtctctttaattcctaaaccttacagaagaataggttattatacaaatacaaatatgttgtgttttggtatgattttcatgtgggactatttttaacaaattagttcaaaagaaacataaaattgcaattcaaccgaaattcgctttgtcatcaagatcaacagcttctattcgcttacactactatttgatatgcctattgataacaagctaaccataagcaaatgtttacccgagaagcttaaggccaacaacaccgatagcaaaaaaagttttttagtgtatcaaagtgaagcttgatgtgattattataccacaaaaattagcagcatacctcgactacaatcgcaggatgttgagcagttagatccaactgtagtcgagctcctatttccttgatatgtagaggagcattcgcaactccaatcctttatgccagatgtactcgaaacttcatctgtccaattaagttacagaaacaatcttaacacttataattaggagaattctttctaaaattgttttaaagattaatactcaccacaaagacttggctgaatcaagatgatgctcacaagacaagcaaagacaatctcgacttggaacttcatctaacccaacctgatgaacaaaacaaactttttgttgattttttttatagttatttacaaccaaaagtgcttaaaccaaaatagtagatgaagaaaattagttattatagttgttatttcccttatagacagtaacaatcacgtaatatcaattttcgggctcgtcctagttacttaagaaaactaaatcatctgcaacttcagttagctttttttatcttgaagtgaaaagcaagtttacaagttttgaaacactgaaaaagataaataatcattagttcaaatctcgttgccatgttttcgtcgaaacttaaagaaagattggtaaaatgatagacaacataacagagaagaagttgagttaccttcataagggacaataggttaactcttcttgaacttcattcaacttctccaaactacaatctgtgcatacacatgaataattaagtctaacttaatagaataagattaaaaaatctaatgcctaaaaccaaagaaccatttacagtgacagaccaggagatcaaatatagtaatatggatgcacaaacagatctgtaaacaaaaattcatggtctgattatctaattcaaccattttttttttctccaaagaagcaaaccaattttggaaattaatatccacttaaagtctttgttcataattagacacagaacattggtgcagtacaaacttctaattttatcattcaatcatagttggccaacaaacttctagaaatttaatcattcaatacagcttagtgcaccaagtctctcatccaatgcacaaaatactaattagtcaataattaatagtcatttaagatttatcaagaatatgcaatgcaaaagatttatttttcatttttttattgtccaaattatgaattcatgaaatgctaacagtagcaccaggttatcacacttaattacatcattaattcaaattctcaaacttacttggcaccataatacttgccttgtaacaatgctcatttccatgtaaaaatgtaagaaaggaatttaattcactgattgtattaggaacagttaacactttaaaacatgaaataataacacaactgaaaacataaatgctaacagtgtaagctgtctagtctcataaatattgggctgtgagcaaagagaagcagccactgcatctgcatatgcatgtatcacattgaacccaatcccaacacacatcttccatttatttgcaattacattgcaactgcttccggtggctcccaataaagacaccagaattgctaaagggcaccatggtggtgcaattttttatcgggtcctactaattttactttaataacgattatagaaaactgctaactatttataagacgccaccttataatggtgctaggcacctagcgccccatagcacattgcccttcatggggcatttcccaactaaattttaatttactgtgccaccatggtcagacactataaatttatagttgtaaaacgactattatggtcacacagtgtaatttttggttgtttgtgtgcaaccaaacatggttattttgttaataaaattttgacaatttttacaaaacactctagaaacagttcctaaaacaaattattccaactaaagataaattcaaagttaacccacaaaaaaaaatgttggtcctaagcacaagcttattattagttcacccacttaagaaaaatcataataagaaagagagaagttaattaaccacaccttaagaatgagtatacagacagctgagtcttgtgtgaaagtaattaccaaattcatgctcattctccaatcctcatcatgattactcagaaagattcaaaagaagactgaagaagagtagtagatatatatatatattggcaaatgttaagaaatgaatatatgacaacagtagaggacagactaataatggggttcttgaaatgaataaagaaaaaaaaaacacttaaaaaaagggaatttagtgaacccatcaaccacctcattgaaaatcactattttgccaatatgaaagagactctttacctcaccaacaccaatgatcaccatatctataatcctcaatataattgaaataaaccccattaaactattattataattttaatctaactccaatgtggttttgaaaacaatcatatcccaaaaaaaaaaaaattttgttcattctggttaaatagttataacggctataattattacaataccaaatgaatacttggcttcaaagataaatagcatatacaacattggaagtccgtaaagcgacgtgtaatttgtaaattcagacactgggcccccactaaccagggcttgggttgtgggcctacactaacttgggcccaatacaaaacaaaaccagcgtcggcatcattggcggtcagataatcctgaccgtcggattaagaatctgattcaaaatcaaacaagacaagaagaagaaaaaagatggaatcttttgggttgtaaaaagtcaatgatgtggcattcctctaaatttggttttgttcataaaaaatgctcatagattaataacactcattactacaaaaaaaaaatgaaaagaaaagctgaatttcagagagtgtaaatgtacctaaagtgatgatctggttggttaaagagggtgaaacgagttcatccttttgagctgagctggtgagataggtggttagtgatatcaaatcgaggtacagtagtatggagatctagcagttatgttttgggctatggagatttttgttaagacagaaaaagagaaagagaaagagaagaagagaattgatgaattgaattgaaatgaagtgagttagagaagtgtaagcacttaaacacagagagagagagagagag

SEQ ID NO: 19426 - DNA, 1808 bp, Cannabis sativa
tttttttttttttaatttagtaattattattcgtgttttcggataggtgacatttatgcatccactgtctccaaatcaatttacaagcctattctaagggcccaaataggtagcaacccgacccacgaaggaacttggacaggtggtccagattcgattaagactttagtgtgggcaaagccagaccaaaggattcggaggactaattcgaacaaaactactaaatgtccgagaaggcataaacggatgctccctgaatgtcccagaaaaggcagtctaaggggtgtcacggaggtcgatccttcgcgatcgatctgacatggcacacctctaacacaaaatgccacaaaagtagggatttgtccccaatgtcaaacctaagaaaggcgctcagcaaaaaaaaaataatataccttttgtccaacgctcattactctgacatttattgtatacgataggtggtgtatggacaactgtcaacatcatatgtactgcgttgtacagacaacgattatccttcaaatgggcttcacctaccaggcccaaagtcaatattatattttattttactccttcatgcgggttacgaatttttgcaaaaaactctacaaaaatttggcaagaagatacttgtgtaaaatacttcattgccaaggagcttaataatattaacttgtagactaaggctcattaactccccaactatacaaaaaatcctcttcttgtttattccttaacttaatttattattgacttattttttaaaaatctcggtaaatattttagtgcatttattgagagatgaggaagatattatccattgttgtcatctacaacaatggttacaactagaaatacaatcgtcaagcttagtacttgacaagacaatgaagatgttgtcgttgacgatgagtcaaaccgtcctccttcaataaacgtttaggttggcatcgtaggagacaaagagatgtcagaagtgggtagttgtcctcttcgaaaaggccaacaggagaaagatgttgataaaaatcccataaatgaagatgagcaggaaatgtagagtgaggaccaacaagatgactatgagaaaaactacgaagatgaatactataaagaagaccccgaggtggtgaatttgagacaagtagtagtagaccaacaaaggaaaatggcggaacagtaaaaagctacaggccatacacaagaacaactattcttaacatataatcaaacatgaattcaactatctttcagaaagtaaacctcaagaaagactagttgtaatacgtcaaatattcatcaaacaattacagctcaaacccttcaatccaagctacattcttctccaaaaatcaagaattaaaaaaaaaaaaggtttagttagagaaggggattgggtggtgaaacttccaaaactaaaaaaaaataatattctatctttagttttagaaaaatgatacgtacaatttattttgctacaattttggtcaaatgaccattttgaccttaagacataatactcatataaataactaccaagggtagttttgttatttcatattacacatataatttataaacccacatatatattatgttatgacataattaaacaataaaataattttggactccgaactcggtttgagctaaaattcgcgattatgactatatcgtgccaacttgttagaattcacatgtagtaagacaatatgaacataccatataataatgagcttttttcataaatgtacaacaaaaataaaataattacaaaaaatgtacaaaaaaaattatttgaaaaactt

SEQ ID NO: 19427 - DNA, 1786 bp, Cannabis sativa
taaaaataaataaaatctgaccgtacacttgcttcgataaaaattaaatactgaccgtcggattgtgaacaaatcgagcgttatgagtttttattttttaattattaattataataattattgggtatgagtcatcaccagcccgttatcgtgataaggatgtagattgggtttttattttatatttttttgctagattgaattgtgataaccatggaaaacgtttcagaaaagaatagtattgattgcagtcttttcgttatagttacagtttcgaaaatgggaactattcttttcgaaaagtgatggggaactcgttattttgataacccaccacgtatattatttggctgtttgtttgttttgctctagtacgtatctaaaataatttgggtttgttgtatgtgtatgtgtgtgtttataaaggtggtattttttacgaactctgggactgaagcgaatgagttggcgatgatgatagcgagattgtacacgggttgccatgatatcatatcgttgagaaacgcgtaccatggtaacgctgctgggaccatgggggccaccgcacagtgcaactggaaatttaatgtcgtacaggtaagcgtttcatacacccactgtcgtttatcatattaaaagcttgaatctttatgaaaaaattgtcgtttcatttccataaaaattatcaactagtatggaatggattatggatctcaataattgtaaattgaactgtgacctgtttagtttatattgccttgttatattagatgactgtgaaaggttttacaatattgaacataaataattttgtgtgaaatgtaaaagttgtaagataggttgatatgacttcactatgaatatagataatttctttaatatttaaaaaatttattctagtttaaaggaaataatcacttatcatttaatttagtcctgaaaacaatcatcttctttgacaaattatgaatcttaatatcacgttcataatattcctttaatttaatgatcaaatatttctctggtctttgtcagagattaaaatttctatgtggtgatttgttttattatttgtgaacatttatggctagagttaaccaaaagaataacactgtaattgtctgatgtggtcccgtggtaggactaggtgaaaataattgtctgatgtgtgggaatctggtgtaaatggacaaatgagttggccataaaagataaaataaagttatcacttccttgtgtataatcacaagagaaggtcacatcacagtagttgtgacatattatcaatcaccaatgatgccaaacacatcccacgtcaacccgaattgaaggtgtcatagtttgattgatattaagaaacaaaacaagggtgcttctgtttcagtacgccactttaaagctaatgaaaactaccacatcatactttttgttttttttttttacaaaaaagagtggactcaattcactttactttatggggacttcttcatgtatgatttatgcaacaatatatatagtataaaagtgccgtgccgtatcagtgcccaataatcattttttcatgtttgccgtatatagatgcttgttgggttctctattctttaagattccatctgataaagagtgtgaactatctctatcttcattagtgattagttatctacccatacactaattgttataattaagtcactacagaaatacaactttgacacatcggcatctcagctaaataattctgttagttagtaactgtcctaaccaacatctataagtagcaataatc

SEQ ID NO: 19428 - DNA, 6432 bp, Cannabis sativa
gttgtgtaggctaactcttcccggtgggtaaattttagggtgggaactggagcacttagcagtggaagtgtacaagttctagcaacgtggctagagaaaagttcttaagttttattgagcttttttgtcaagagagtttagagatgatcttttcccaatcactcccctcccccaccaactatggaatggagtagcacttagtagctaatggttaagaattttttttctgtttttacttcgtatttctagtctcccctggtagtcttaggaaaaatatcatttaataggtggaaagtctcacgttatcaacttaataccatttataagattatggattactccacccatcaccaattgatttggagatagaatattatacttcttatcgaacacctcaccctactttctaaactacacttccacattttaataggatatcatgaatcaaagaacactataacgagtatccaatccaaatccaaaaaccaatacaaaataaaagagacatgtgattaggtgatagtaaaccaaaaaccaattgtgatcaagccattggtgagcaaaaatagtcactgtcttaaggagtgatgttaaagagtctcacattgataatgtgtggaaacttaataccgtttataagatatatgggctattccactcatcagatgttgttttgagatgaaacctcatgtttcttatcatacacctcactctactttctaaccacacttctacattctaacaccaccattgaagttcacctatgacactttaattagtaggtcaaaacactcccaagagttcacattttagaataaaagtttatgcaattgatactctgaatgttatgatcatcacataaacaagaaggtggccacttaaatttgcatcaaggggcaaactgaaatgatgatataaaggaggaaatgactatgtataatcaaatttcagatgctagattccagaatcccatctccaaataccttactcatactactccaaaaaacagaacaaatttatggaaaagaaaatgaaaatggaaattggaaccatagtaacattactaacccattatcatccataacgagaactttcagccctccaaaattggtctggatgtgattgccttgcaccttaggcgcaaaaggcagcttggtttcataaggtcgctcaggaaatccaagtttgacaatgaaactagctgtacatcctttgccaagaccatcactatcaacccatatacttccatccatgagatttacaaacctgatcatttcaaacaaggggaaaacattgttcttaactgcctcatagaacagtctattaaacaagcaaactctaaatgccacaaaatcagtgccagattgacataatggtaaatttaaattatctcaacactaaaactgaagataacatagcaaaaaaaaaatcaggacctcttgcagattgctagtccaagcccactgccaccagaatttcgagtggctaatggttgagtctgtgtgaatttcgtgaatagcttaggcatatcctgcgggctaatacctgatcccatatcttttacctatgataaaagataaaaagattaaccgcagataaaactataattcaaaagactaaagggaatttcaaggtcttaatacagtactaagaaaaagcaaacctgtacacgtaggtaaaactgaccctcacttggtaccggaaaaaattctgcagttcgatactctcttaaagattctggttttataacagaagctgccattgagatgcttccctcctttgaaaactttaccgcattaccagagacatttaaaatggtttgcataaggcgcttctcatcacccaccgcgtatactggcacatctgaagctatatttaatgtaaccaataattttttgacagatgcaacaggcttaattaagttaaggacctgcaggcacaaagttcacatccctaagcaatgcatgataatgtatgagacattgagctttaacatacataacaattgcaaggaacacaatatcttacctctttaaatacagaatgaaggttaaaagttcctttttcaagttgaaggctgccatcttcaagtcttgagagatctaatacatcatttataagagtagccagaagattactgctcttaagtattgtttcaaccatcaggcgttgttctggagtcaattcggtttcctgcagtaaggaagacagtgcaataattgcatgcataggagttctcatctcatggttcataacagccaggaaatcattgcgagcacgaatggcagtttcagcttccctccttgctagatcaagtgcaacattctgctcaaatagaagatccctagctctcattgactcttccaatatagcagcatgtgaaagagctactgcaacctgcatccacattaatagtagagaaatcaattcttctggtctgtaagtcacccaatatatctacataagagatgtaaaatcttataatttttatctaaaaaaaaaacttcgtttcagtataccctcattcatgttttctagaccaagaaaactggaacaaactttgaatgcatgcacataccaaaatatttagtaaacatcataaaatcacattacaactccacctaataggcagaataaaaatctagtatattaacattattaagccctaaactgagaagatcattttgaataagaaaacatgaaaaatatagtttataataatacaaagcattacctcaaattgaagttaacaaattaaaaacagagggaaacagcttacaaaaaatttaattaatatataaaagaaaaaagatttaagaatgtcaatcaaaaaaacttcatgaaggcttctgttcattttacactaagagtacaactcatgttaggaaaagattccaagcaagtcattcatatacaaaacccacaaattatttatcataaaaacatcttcatgaaagcatcatcactacaatatggtgggggattagggtttcagaacaacaatggaggaaagagtctcctttgtacaagtgaaaagagaattaggactaatcatgcctttgaccttcccacttattttagttcaaaaacaaaatttgaagccaaaaatcaagaacatgcgcacaagatgcattgccactttgtatgtcgttgggcaacgcattgctttctaggtggcaacattttgccgcagtatcaggtgacacattgcctgttaggtggcaacatagtcatctgaggggatgatgatgtatcgtcatcctgtacgacataggacgacaaattgcctgctaattggcgcacagagcttgagggagtggcaacgtaacaccacccactttattttttgctctctttttcgctatcttcaaaaaatatcaaatttctttccatatctttagatgtgtttaaatatctcgttgtattaatctaaattcaattaaattaaattaaattttgatgctaattacaaaatctcaaaatttacacctatttatatctttacatctacttgtgtattattttatttttcattttaccaataacaacacataacacgtaattaaatcaaacacccacaaaaaactatttaacatttcaaatatctttaatattgtgaaataaaaaaatcccaagcaattgaaatgagacatgaataagtatatccagataatcaaggtattccaggtgcctagagacatggtttcaaatgtccaagacaataatagttgcaatttttttttataaaaaaaaacatgttttttatattcccaatttacttagtgcaccttacatctgtgataattgccacattatctatttctataatcaattaatcctaaaattaaaaaaaagcaacaatctttccataaaaactaatggacttaaaattaagtcaaatatgacttagaagcaaaagattgattgtttgtgcatcatagccacttaaattgttctttgaagacaccaacatgaagcttttgtaagcaatgcttattaatattctttagtgatagcatcaatacaaagatggtaacaggttaaaaccgtacctgatcagcaactacttcaaccagctctaactcatgaacatgccattgccttgcactatttgagggaagcatcaagaccatcaaagcatagcgctttgttgaaagctctggccagtcattgatttggaagttggaaagatgaagaagtggcactcgtacagcaacaacctccccagggacatactttccagaaataggccgtagccttgccactggggaatttggcgatatttttaatgcacggttgctaccaaagacttgatttataacaggaagatgaatgggtacagtatatccaactggattttgctgtcgaagtgtatatgaaagttgaagttctaaacctgtacgcgttggcatccacaaagcacactcctccaaggccaaagttctccctagttcaactagggtagttcttagtatagtatgcctgtcaagggtactcctaatctcatgggtcaacatcctaacatgtcgacctgtctcttcttgtgttcgaatcaggcccatctccctatccagctctgcagccttgtttttcaagaagagttctctagttttaacgctcaatagatcaggaattatatgtactagcataagggcagtggcacacgacacagcagctgtcagaaccttggctgttgtcattacaactgccacagttcttgaatgcatagtaaatgtccacagattaataagatgcgtagctccacacaatactatgaaagcaccaaactgaacaaggacccatctgtatggaaaaactgcggatttcttgacaaagtatatcagctccaaagggattgaaaaataggcaagcgcaataaagaaatctgagatatactgatacttcatcaacaattcatcagcaggccactgtggttcaatgcagttgcaggactccatgatgaatgattgagccatagctagctcagctaaatttcctcttcacattcctaacgacctaatatatgttcacaaaaaagtcccgaaaacaaacaggttaggagtccacccaaccaaactcaacagaaaaaagacaaagcaataataataattataaaagcaggttaaggtggaaagctaaaacagataaacatattgaatactactccagtactaccaccaagatggaagaaaacaaaacccctaaaacacaggaaaccactcgatcctactaaaaaacaccactactccattgggttgagggcataatttctttgagaaatccccaaatattataaattagaaaaagttgcaggtagtacaacaatctggagcgagaaacaaataacaaattttcacaaagaataggtatttattcaaacacagaaagaccgaattccatccaatacatttggtaaagcagaaacctttaagacccaaatcatccctctcaacataaataggagaaggatccaaatcgtagattccaaattcttcttctttgtgtaagaaatttctaaaataaattgaaattacatgaagattaaagaaaaacatgacgttttcgattatgacagagaaaaagcttgaagctgtacctgagagtggagtcatggaggagagctggaaaataggttattgttgaggagggagaaggggagagagagagaggtgtgtggtgggtgcgtatggaggttatgcaatgtcaatccaattggtcaaccaatacgttttttttcagacaagagcacggaaggaagacatagaagagtggcgtcctattccttccttttgagtcggtaccttactttgtgggccttcttctgctttcctttctcggacaattggtccaattttcaacgaaaattaaaatatattattattattattattattattggacaataagagtatttctaaagagatatttttattatggtgctctaattatactctttattttagttactatttaattattttaataatattttataattaaatttatcaaatataaattttttataaaacaatgaagaagaaattgtacttttaattaatatattattaaaaaaattaacaaaaaagtagggagcttcctacatttagagaactctctattcgctctttaatagggctgcacatgggttgggtttgacaatttttagacggtttggcgatttttttatttggcagttttttaaaattacaacccataattacccaataaaagtttgaggtggacgattttttagaggcggttttatgcggttttttgagcggtctgggttgcttaaaaatcaaaagttccaaagtatattgtacaagaaaaaaaatatttaatcaaaaatttatacctgttaataacaatacataaaagttcttaaaaaattcatatcaatctttataaactccataacaaggcataataata

SEQ ID NO: 19429 - DNA, 1598 bp, Cannabis sativa
tcttggactgaatttaaacagcacaaagaatctaaccttgtgaaggttgaagatcttgtcaccaactcgaacgcgaaccgtgacaggcaagccagtctcttggctcctgagaacacaagattcaacaaaagcatgatatcagaagaataaaaatgaaagaaaagaatagtagacaaaacaagtaaaaatggaatccattagtataattgtaagcatctgaccatgaaatgactctaattttgagcaaggccccaacgtttggggaagagaaaggacttaaagagagtgaagtgtgtttggagctggcaatttccattactaggcaaagaccatgaaatgtatttcagttgagagttttttttgggtgtgggagtgggattagatgttgggagcattaataaatcctataagagaagactgcgcattaactagagtcgttggattaagaaaaaccaggggaaataaatacaaggcaagagaaagcagaggtggtttggtttattaagtcagtttgtactctagtccacacacattcgtgcaatttttcatgcatatttctttattttttttggtcaaagtcaaatgcacacgagtgaacttccaatttttaaggcttcagaaaaggttctcgagtgatgagaagttgaattcttggtgcaaccacttggcctcggccagtagaatagaacatggtaaaaagtataataataatactaatgtgcaaaagtatatgaaatcatgtaaaagaagagagatattaattttaaggtacaataagttgtgttagtgaaattattgttttggttgaatttgtgagttgaggatgaaggcggtggagtaagtgaaggggagttagatcagatctcaagaagaaaaatgaattgggaaagaggaaaagtaaaaagatgaaaatgagatatgatattccaaaggagaagatgaagtgcgggctaagcttttgtttttgttttagtgttgctaaaatcaaataataataatagcagcaggcacggcacgatttctcaaaatttggatgctttgattgaaggattcttctgctttgccatcaattctcaatccccatactattatattattattattattgtcattaaaaataacgtaaacctaactgcctcttcgctgtttctattatgtagaataaatctatccaattaccacaatagtaatagtgctgtaaatataactcaggtatcagattcattgagatggcatgaaacatgaatgagcaatgcccgacaaaataaataagggcgggctcgagcatgtcaatatgatataaaaaatagacttaaaattataacatgataaatgtgaatgctgttgataagtacacaagtatacacatatttatattttaattagttcacctcatattaatatttaaaaaaaaaattataaaaaaataattttatttttatttttttcttttacttttttttttggaacgatccaaccccttcttcctctcttctttttcttctccttcttctttttccttcttcttcttcctcattcctttctcatgagtttcttctcccccacttgccctcattatgctctctctctctctctct

SEQ ID NO: 19430 - DNA, 2481 bp, Cannabis sativa
  modified_base (958)..(965): a, c, t, g, unknown or other
  modified_base (1445)..(1447): a, c, t, g, unknown or other
aaaaaaaaaaaaaaatagtgaatagagagagattgactccatctaaaaccgattcccatattaagctcattttcaatttccatcaatagtatttattcttgaaaccagcaactaaattttttcaccaatatattgtttaagtttttcatcaaaaattcaaaattcaaaacatatctttttctaattttttctactttggtaagtaaaaataaaaattagagaatcgtatcatctagtggaatctccaatgaaaaatttatcaacaaacaactcaatattcaatcaaagatttaaggtatgcatttcatgttttactctttcttcaattgtaatttgtatgattttatctatgttgtttattatttttcaattttatatttttattatctttcaactcttatctattatcatcatcatgtcattatctctattctcttttatttttttattcttaaaaatataaatttaagtatttatataatgaaaaacttaatagagaaaaaaatatgtaatttgttacactcttgtttaatgtcgtcaatccatcatatttttttttaattgtaattatttaattgagattaattattgattgttattaattagttaatcactacttgtagtatgttttcttattgtagaaaaatatcgttgcataaatcaaaaaattaatttcaaatgagcattagacaattgacgattgtgaacgttctcaatttgaagctttaaactttgaaacaaaattagcaacgaatacagataccaagttattttgttccatgtttgctcttctaatttaataattcttactctattgatcattctttgaaacattatattcgttgttgttgttgattttttttttttcattatgtctcctaaaactaaaaaacatgagtctcggtatgaaaagcgtaagaaaaaagaaaaaaattgaggagttaactcaatctcaaannnnnnnncttgataaatttattataaaagaaccacaagtttcgtttgaaaatcataattatattgttgatgttgaaatttctgaaaacacggttcctattgagaatgatagtattgagaatcaaagtgaaaatgatgatgtgaaaaaaataggtgacatgcctattaaaaatgataatgttgaaaatagaggtgatgtgccgattgaaaatgataatatgaaaaattaaaattttgattctgaaaatggtgatgatgatcatttgaataattcacttgaaaatgatattttagaggataatagtaatgacaatgcaaagtaaacatacccatttcaaaatttactttatatatttgatccaagaaattgggatgcagttgattcaaaaatgattaatttattagtgatgaaagatctaaaaaaagattattttattatggctagtcctataggtaaattttttagacgattcactgctaatttgtannntagagttttattaaatggagagaagtatgatagagattgttgtttactcaaaagagttagataaagtattttatttttgttgcaaagtttttaaagcactgattgttagaggccagttaataaatgaaggctttagtgattgggtgcatgttggtgaaagacttagagaacatgagataagcatggaacatgttaaaaatatgccacttgaaggtgctaacagagctttactgtccaaacttgtatggcatgttgctagtaaccaagatagaccatgggtcatgtgtttactggcgaagtattgcaggaaaaagaccttttgggccatggagctagggagtaatgactcgccaatttggagagggattctatatactagaggaatcttacgggcgggtagcatggctctaaatggaaatgggaacaacatagatgtgtggaaatagtcgtggatcccatggctcaactatcaagaattcaaaagcttaatgaactcagttttgcctcaaaaccctggattgaggagtgtggttgatctctccctacaggggaataaataaatggaatatggaggctctccatcacctctttggtagaacattgggggacaggataggagggattcggagactccctacccctgctcaagatagtttggtctagaaaaatgctagagatggtgaattttcgatcaagaaggcatattgggagtgcttgaagccttcgatggatcgtcacactaggatttggaagactatttggcacagtaggatccactgtcggctctcgactatgatttggagagtgactattagatggctacctacaaaagataagctggtgtttatccatgataagggatgccatctgtgtgaggccgaagtggaatcccatgaacgtctcttttgggaatgcccctttgcaaaggccttgtggttcagtgggccgtttcccctaagaacttcttctcaagatggaaggtggagaaaagaaatcattagtgatatttgttggaagttattttaccaggaact

SEQ ID NO: 19431 - DNA, 4859 bp, Cannabis sativa
ttttagtgtgttaattttttttttatatgacgatgcataaaacaattgtaatttataaaattttgacacgagtagctgtttcaacgctaattttagcacgataaattatgtaattttttttaaaaaaattaatagaacatctactaaaaataattaatcaagttataatttctccttatattagaaaaaaaaaaaggcattcctataataagaacaaaaataatgcccgttttcttataaatatatatataaattagttagctataggtcaacaattttaattagtgaaataagatcaatttaaatttattaattttttagagtattattttttttttctttttaatttattaattaattgttttactaaaaatgcaatatccttacatataaaagtgtttcttattgttgaaaaatatttaaaaattatagtcaaaaaggcaaaagggtaatccattgctatttgtacataaactttttatagatgtatataatgctccaaaataggcctttttagatgaaactttaatcatcagaaatataatataatattttcatatttcttttcatttaaatttctaattatcaatcttttctctaaaaaatggcaataaattaggaaatcacttcatatatttttaataaaactttattttttttgttcttacaatttagattcttccgagaattgcgatatgagttactacatgggttgcgatgtaaattacgatttgaattaaggtgtaatttaagttgcaccgtatattttatataaatacaaaaaaaaaaaaaattaaaatatataaaaaaaaaaactcaaaaattaagggtgagtgaatttgaagttcaatcaataatggtcaaactcaaaagtttgactttcccttattcttggcaattcatttcattcctttactgagctcgagaagtgttaataagtttctgcttttgatattataacaagctttgagcaacgtaaaagaaaaaacaaacaatgatcattgatatgaccattatacccctagtgttataacttgggaattgatttgtagaggggcaaaattggcattagagataaaaataacatagataattgactagtcaaaactcatttcaaagaaaaagacacaatatagtagttggaatttcacacaagtttttttttttttgggatctttccaaaaattaagggccaaagtttctgccttaatttagcaaatattaatatataaatatatataataatgattatttatatataaataaatttaaattgtgttagagaggaatgaatggttcttagactataatcatatgccagcaagatacaggttgttgctttaagtaaaatttacaactaaatttattaaattaatttcaaagactttgtttcataatcctcttcttctttctttttttaatttaataaaatatatgagtggctaatgataatatatatatttattgtacagccacaccaagtaacatacttaaaagaaaaatatcatttataattgtacattatattattacaaaataatataataagatatacgactgtaccttatagttttattgtctaaatctaaagagatagttttgtttcatgtgacttgtttacttcagtaatttataatttgataatatatgtttttcggttagacaataagctataatgatttgagaaaattactgtactgattgcaaatatctacatcgtgaatttttaattaattttaatcactatggtaaagaaaaaaaaaatacaaaataagaaaattgctggcggttattattattattattttttattctaaaaaaaaagataccctaaaatgtgaaccgaatagattcattcatcaaaggattctgtctcaatcaaagatcgaatacaaataggacattcaggttactaaatagagtgtgttaaaatacaatgtgtttggatatacgatggtaattacttttgaattcttaattttttgtttggcaaaataattagcaattacacaaaaataattataatttttaactacataatatttaaaatagaaaattattaataatttcactcaattctcacaagaagcatgagaattgaaaagtaattgaggcctcctaattaccttcaactacacaattactgtataattgtatggttagaaatacatgtaaaattgtataatcacctttaattacaatttttttttttcgattctctttggactctctaaatgcccccatagtatttatagaaacaacaatagtgtgcttaactaaggcatgaacaacctagtaacaagaacattaatatacattatataaaaatgattacaaatctcagtaatttggttaacatatcattactcatttagttagttaaatcaatttgtataaataaaaaagatgaaaaaaattacaacttttggtcataaacaaattaaacttttaaaaatatcaaactttattaaccactaaattatgttaccgaaaaagataacaaattagttaagatatccccaaactgaaaacacaatcaaaatgtaaaaaatgaaagctttaacaacgttacgagctacaaccacgttaacataccgtttcgcaaccaaaaccgaaacattttgcaaatccataagtacagctttacaatttgacaatttcattgaaaacaagtaaagctttagaactccataattcataaccatatctttcaaaatttaccaaaactcattacaaatttattgattgtccaatctaatttctataaaaggtttcatatttaacatataaatatatttaacctattttagtcaatggaatagatattcaataaaacatcaaatttacaaggttcaaatatagtagagaatgtcattcaatctctatctgtgttgggacttcttcttcctctggtttcaacccgtctgcatcaatttcttcttccgttattccagaggcttccacagttctagaaacccattctttgagcggatcgtcgttcaaatcaagtcgtaacaatccggcaaacaaccctcccatgaaggcaactggctcctgtagagaaattgagaaaaagtgacaatgaaaacaactttggcagatttcggaagagccttcgaagagccactgctcgaattcattacaatcaacacaaccgttactatcataatcccgctcatttactacctctcactatatttgagttgttatttgataactattatagaaacccgataactacttgtaaggcatcatttcatagtgatgttggacaatatcggtacctaataacaatgctcctgaaacgacccatatacccctattatgaattatactcgaatattctataaccaggtcatacataagaatctataccagaaaaagaaaaaaagagaataattagagcaaaatcttagttttgagtaagcaattctgattccaaaccagtaaatagaaacttcattagaaccaaaattagtttcaactttgaaataactgaagttatatctcgttttcaattcgattcaaaagtttttcggggcttccacggactatattgaaaaacaaaatacaaagcaatgacagcatgtgcagagaaagtgatcagattgagataagctaataagagaaagatcagtgagtggattttgaatgtatttgtttagtttaagatgtaaaagatcaggttatggatttgaatatacaaatatctggttcattccccattcaagaagtaagtaggttcaatttttctaatttatacctaacatgtatttattggtgtagctgctaatttaagactagaaaagataattccagcaaacaagtttgacattcaaattagaactatgatgttcatgaaatctctctccagaaaatggcaatggatttcattgtggggtttcctaagtttgatgggatgagatcaatttcggttgtgattgatcggttctcaaagtaggggatttttatgatgttcatgaagtctctctccagaaaatggcaatggatttcattgcggggtttcctaagtttgatgggatgagatcaatttcggttgtgatttgatcggttctcaaagtagggtattgttattcctgagcctcaagcatgcctagctgatgtagctcagttgacatcatcagtgatcagactcgagaagttttctcggttaaccatccgcagacagatggtcaaaccgaaagaatgaaccagctataggaggaatacttgattaaggcatattgcataagcaaagcaaaaacaaaagcttgaaatgtaaacataaacataaacaaacaccacattaaatgagcttctagcattacaactcaaaatcaaaatgtcactcatataaatatctattctcatcaatcattgccacaaaaacattcagatttgtggtgtctatgaacacttaaaacaaataatctatcttacacaaacaaatggatcaaaactaatgcagtaacaaagtaaacacaaacacagaaatcttgtgtttcagctcttcttgaccctcggtccacaagaacagccaaagccgaatacttttatcgatcaaaggttaagtacaatagcagcagagcagagcccaacaacaaacaaagaacaaaactctgtacttaatagttagtttctatcccaagacacccctctcacttatatagctatagtagtatagtatccataagcaagagttttaataataactaaattaacggaaaatttacacaaaatactatctttagtaaaaaatttacacttgtatattcaaatgtatattttttcagtgttctataaaaacaaaacgaaaacaataaaaaaactacgtgaaagtaaccgaaaaataacatcaa

SEQ ID NO: 19432 - DNA, 4378 bp, Cannabis sativa
aaattcttcaaaaaactattttttaattgcttaccaaacacatttttatcacattttttttaaaaagcagcttttagctttttcaaaagttatgccaaacgggcccttagttagtcttattctttttctttttctagttttttttctctccttcattattcatatatgtcatcactaccaccatccaccactattaccgctgcaatccatcgccacttcattctacttttcatatccaaatcacacaaaattggtgagatctcaaatcacccaaaacacccaaaaacctaatcaaacccattagttttataaactcaaattccaaactcaaaaattccaaaaacaatatcattatatccctaacgggtcagatctccctcagttttacaaaaattcaaattcattaacttctactcttacaaatctcaagaacccacaatttcccaaaaaaaaaaaaaaaagatccctcagattctgacgaagaacaaacccagacccatttctttagatatcctttcattctttgaaagatgaacaatgtccttgtatcctctcctaaaatccaagagaaggtcgctccaagcaatggtgaaacttttcaactgttctttcaggctctcatctagagcctcctccaatttgtcattttgaggctcatcagtggaggggacgaactcggtcgatatcgtttatgcatcaaacgacgacgttgagagaaggataagatcaatggcgtaccgtactccggtcagagtcgtctttaatattttggaggccctattctaattctaaaaatcaggctcctacaaaaaaagtacaatttataaataatattttacatattattatacgattatatattttacaaaataccaaaacctccaatttattttattaaaattgttattgattggaatacaacaaaaaaaataatagaaaaaaaaaatatgaaaagtttgagaaaactaattaggctaattaggaattttgccccctgaactttgacatgtaccaaatcatgccccttaaacttttaaggtcgttaaaaatgccccctgaactatagcgattattggatttaaggacttttgtccaattttagtaaaaatatctaacatggatgaaagttcagggggcatgatttagtacatttcaaagttcgaagggcatgatttggtatatacatcaaagtttggggagcatagtttagtacataaacaatcactcaaatagtaaaattgaataaaattagacaaacgtccttaaatctaacaatctcaatagttcaggggacatttttaacgaccttaaaaattcagggggcaaaaattataattagctaaataataaataacagtaatgattttttttttttttttgcttaaaagcggtaatagaattgaaaatgagctttaggaattagcatggaagtgaccaatgacgagttgttagcccctgaaaagttgagttcattaaaaaaaactgaagcgcattaaagaaaaatattgggctctttattttttttgggccctatacagtagcccaacttgccctaactccggtgtccttgatgagactgacgaactcccgttggatcctcttacctcagccatgtttgatcctcactgaaaagagcatacatccgatcgaaagctcggtgtcttgtgcttctgccttttttatttatttattttttttcattttagggttggggtgagctttgattgagtttctgtggtggtggttttggtgaagtgatggtggttttggggcgagagaaagagggagttaaggttaggagagagagtgttgtaaatgagaaaaaaaatagaaaagaacaaaggaaaaaaaatatttttttttaattttaaattaattaatttatttttaatatttatttacattggctaataatattgtgctatgtgtacactggacaatatcctatgtacacatggacaaccaatttggcagttaactagcaaaaatagatagaaatgactaaatgctaaccgaacgcgaattttaggagttttgctattaaaatttaagttttgagtattagttactagcgaaataaaaatattgggagttatttcataatttactctatttaaaacctcaaaaacttataagtgtactctattttaataatttttattttacataagataaatatttttaaatatattattttttttaatttttttctttttacttatattttaaaaaaatgcgcctatcaaataaaaataaattatattttaaatactataagaaaataaaaaaataaaaaattatatgagattttataaaaaaataattatgcataatttaaaaaaattataaaaataaaattaaaataaatattgaaattaatataaaataatatgaaaaaaaaattcttaaaaagttattaaaaatcattttaagtttaatttttttaaaaaatattaaaatatactgatgattatttagtaaagtacaaataaaactatcttaacattattataccgataccgattggtatgggcaaacaacacattttgtctagtgaatagtgaaagggtgttttagtacattcgcaagtttgctttttcagtataacaagcatctaagtggaccccatcctaaaccctcattgtgggtttttaaagtatgcttttcgtgcatgcaattcgattctttcccggtaattatttttgctcattggacatggaatgctatttttgccgaaacaagtagagagagagtgtaagacacgttctcatttgattggacaaatatatatattatgaatagagtagcgtgtatttgacattaaatgtaaagaacagcaattgcgcctttcccgtcaatgcttggagggtaacaacggccccatataattaaagagggttggaataagggtaattagaagcggccaacaatgcccattgaaaaaaaaaaaaaaaaattgatatttgatactaggcaaggcacagacaatattactggaaaattttaaaaatttacataatatactaatttttactatatttgtaccgaaatactatcatgcagaattttttatttttttactgaatttttttataagtttcatactatagtatactgtgttaagtttcactggtgttttattggtgttttttagttgttctactgttattttgagttattctgctttgtattttactggtgttttataaaacacagtatttttgaaaaaatttctgtgtgatagtatttttgtaaaaattcactcaaattctaatatttttgtaagtttccttaaaataatgtgtttgtaatttttttttattatagttattaaattagtaaataatctgcatagttatatattgttattgtgagttattataaagaaattttttacactaaaaatacaaaatgcatactttattactaaaataccactatacggttaagcctacatttatactctttaactttattttattacaattttaccacttgccacacatttcatatatcactacacgtcagtggtctatgaactctatcaatcaaccatccatcatttccctatttttttctcttctttttcttattatattcaatttcttttcagtttttatttttaaaaaacaaaacctccatagctaaactcgtgtccctccataatcccaaccctttttccctcttctttcttttcttccattttttttcaactcacattaaccgatttccataaaccattttccctatctttttattgctcttaatctatatgtagatatgactattactcgttcttcatccaccctttccccattaccaaaagagttcgaaaaataggtgtaaaatctgtagctaataggtctaaggggaaacgtcctgttggtgaagatgatgactcggattttgctcctcagttatcaaaatgtgatcgtgctcctcctaaaaagaaagcaaaggttgctgcccctccaaaaatttcacatgcttctgctaaaaaaatgatcagaatgatgatgctcttcgattgcaggtttgttttcggttttaggagggatgctagcatggttaccaacatgaggatgtgataaatggggatcttctctttggagatgcccctgtatatattttcacttgatctttcctcatggtattgaggattaatggaatgttcttgatagggccaaggttgaatgttgtcataaatacttatggagctattagcaaatcggtgttgtcgctatctttgaagaaagtttgttgatgattttttgtgtgcccccaggttggaatatgtggtggtagctgttgggttgtctgccctaaataaaacacgtttcaatataatcagatttactaattaataaaagatcagaaa

SEQ ID NO: 19433 - DNA, 7701 bp, Cannabis sativa
  modified_base (7651)..(7676): a, c, t, g, unknown or other
ttttttttttttttttttctaccgaaggggttgttagtagtgcagttacgtaccttgctatgtaccttgcacaatagtacgaggttgaatgaacctgcttaaacaatttctactgttgtatcttctgagctgtagatgaaactgaatataggtgttcttaaggttaactgtgatgctgcaatcattttaatttgattttttttttagttttttttgtgaaacgatctagtaggcggctgattatttggctcgttttttaaattctaatcctgatcacgcttccaataagggagatgtcacagttagattgtagattattattttagctgatttttattaataaaattgcatgatttattaaaaaaaggtaaaagcaaaattaagtgatataattgagtggaaattacatattatacccgctttagcttaagcattttaatttctactttctatttcttattctttcatttatacccacatttataagtaatattcctattataccctttattcattatttaggttaataaaattgcaaagccacacactcactctctctctctctcgctctatcaaggttttgtgtggaactaaaaagaaagaagaagactttcaaagttatttcaacaaacaattaaaatgcattatattaatctcatacaatgatcctaacaaatacacacaaatataaacataagcaatacaaccagaaaattggagggagaaactagatctaaggagagaaattaatacaaatttaaaaaaggaaagacaaatgttacatacatttaaatcaaaggacaatatggaggttgtggttgccgatgtgtagttttgatggtggtggtgatggcggaggtcatggtggagcttgtgtacgatggcggaagctggagttgtgtgcgttaaggagtctatggctgaaacatgaaggagacttgtgtggagggcatattgggtaatgtacttgtaaaattaggtatatttcaatcaaatttaaagtgcaggtactttcggtaaattgatacttaaaaaaggtattttttaactttgagagtagtagtaggcccaaaacaaggcctgtttgaaaagcccaatcccagcccggtttcggaagaaagcaaaacaaagcaaagcaaagctggtaataatggttgttgggggaggactgaggaggatggtccctacttcctacttccggcttcattcgcttctactcatcgataacatcgcacttttcagcttcattccttcgacttcctttcctaggtactcttcttcttcttctcatctctttcaattttgtcttttgaatttcgagttagggtttataaatatcccccttttacaggaatcatggtcgttttttctgttttatgttattatatctttatttatttattatggtcctgggttcttcttgtaggtcttatgatcaaacccattggacattcgaatggtgcagtggactggaatagtctgatgatggcttacaagaattgggatgaggaacaacggcatttcatgaattttgttcgtaagtacctcagaatattgcatatgaaaaaaccaaaccattattcatatgtagtgcttaatactgatactattttaaaaacttgagtgaatttagcttatgttgttttaataactaaaccatttacaaggaactaacgttcatttggaaaattttgagcttgtgctaactgttactgattgattacaatttcttggtaccttttctccttttctacaatactgtatttttccttttgttttctacgacatgctcttagcacttagattagctatacagttttctggatgcaaaactagtgcaaataatggcttaccacatcaacattgtgataggtttgacctgtcacattagttccacaaaagcaagatataggaataatggagaagacaatcaatgagatagctgtctctgacacccaagaattcgaaagcttggttctctcccacagaggttacactctactcaaatcattcacaccgtattccctcagccttttattcctacccaaagcacaactaacagcacgacaccccacacacacacaagtattagttactatccctcgtaactagttttccctctaacttgctgagtcacttgctgacctggctttccctttgggtctctgctcatacatacgtacgtaatgggaggcttatcaataccctcgacccaaaatgcaccttgtcctcaaggtgaaagtgtggaaactgctctttagtagcctaaaaatcctccgaagtagcctcaaacgcaggtattttgtccactgtatgagagcttgaggttgcaccggcggggtcccggacgaacatcaagcacacttttcggctcaaaagtccactcaaactttgtagttagcccaagtggcgtaaaggtggcttgttgatgagggcccaaagcaacgtgaagtagcgaaacatgaaacaccagatgtattttggagtcctgtggtagttgtaaatgataagcaattgctactattcgagctaagacggggaaaggtccaaaaaagctaggcccaacttcatattgcgacgtcgtgccacaaaccgttgccgataaggtcagagtttcacatggaccaaattacccgaagcacagctaacaacactgcaccccaaagcacagctaacaacactgcaccccactcacacacaagtatttctctcataactaattttccctctgacttgctgagtcacttgctgacctgaccctccctttgggtcttcgcgcgcacacatatgtaaggggaagcttatcacattgaatcagtgaaatttcaggacattttttttctttatgtagtgcttaatacttctattattcaaaatgaatcgatttactgtatgttgttttcaatttattgggaaaattttgagcttgtaacaactgctactgattacattttcatcgtacttttttttttttttttaatttattattctttcttttcttttctacaatactgttagtttctttttgttttcaattacatactttcaccactttgtttagatgtacatttctctgcaaattttatttcctgggtgcaaaaccagtgcaagcgatgacttacagttgatctctgaacttgaagtaagttcatgggggaaatggtctattcgctgatgctctatagtcttagaacctttcttgttcttcgtcactacctgtggtgtgtttaatcaaacattattcaattaaaggttagcagaatttggtgcttgtctgttaatttatccttaatagtatgaactcttccttacaggcacttacatttagtgaataaatgccgagaattagaagatttggagcaaagaggagcatacttttgctactgtaattagctattcaagatttcaagatcagagtttctttgatatcaaggcacttctcttgggcttctcggaaaaaagtaaaaggtacttctcttggacctttttgttattaaattactgagttgataatttgatttttttacaaccattatgtgcatttgcaggtgtataaatgggacacagagtaaagaagaatggtgaggataagagatttaatgtgaaatggaccgaacgttgggatgatgtttttgttgaggctcttgtgcatcagcaaaccatggggaacagggttgataaggttttcaccactgcagcttataataacattttgaaagaaatgcgtgataaacttggagagccatttcagaaagatcacttgaaaaatcgtatgaaaactcttaagcatcattttaaagagtgtcataatctttttagtggtattaatgattttacatggagtccggagacaaagctctggactgcagagcctgaagtgtggaaagacctgatcaaggtaaattatctttcggtattccagattgttggactaaagtttattagtgcatatagctagtaatgtataaaacctgttgcactcattttttaataggcaagacctgatgcgagaaaatggatgtcaacaccagttggcaactatgataaattactgatgctatttgcaaatgaagcgggtgacagctttgcaatggccaaagaggacggaaaccatctagttaatttgaacattggtagcgatttgaacggtgatcttggggcctctcaaaatgaggtagcatttactttagaggacttaaatggtggaaatggtggaaattatgtgctgccaatttcagcagaagccaattcgcaaatcgattctcaagcaccttctctgtctgcaacatcattgaaaggcaagaagagaaaggcctcaaggaatttggactttgagagagagtttgctagtgttagggaagcaattaaagatgttgcggcggcaatcagggagggaaatgccattgcagagaggagtcgagctcgtgtttattcagaggaagaagttttcaaagaactagtaagcatcggtgttgatttacagttacggtttagggcctacaccttcctaattgcaaatgctgcaagggtgagagccttctttggatgcccagttgatgaacgcaaggactttctgcttcagatgatgtatagtcctcaagactgttgagtgttgaggtataagttaagtctaggcttgaaaagtgatgttaatttaacataccattgttgcgactagaataaaaacaaataatttagtgttacagacatttatagtttttcagaccgctcggatgttttgattgattatcaagaagatagaatcatattttctagttgattgtactttaaacacaagaagatagaatcatattctctagtttattgtactttaaacacttgttcattctgaatctgaaactctgggctgtatttttttcttcttcttcatattaatatagataaatgtgccttacaaggctttcttttaaaacataaatacgcatgacttgagtcatacggtagtagaattatagatatacatattcacacagtccacagagaaaaattatatatgaggcagagcttctgaatctggattggttccattttcttgaagcttctgaatctggtaactgacagtttgttccttccacatgtctttgtccagataagtctcgtaaaaggtaacttcaccatttgtttttgcagttaaagcagcagtgctcctagttccataacgaccctgcagataaagacaaaaatcccaggtcatggacaccaactttaatgcatatataaatacaacttttttaaacttgtaatgaatgaatgagtcaatgctcaccagtggggtgtcaacttcaacaaatatagagcttagattgaactcccagtcaagagcacatataccaggcaactcacttttatcagctttaactttgtctctcattagtttctcaaccatctctttcactggtatctcactttcatggtatttagtaagctcttccttgaacctcaattccaaccgctgagcctataaattgaatgtataaagcattgttgttactgaagaaagattagctaatgaaccccattctactgtatatgcattaaatttagaaacaacaaaaaaaaccttgtgccaaggagagttaagcttagcattggaaatgacatgaatgccagggggaacctcctgcaccagaattggctctcccttggggcggttcgatatgtacaccatggaattagaagaagatgatgatatatcagccagaatcaagttgaacccattatactggtgagcctcttttaccagttcctctgcaaattccttgggacttttattgctctgccatcattaaacacaacccaaaatgtatcatctaattgaaagagaattgctaaaagacattgtaattaagtatatcaatcgtgaattgccacttataaaaggtgttagtcactggtatgcaatagcgatgctctaattgaaaaggaagaagaaaaagggtgttcagttttcaaacacacacagacctgtaagaacagcagaggaaggtctccacgagtcctagcctcagggagtgaatgaagctctaaaacattggtaagtaaagccactcttccttgtttagaacaagccatccatgtccctccagcaacctcatctcttcctcctaaaatccctccattttcacaatcttcccaccaacccaacggcttcgtttccctttttatttttttcaacaaaacaattatcataaaagaaagaagaagaacaaaatcacacacccttttcatgattgattacgaatttacctgttgtgatactcatctctgttttggaaaatgataagagggtagagaggatgagcttgccatacaaacactgctatacacatgataatatattatcctttgttattataactaaataaacttttattgattactctgtttcttctagtcggtgattgagctttgtttgtagtttggcttttatatagggttggttggagttggaaactatgggtaccactgctacattccttacgcacttccaaacgaaacacgtggcagccagaaattcccattggacatttggacttccattaaagcttactgttataggattggtatttggcaccaattttataggtggtgttgtaggatcgattagagatatttttaaagttatttctttaagttatatgaaatacgatacttaattacgctatttggtattcggtatgatactgaagagcatattagacaccattgatattttttaataatttttttattattattagtgtaattaaatattatcattatttatttttaaaaaaaaattcagaaaaatattattttttatattttatttataattttataacttaatttttttttactattttaaatataatttttgatactataaattatcaaaaattttgtaaaaattgataaaatacttattatagctataatataaaaaattgaaacataatttctgtaagcaccaaaactaaaaaaaaaaaaaaaacattcttacaataatagtaaaagtgagacgattttctaacaaatttcttatatatatacatatttttctctttttatttaatattatattataattcaattttatatagatattattaataggcatagatcattattcaataattttttttttcagagacaatttattcaatagaatcttataaatgataactagtgatctatctatttgtttgattacataaaagtttcagtccatagattttattattatataataaacattgggacaattataagtgtagataaattgagatgactttttattttatttttataatcaatcttattattaactgctgaatggttttgataaagccagcccccactttatccagttgataattcataatatataagaaagatatataatgttttgtgttgaccatgctatatactactctactagtcaacatttctttcttcttttctcaaaactattgagtagccgcggcggctttcaccacacattttaataaattttatgccaaactaaaactagttaaattaatcactcactactatggcctacaattagttacaaattaaatatttacattctatctatttatataaggaaaacctaaaagtgataagattgttataaaataatataaannnnnnnnnnnnnnnnnnnnnnnnnnaagaagaagatgaagagagaaagag

SEQ ID NO: 19434 - DNA, 4376 bp, Cannabis sativa
gaattacacattactctgtttatttcactctgtttactgcctttagttagttggaatattgttgtgttagttggcagttaggttagttatttctgttcctagcttttcggttgttagttactattcttgattgttgtatatatatcctactctttgtacaaaccttcattcaattcattcaatttctaaaccacctatttccaatcatattctttataatgcttggatgcgtaataataacatcgtaatttcttggatcattaactcggtttctaaagaaatttcatctagcattttatacgatgaatcggctgctgcaatttggaatgacctcagggttagatttcaacaaagaaacggtgcagacatttacaatctcaggaaagacttgatgaacctaaggcaagagaatcaaacagtgagcatgtatttcacaaagctcaaaactgtttgggagcaattgtccaatttcagaccgagttgtacttgcaatggctgctcatgtggaggagtcaagaaattgcaagaccattataatatggaatacatcatgtctttcctcatggggctatccgatctttatgcacaagtgagaggtaatattcttgtgatggaaccttcacttgagattaatagagtttttcatctagtttcacaagaagaaaatcatagggaaaggcaaaatgtttctacagacccgaatggaaacttggcctttgcctttcaaggagaaagaaccacgggaaaatctgaaccaacaaagactcaaccaccaaaacgaggcagaccgttctgcacacattgtaacatgcatgggcacaccatcgaaaaatgctataagatacacggctatccaccgaggtacaacaaaaataacaagtccaaagaagctgcaacaaaccagctacagacttctaatgaagtaggttctagctctgcagaaaacaacaccttattacctcaactgactccaaaccagtaccagcaactcttgactcttcttgctgcccaaaccagcattctgccacctgctgaccctggtacatcgacaggtaagtcaggtattgtacttacaaactgctctcctttgcctaaaatcaattcttggatatttgactcgggtgctactagacacatatgctcagatatgaattctttccaaagtatccatactgtttatcctaccaaactaattttgccaaacaatgaacatctcatagtgtataaaagtggtaatgtctcacttgatagtcatctcatacttcatgatgtattgtatgttcccaacttcaagtacaacatcatatctgttagttgcttaactaaagataatgattacaccattaagttctttactgacaaattttacatacaggaaacgcgcaccaaaaggatgattggcaaaggtaattcggaaaatggtctctacatcttggataccacacctgtttctatcaatgcctttacatctgctgaaatatggcacaaacgtttaggccatttgtctaataaatacttagatttacttcaagattctttgcattgtaatactaagaatctacacaatgttgagccttgttacatctgccctttagctaagcaaaaaaggcttccttttccaaataatgtaaattttacttctcattgttttgatcttatacattgtgatgtttggggcctttatcatattacttctcattctaaccataaatattttttaactttggttgatgatcactcaagatttacttgggtctatcttctcaaacaaaaatctaatgttcttttcataatacctgattttattgcttatattcaaactcaaataccattgcattttcaaatgcttcaggtccgacaatgcacctgagctcaccttcaaagatttatttgctaagcatggtattttgtatgattttacttgcataaaaatgcccgaacaaaacgcagttgctgagagaaagcatcaacaccttcttaacgttgctagagctttattttttcaatctagagtgcttattcaatactggaccgaatgtctactaactggtatttttttgattaatcgtacaaagcagaccccttatgaagtattgtttggtaagccccctgaatatgacaacttaaggtgctttggatgtctagcatttgcctccactatttcttctcatagaaccaaattcgaaccaagggctagaacatgtgttttccttggttatccgagaggtataaagggttataaattgtatgatctacaatctaaacaaatcttcatttcacgaaatgtaattttttatgagaatgtctatccttttcacaaacttaacactaatcataatactattgatccttttcacttcttattcttcctaatactcatgttactcacactcacattaatgattatcctacacaagacacttgcactttttctcctaacccgattttgctggaagaatttgatgagagacaagaaagaaatgatgctgaaaatactgctacatcacaccagcaggatatcgaaccacaacctgctgaataccaagcagatcaaatgatgcagacccttctgcaccctcaaaccagcaagatcaagacacacaacctgctgctataccaagaagatctactcgattccctcgtccacctagctacttaaaagactttgaatgctataacttaattcaggataaaaccactactacttatcccatatcaaagtttatgtcttattctaaactttcaaaaacttacaaagcattcattcttgctgttacagctgaattcgaaccacaaacttacaagcaagcaatacaattcaagcgttggttacaagctatggataatgaactcttggctctcatcactaacaacacttggaccgtggtgcctcttccaccaaacaaacgtgctatagggtgtcgttgggtatacatgatcaagtataatagtgatggaagtgtagaacgcctcaaagcccatttagtttcccaaggttacacgcaacaagaaggattggatttttttgacacattctcacccgtggccaaaatggttactttcaagcttcttcttgccattgtcaccattaaacaatggcacatattacaactcgacatcaacaacgcttttctcaatggagatttagacgaggaggtctatatgcaaatcccacaaggcctcaaaatcccctcctttgtcacagggaacaatcttgtctgcaagcttcataaatctatctacggatttcgacaatcctcacgcagtggtataaaaagcttactgatgcacttttgcaagaagggtttactcagtcccaagccgactacaccctcttcacaagaggatctcataacacatttgtggttcttcttgtctatgtcgatgacattataattgctggaccgaacattcacatactgcatactttacaagactcccttcaagcaagattcaaactcaaaaccttgggtcccctcaagtatttccttggttttgaaatagctagagtcgaaaccagtcttttcttgtctcaacgcaaattcactctgcaactcattcatgacaccggttataccaacagtaaaccagctaaggcccccatggatccaagacaaagacttgatgacaaagaaggagacactctcgacaatccgtcacactatcgtcaacttattggtcgccttctttacttgacactctcacgaccggacataacgtttgctgtaaacacactaagtcagttcatggcatgccctcggacacctcacttggcagccctccatcacctgctacgatatttgaaaggatcccctggccaaggcatcctctattctcccacatcatctttacatctacgtggtttttcggattcagactgggctacttgccccacaactcgtcgctcaaccaccggcttctgcatcttcataggagactgcctcatttcatggaaaaccaagaaataaccaactgtttcaaaaagttctgctgaggcagaatatcgagcattagcagccactacaaatgagatgacttggatccaatatctcctcaaagatctccacatcaaacaaccaacaccagctttcatctactgcgacaaccaatctgccatacacattgctaacaaccccacttttcacgaacaaactaaacacattgaactagattgccatttcattcgtgaaaagattgccaattctaccattcgccttattccagtcagtagcacacttcaattagcagatgctttcaccaaaccctacccttaccctctactactctcaattctcatttgtccaagatggccatacatgacatatatgctccatcttgagggggggggggtattagtatttgcaatcctgttattt

SEQ ID NO: 19435 - DNA, 4869 bp, Cannabis sativa
  modified_base (2788)..(2806): a, c, t, g, unknown or other
  modified_base (4005)..(4014): a, c, t, g, unknown or other
  modified_base (4281)..(4284): a, c, t, g, unknown or other
  modified_base (4346)..(4346): a, c, t, g, unknown or other
tatatatatatataaatgttttcatttcatttacatcccatctcttatatatgaacataccatcatttacatatttctgcatgaaagtctatgtcatgatctgattgtttgttcatttttttttttggtaatgctgaaggaatgcttaaatttgtccagggatttcgcgcaaggagcctctagacaaaatttactaggttggcatgtttcttttatcaagtgagaatcccatctgtgtgtttgaaatactcaattctgaaactattttatgattttgttctgttcaagtaatatggctctttgtttctttttaaatgaagatcacttgctgaatcttcgcgaatcccaattgtagttacaaatcaagttagatctcaaactcgtgaagaaggttcccagtactctttccaaggtaggaacatgctgtcatagatgaaaccttgtgttaaagttatgaacactaacagtttaatttttgcagcacagcgcacagacgatctgtcgggatatgattctcaccttgttgctgctttggggattaattgggctcactctgtcaccattcgtcttgtgcttgaagctaaatcaggttggctttgatgcttgaaccatactaaaacaagcttgaggagtgttggtatactatctgtcaccctatacaaatgttcggactcttctttctttcaggtcagaggtttatcaagctggccaaatccccattgtcaccgccatttgctttccctttcattataacatcagctggaatatcattgttaaatgattatgggacagagctgaaagggatggagataaacagaattcatcaacatggtttgttaaaaagacttgttctttggtttatgttaagatgccaatactaaatagattatttttattaacttcaagtgatcctagaacttataatgtaacttcatgcatttcatttggtgggaaaataataatagtaataattgaattttcatgctgtaatgactaaaatgcaggtcacagtgacatcataaactttgatgggaagggttgcagtgataaatgaaggaatccaacctaattcaatttgtgatcatgctgcaaaaatttctgtggtgaagtaagttattcatataagttcatattattctacattattccatataaatttatgtaagtaaaaaaaaagtagctagttttaccaatgacaatagattttttttttttaatatgggatcttgcccatcggaccaagagactgtaggaatggctatgtaggtaacttggagggacttgaatattcttcttagtgtcaaaatgttaaaattactacacatgctattatcaacaataatcaatacaaactcatgcgcatatcatctaaagatgagttatcaaagtcaccatacagaaagttttgttcaaatttgaattaatttgaaattattgcttaaatatagcttagttatcctcaaagtttattagcaacaacgatatgatgtcgagtacggatgaattaacccattatcttgaattcattgtgcttacgaacattcataattaacacaattatcatatcagaatagacaatgatgatcatacatccatcgtcatattcaattattcaaaatatattcacttataatttatgccttatcttgaacctcaaccacaaaaatatcatcataaaagattcactagttcaactgaaactatagcaatgatcaaaacaaaatacactagtctcttgaattcatcattatggaacaaacataagaatttcacagcgaatgcccatggaagtttcttagcgaatccattcctataaaagatgtcatataaggatcgatagactgatatatacctcattataaccagttggcactcattgcaatactcccactgagcatgtagtgacttgacatcttttacattcaaatgtgatttcaagatttatcatttcaaggcctagttcaaatttctaatgagagatcggtgtgacaaaacatattatagtttcattcgataattaagtaggagaggttttaggattgcttaaagctgaaagaaaataccttagagcattgatactatgtgaaaacaaggattatgcaatctgattgttttcttacctaccttaatggtcaattaacgggaacgatcatgtcatgctagagtcgttcaaacaaaacatatgactcttacacaggtaaggacaactacttcaaatgtcataaccaaaattaagttaatctactattgatagggtagaaaagattgtatggtttatgacaactaatgtgtttccttcaccatctaagcatatctacaacggaaacgatcatgttatgctagcgtcgtttaaacaaaacatacgacttttacacaggtaaggacaactacttcaaatatcataaccaaaattcagttaatacactaatgataggatagaaaatcttgtgtggttcatgacatctaatgtgtttcctttaccatttaagcatcaaacctaacaaattgacatggtgactaaattgcatgtatagatcttagtattaattgtgattgatacgggagaaaagtattaacataaatcacaattttcgataattgacatgtgaacttacgacaggtaagcatagatatttaacgaataattttaatctcataatatataataatgccaattgtgcatttttttaatttctagcaaattctattgtcgaaaaaatcaattaaatattgacacatttttcatagtatacgtcctaaaagaattcataataataataataataannnnnnnnnnnnnnnnnnnaataataataataataatgaaattcataaaaaaaaaatcgaaaatatcacacgggcatatatataacaaaattatagaatgataattaaatgaaaaattgtataagtttaaataattaacgataaatttatcacaagtctcacaattttatgattagcaaaattgacatgctaagactcacgataaatgagtacataagcactaaattaattattcactgatataattgtattatcaaatatgttaatcatctatcaaataattttaatggcatgagtataattatgttttcatccaatgaaataaataaaataaaattgcgagaaaaaatgatttaatttaaattaattatgtaattatgtatcaattaacaatttaaatggactatatctataatataatcacacaattaaatggagcaaaatagtgaaaatttggtccaaaatgaactctttacgcgcccccgcgtgcctagaaaagtttcgattgtttattatttttttggagaaaaaactatgaaaaactacatgtagtttgcaaaaaacaacatatagtttatgagaaatgacatgtagtttgtctaaaatagacatgtagtatatacatgaaatgacatgtagtttttcaaaaaacgacaagtagtttatcaaccaagctaaaaacgacatgtagtttatcaactaagccaaaaatgataataatattgaaaaatgacatttaggggctgaaaccatacaaaatggagatgtcttcaacgtcttgatgggtcatgctgacctgatttcgtacccgatcaccgatccaatcatattttagcctttggtacaccagttttgatttcgtttggggggtttgttgcaaatttcacgatctcatttaatatttggtgttgaattttcaggaattatgaaccattgttgattttataaacctctttggtctacacacatagtgtaatgaaaactactcttccattctctcacataccattagccacgcccatctcacaccttattcacaaataaagggcacaacccttttataatgaattatggactaattgggcctacatgcccaatgtgagagaattagttgtttcagctcaatagactgactaaagatgttttagagcgtgtccatgggcttcaagcatgttagtacgttatgtccaggatcggccctgagttgaaatgggctannnnnnnnnnaaaaaaaaaaaaattagacctttactacaaagataaatagtatttttaaaaattattaaaaatatatatattttttaaaaagtaattttttattttggcccctaaaatgagtgggccctaagcgcgggcctagcccgtctatgcctcgggtcggccctggttatgtctatcctattatgacctgatagtaatactatgcactgcccattatatagttaggaaaatttacaaaaatactgaaatttagattaatttttacaaaaatannnncacacggaaatattttcaaaaatactgtattttataaaacaccagtagaacacaaaacagancaactcaaaacaatagtagaacaattataaaacactagtaagaacttaacgcagtacactgcagtatgaaacttataaaaaaaatatagtaaaaaaataaaaaaatactgtatgacagtatttttctaaaaaatggcaaaagttagtatactatgtaaattttcctatagttatcattatatattaatactaagcgaccaacacttaattatattaatttacctaaaatattttaacacaaaaaacatctatttaagattaaaacattaacttttctgcatgcctaattcatgctagcatcattccattcctgctaaatttgagatataactgatctattccatgtgtgtttgggtttccatgtattttaatttaaatagtaatactcaaaaggcggaaactcttgtagtgttgagcaccaccaatagcattgtctgtaattatgcaaacatttttattttgtgtttatatctatttcatccgactatgactgggctactcaggcccattggtaaagcccaaa

SEQ ID NO: 19436 - DNA, 1906 bp, Cannabis sativa
gcacttagtgcggattggatgttgtttgactaaaaaagtacggattggatcggatgaacaaccctacttaaatacttacattattttcaagatgggcattcaagatggttcgggatttgtgttgggctcttcagttgtcccttttgatctaacacttgaaactcatatgccgagctgaccctaaatataagcgggttaagtttgtgcttaggattcatactttttaaaaggctcaacataaaaaatgaaatgtctcattaagtttttatttaaataaaattaagtatattataaataacaaatatacatagcttggttggcttaggagtatgatacgttatataatgatgtcagtttgagtctcgtgacactctttttcaatattttttcatatatatttctgaacgtgagggtcccaaaatttaaatcgtcttaggcctacataccctgctcatatggcggaagccttagctgttcgacaatggtatatttttgtgatcctaaaaatggattgtcttatagtggtcgatgtaatcaataacactgtgaaagagcagtcttgtgctagaagacatatcacacttgtgcaaggaatcaactaatatttcgattgtgcattgtaatgtattagctaattttgtggtttattctcttactaaattagctctttctctttcttcagctcgagtttggtgtcttgaccaactgtcatgtacttatattatgagactgctatgagatagagtttagcggtttttcataatagcttttaaactaaaatgtaatttatatactagtgctttaataatttaattatgttcacctacctttttttatcaaagaaaaaaaaatcattaattaactgaacagattacaaacaaacaaatcagttaagactaaaaaaaaagcttaaaaaaacaactcattttactcaattgaagatttgagtaattaggtgttgttaaaaggagttcatattttttcctttagtgctatacaatctgtaatgcatcatacacttaatttctttcactatgtacacaattgtataagaataactatcatagaagcacttatttcagttaagccaaataccatgcactgcagctgcaacgattgcattcactacaaaagccaaatgacattatcttgtgctattaattcaattttttcaactatcaaaactcaaagaccaagcttgaaaacccaaccgatgaaacatagaactcacaactctatttgagaaagaacagtcaaagaaaaaatagaaatgactccctttctccagaccacaaactggcaatcaagagagtttatcagagtatgttcacccacttttactctttctaaataaatatattttgtacataagcacattacgcgcgacctaaatggtaacccgagtggaaaagcctccccctttaggtctctacttcacgatctcattcttgctaattgtttagttggaactcaaatgaactcttcattgctggtagagacaaccccaataggattttggagaacattcttaagccgagaaagaatttcgaaagttgcatcgaaaaaagtagtttgtatcgttaaggaagggcgtgtagcccctttcgcctctcctattagttcggagaaaatgatatgaaaaaaaaaataagaaaaagaaaattgctatgaaattactaaagaaggcatacaaataacatttcaattgaaaagattttagatctcatttctgtaataaaagaccaaaaaaataaacactaaaacctgtaattatgtctaaaaaagactcaacttttattttccttttcagttttatcttcaatgagaggagataaatcaaaagacaaaaagggggcacaaagcctattccaccatcaacaagtggagccttgtttgaaccttggta

SEQ ID NO: 19437 - DNA, 3306 bp, Cannabis sativa
ttgtgtgtatgtacttcctatggtaagctagtatcaacgaggtgatgatgactctggtacacaattatactgcacttttgcctatgtcgacagaaagtacttgtaagagtgttttacatcttgtgctaacctttattaaaaggaaattccaaggatgtacatgtgatagctttgtcaaaagccatactgtgattattacttgtaaaagatcattggttagttagtatctagttatctaaaacgatcttgcttgtcatattctgtgttatgatgttttcgtgtcatcattccgggatattcccgtgtatctgctctctcaacttattttcctttgacgctgattttcatcaggacagtaaacagagaggcctgatgtatcatctatttatgcatatgtgattgtgtcttagtttatatatccgtggataagatttttttgtttgctatagcttatgagtttctctatgctatttttcatcgtgtaggttacagggagtgatgatgggggcattggagattcaaagccttctttaatcgtccttgcaagacagtttgttaccgcaatgttggtcttggatacttggcagtacttcatgcacagatacatgcatcacaacaagtttttgtacaagcatatccattctcaacatcaccggcttgttgttccctatgcatttggagctctttataatcatcctgtggagggacttctacttgacacaatcggtggtgccttatcttttctcctctctggcatgtctccacgagcttccatctttttcttctccttcgccactattaagaccgttgatgatcactgcggattgtggctgcccggaaaccttttccacttgttgtttagaaacaataccgcatatcatgatgttcaccatcagctatatggaagcaagtacaacttctcccaaccattctttgtcatgtgggatagaatccttggaacctatatgccttactcattagacaagagggcaggaggaggctttgaagctcggccttcaaaagattacaaggatgattgattttcatggaataaacataaacttattattatttgtaccagtaattttttcccttgtgagtgaaccacacacactgcgtttttaatctgtatatatacatatactcttgtgtccttttctctagatttcttttgtcgatattaactctcttataattttaataataggatctattcatgtatcgttttcttagggaaatataaagaacgatgcctttatatttaaaaaattatgtttcactttctattttgtttgttttttttttcttctgaaaaacctcactcaactcaagataggtgagcacatgggactcacctcccaaaaaacgaagcaaaccactacaattatgcgacaatgagaaatccaacaaatagataaattgccaactgaaagaaaatgaagttattataactaaaaacaaggttccaattccgtgattgacaatccaccaaagattgcaccaaaggatggcagttagagaaaaactctccccatcaagatgcaaatccaaggcaagctgaaccctaaacaagagagcctccaactctcctttcaaaacagaggaagactcaattttagtagctccaaacaccatcacattcccattagcatcataaaaaacagctgcaactgcattaaccccattagccgaggcaaaatccacaaaatctctaatacgacttggtcttggtaaatcccaccgcacctattaggagaagaagaatccgtagcagcagacctccaatgtttagcaaaattcgaatcaaatgtaatgtgcaaaggttccaccgaaaaagaactccctcttatgtcttccacctttgaacattggcgaaggctttttataatggaccatattacaagtagctttgtaaatattctctcgagtattaaccagactagtatactcgaagtatcttaattcttgactttttcccttttttgaggctttatttcgacttggagctttagaacttcttttgtttcaggaatgattcacattagattccaaaacttttgtttattgactcgtctgtagaggagcagcactatatccagtttgtgccactccaaaacctgaaaaacttttctgtgcagctggttgtccagaggcagtaggtcctccttacactgttgggatggtgagtgtacttcctaaaggggaaatagttggggcagaaaattgaggagcttgagttgttccactgacattggcggatggtgctgggagcactccttaagcatggacatatgcctcttttaggtttatgaagccttgggctctggctaagaaatcagacaatgtgtctgacctttttctttgtaaatctccccacaagaaatatccaatagaaatttctaatattgaagttaccaacttcatatcatcattaaccttagtatttgcaacaacatccatcattatatggatgtacttcttgaggatctctgcagttgttgtttgatgtttgttagtgagctgacttccatataataatgttttgcggttatgaatttcttcttgaacatcacttacaaacccttccaactatgaacagatccaggagatagtcttttccaccaatcttctgcaaattttgtaaaagttagggaaaattagagacatttggcatcgtcacttgtatttgctacttgcatcaaccaggcatatttagataagtgggccctagggtccgttctactttaattcaactccatttgaggcaaatggaagtgttcaggcaagggcgtctctttattctcctcacacattgttcaagatcttcgtctttcgaatctaatacagctccattatactttgaggaaagtcactctacaaacttggttaatttatcaacttgctcttctagacgcttagttgttgcatcttgagatttgcgttcacaaacacgatcgttgatgtgatttctgagatcattttcgcgaggtctgtctctctcgcttctagcttttttccccattacatttaattgtgtttggaggtcttgcatagtcatactctctccataaccttgtggaatttattctacatcatcatcgattcgatccatagaattgttgaggttatccccacctcgtcgaactgtgggcccttgtacctgagcattaggcctacctttcgatgtagctctgcctcacagattggtaggatttcctcaccttggagcattggctaccctacttctcctttgaggttggttggcaacatttgtgtcattacacagagcaatgggagtagttctcc

SEQ ID NO: 19438 - DNA, 9103 bp, Cannabis sativa
tgaaaaccagacacaaagttggtttccaatagggttgacatatcttcagcattgaactctatggacttcttttgtattaataccccagcattattcacctgaaacattgtgtaacgatatatattatactgaattgaaagaataggttctattactgattaaggcagagtttacagggcttatatcactatgactagttacaagaagtaactggtaccaaactctaaccaataacagaaacacaacagaaaagtttaacagttgtaattaaaaaagtagcttagtcttaacttaaaatccctagctaacgcatggaaacactagaatatacacactaacatacaatattatactccttaattttagctaatattaaacatattaaagacccacaatctataaaaacagtagagtatgttgaaccatatttaagaacttgaaatcctcattttagaactttgaaaggatactttggagatctaactaatattctaactttaaactaaacaaatatatgggcatttccccaaaatatatattgtttataatttgttgacctcagttttagcaaacgacgctacgtctttatagtgatcgaattgaatgattaaataataataataaaaaaacaataagaacacacaaaatttatagaggttcaatcccgtgataatggtaatattctactcccattttacttgtattacatagagaattataaaaatcacaagggttcggccaagtgagtttcttaacagtctcaagaaagcttacaaatattttagcagcataatagctctttagaaaggtcaaaaaaaaaaaaatcgcactccactatagggaaaatacaggatgaaatgtcccgtaaatataggcgaagaattcgacaaactaaatattaaatcccacgactctctcaatcagatataatcattcccattaaaataagaattctacttaagctataattgaggagaaatttaaggaaaatatcttaattgaagatcttcaattactgaattcttctgcgcgaagaatggaactcagattggtgtatgtgattcgcttagagaagtgcaaggcattgaacttgcttagataatacctgctgaataactaaacttaatcggtttggctctgatttcatctggacgaaaacctgaactagtataccgcgtctaggtgaaaatatacttaatacttgttaccatattgagtgccacatcacattgtgggaagatttgaataacattagttccccaagtctgcgtgagaactactggtcgcattgttggaaacacgtgtagggttcacatgccttactagaggtgaaatttgccctgcttttgacgtgtgtatcttctttagtctctttaaatatctacatataatgcttattcaaaaactgagaaatgggaaaacgtgttatgacggttgtacacctccagacctttaatgattattatatattttggcagtttttgggagcaaaacctaatttcaattgcatatcgagacttccctttttttactttgcatgagcttcattcttcgtccagaccttctaccaagataaatttattctcgacgcaacagtgagtaagttttttcttttgaattcttttttttacttcgctttcacatgcctagaactacataaatatatgagtatttcgttgtggcttgctagattctaggttttctttgaatttacttttattaaaaaagaaaagaaaaataaacccaagaatcatgcgccttgactcgaaaatgtttggtgaggaatttttgcaagaatagttgtctctttttccctatttatgctctttagcgattctaggttttaaaatcctaagatctgtttttgcacaggtgtttcttcattatgacggatttcctttattttaatttgtgttttccttctattcgaagtacttgagatgttcttcttttggagggacgttccaaacctatttggatactaacctctctattcttcttcttcatagatgaacccaagtgacttctgaggaggtgatttttgaatagacgatgaactgctccaacttcttcataagaatcaacctaggctctgagcatacatcctcatctccgagaaattcttccactagtttcagtttctctagtagtaagccagcagtgattccccagaacaagaaacacaacaccaccactactctaaccaaaacgctggagaagtgtatgggcgtttcatgtgggagttaaaaagaagttggaggaaatttcttccacccccgtggatgtacagagggaagacgtataggatacactccatgttggtcaacagaagaagctctgcgcaggatgaaatagcagtcatggttgctcgtcatagttaaagatttatttttgaggttaggtcaaaactggctcgtacaaagaaaactatctatgttatatcaattaacaatcctcacatcgccaggtatatggaagttgtcaggcaaaccgcagtacccgtagagcctaaggagtaggaggaaagcacggagcaggatgagtatgagaacctagaggctcctgagggggaagtggagcatgatgttgatgaagagtttccctatggaagatttgatgaggccgttaaacttgtatcctcatctagccagataccagtccttggtgaggataccatttatgaggatttggtggaggcaatactgatgttgctcaagtctaagccactactgcactgggaatcaccaccattgaagctaactgtaaaaaggctaaacaacctctttgctaaaggttgggtctaagatgttgcgtcattcttgccgagggaggaccaattgcctcataccatggtgaatggctttgtgcctttttggggccctactcttctaccccttcacccttacttccaaaaggaagccaactactacgggatcttcccgacacatataagtcttcaaggaataaaatttttatccgcactgttgatgtttatgttgagcagggatggggaatgccttctcctcatgacattattggttatttgatcttaagtcaaacaaatgtcacaaatggtccgagtatttttattttttccagctagaatttgcatggttgataaataccactgacaagaaggtttccaagattggtggataaagcatcgattaatacattactgaagggctcgaggcagaccatctttcttttcagcatgtcgaacccttttaccgccccttatacactttggcactaagaaatagggcccgtgcaatcttgggaatttttggagaagcttgggacatatttgtgctagccaagaaggtgaattttcaaaagtacagattatatccgtccaagaagtctaagaaaaagtctttcgtgcctaaggatcatccttttgatcgggatattccaggctaagaaagacatgcctgacatgttatttctccccgcaaagtcatccgagtgtgtagataatagtacaaaaggagatttctaggaaaaatctatatcgaagctcatgaataaaatgctcatgggagatccaataccataaacttgataataatactggtggtaatgttcttggaaacaatgcaccaatggaagtgagattagagaatggtctcttattcttggtaagtgtatatgttaatggtaattgtatgaagacttagtgtcgtaccaacatgaagaactcaaggaaattgtgaaaagagaaggtcttcagggatgatgtgttctaggcacaaaaaagagcttgaagatctagaaagcgatcaaaggtcagcaggtcaaaggtcatttttgccgtctcaaaccctagtttatcactgtctttatataggcctaggtttgggatatctcacttcaaagcccgtatatttattatgttatgaaaatatcccatactcttggtaaatgttccacaattatttggattttcgttgaagatgtttattttcatggtctcttgaacttgcttatatgacattgtactttgagaagggcaaaattggataaagttcaccacgggatggcacaagttgactaccgtaaatagagagtcacaagttttgtgacataactctcctaacatccccttatggtccacacttaataaaaccaattaattcttaagtaaagtgtgctaacctatcttgtcatccaattttgagcacgataactttaaaattatgctatgaccatgagacacacatagatcagccttgaatagacctttcaaattcaagttgaaccaagtcttttggataaaagttgagagacttatgtctattttactaaagggtagtaagtacatttcacctccaaaactgagatgtgccatgtcatcatgattcatgccacctaatttaggcccaggttggtcatagatgttcttagacacctcagggtgggttttgacttggtttttgatggtgaactttcttttggaggttttggggttctgaaatctcatcttgacatcaaaaatcctaacgagagacttgccccatcttttagtgccaaaagatggcacgggtcagctagggcttatgggaatccctttatgttttttcatgcttagttttaccatgtggatgctagcaaaacactttggacacattaattcttggccaattactgggagagacctgcgccatctttcgagtcacaatgatggcacaagtcggccataggtgttctacacctctttgtaacttttctcactttcttttggtaccttggtgttggaaatatactttggccaaagaaactcatccccattggatgtgactgacctgtgccactttcttgtgcacaaagatggaaaatgtcaggtaggtggtttccacacgacttagtggccttcctcacttgattttgatgtgttgatgatgaaaaagtacttttgaaaaaaaaaaatcgttgacatttggtgtggccgacctatgcccctcatttgtgcacaaagatggcacacgtaggttagctaggtatttaagtgaaaaataatttctttcattcgtgttgtactccttggtgttgagggaaaatttttagacaagtcttctttggtgttttgagagtagagacctgtatcatctttttatgcaaaaatatggcacaacagacatgctggaatggcctctttgtgaaatcttgacattatgttaaaattctagctattttatgcttaaataagtcaagtcgttgttaatttcgttattaaattgtggtatatagggtgaaaatggtgaaacccttgtggatgacaataaaccatagctaggttgggtacacttaggtgtgggtcctggtacaaaatagttggttaatgtttttatgagtttcctagaggtatcatgagcctccatttaaaatgtcttaacttattttgtctttccgagtcttggtcaaagctgcatgattgatttttttgacttttcgaaaatcgggtataaaaaaaaatgacgtttgtatatttttaataaaatgatgatcaataataattatatttttttacatctttaaattggagtacaattacatgtaatgggctaaatatagcataaatttattttgccaaacttagcagaaattttacattgtacgttagagatgatctaataacttttgtaaaatattggtttaaaatagtatttaatgaaaagagagtgtgcagtgaaaaaaagttgttgtgaagatagaaaatagtagcacctagtttgtggtaacaaacaatgtggatatatatatctttcataataaatgtgactatctcaagaaaattgttcgtttaataattctttttttttttgtaaaatttaacggttaaaagtaacaccgttaaatcaatcaagtaattattatattttttttaaaaaaaatagttttaaatatttaaatctaatttatctattaaaatataacatagataagaaaaattaaatagttacaggtttcctctggttcctgctctctcagctctcgagctggcgccatggcaagaacgagatccaagaatcatgggaagcaaccttctgcaactaaagctaccaaaccttcgaagaaacgaggcccgtcctcgtctggtgatgcaaagaaaactaaaataatggatgaaattctggggattgaacccatcgttttcactgatgaggaggataaccctgaaccagaccctgaagctttccaggccctctctcctcgagcatccttgcgtgaactgaagcgccaagatgatgttcgaaatgattttgctcacttcctgcaagcaaattaatcgtgcagcagagctttatcgcaaggtaattcttttgtaccccctattcttcgatctgattctgtggttaggtgtttggataattcctttcagaatattgagaaaactggcagtgatgaattaactgtgaagattacaatggatgatattgaggaagagatatcttattggaattcagctattgtttgttatgttttgggtgtcaatccactattggaagttcttgaggggtttgctcggcgaatttggaaggaaaaagtggataaggttggacttatttcatatggcatcttcatgattaggttctcttctgttgaaattagggatagtattcttaatggagggtacactttcttcaataagaggcctgtgattatgaaggcttgggatccagacactaatttcaggaaaggatatatttgcaaggttcccatttggattcaaattgaagaactggatctgaaatactgggggcaaaagactttgttcaagattgtgggacaaattggtgaacctataatggttgatgaagttaccaagcaaaggtaaaagctcaatttctctagagttctcattgaagtctctttggaactagagttgccaacaaccattaaatttgaaaacgaacattgttacactggatcagtgggtattaagtacgaatggaagccaactatttgcaagaattgcaatggtttgggacatactacagatgaatgtaagaagaaatcgactatgcaaggcaaacaatgggttgtcaaaggcaaatcaggggtgcaaactgatgctgcaaactcagggactacaacagatttgaaggacggatctgctatctgtttgggtcaaaaaaaggtagaaataaatgctacaacagctactgctgttcttaatgcagatggggataatgagcagtgtgctggaaggattattagtagagattctgatgggttcaagccagttactaatggctggagaaataaggggaaaaaacagcaaggtaatgccagtactttgaactcttttcagctattacaggagcataatttggtagtggagacgcaagttagtgacgcaccaattgcacttcaagctaatacaggaggagggggagagcctcccatcttaaatggatagaatattagcttggaatgtccgaggagctaataattcccacaagcaaagtttgatcaagcaattgatttattcacataatgtgggtcttgttggtctccttgagacaagagtcaaggcttcaaaacttggaaccttgtactctaatatttttaatggttggtgttttactagtaacaatgcatggcacaaaggaggtagaatggtggttgcctggaacccgaatactttttgcattaacatactcaaatgcacaagccaattgattcatcttcaagtgtccacttcggatggtatgaattttcttgtcacatttgtttatgcttttaatgatgaggagggtaggaaggttttatggcaggacttagtgaccatcactactcatgacccttgggtagtgttgggagatttcaatgacgttttggaacaagaagaaagagttggaagcagagttcaaagcctcaactcccatgctttggaagattgtatttcatactgtcatttggaagacataaagagtagtggtaagttctttacatggtgtaataatcagcaaggaagagatcgaatttattcaaaattggaaagagtaatggcgaatccaaagtggatggatttatggctgggtgctgaagcgattttcctaaatgaggggattttttatcactcccctgctttagtaacttttcatcagcttaatcgaaatggaaagacgccttttcgttactttaagatgtggtcttctcacccgaaatatgcaacacgagtacaacaaatttggcaacaacacttttctggtacaaaaatgtaccagattgttaccaaattaaaggctctaaaacctgttttcaagaggatcaatcaagagggcttcacataccttcaagctgcatccattctagcagctaaaaacctgaattgctgtcaagaaacattgctactggaccccctgaacccggcattgcagcaggaagaattgaatgccaggatagctttcacacaagctcacaagaattacaagtcttttctccgccaaaaggcaaaaaccagctggacaagagctggtggtgataacatagcagtatttcatgcaagtctcaatgccagaaacaaccaaaatagaatcctatctattgtggatgcacatggcactagagtagatgacccgaataagattactaaggtattcttcgattactatcagcaattacttggtacgaagatgatgaatagaaggaaagtaataggccaagttctcaataaagggcctatagtctcgatgcaacaaagcctagctctcatggctcccattacagatgaagagatcaagaatgctatgtttgctattcctaattccaaagcaccgggccctgatggatactccagctttttctttcaagataactgggacttacttggaagtgatgtctgtgatgctgtgagatccttcctccactcaggcaagattctcaaggagatcaattcgatggctcttacaatcatccctaaagtgaaatgccccaatacaccaagtgattctaggccaattgcgtgctgcaatgtgctctataaagtagccccaaaggtactctgctttagactcaaggatatccttcctactattgtggcacaaagccaggggggatttgtcaaaggcatattcattgcccacaacatcatgat

SEQ ID NO: 19439 - DNA, 3536 bp, Cannabis sativa
  modified_base (2916)..(2922): a, c, t, g, unknown or other
  modified_base (3174)..(3181): a, c, t, g, unknown or other
ttattctgggtctgggatgtttgagctttctcttgagaaagttaatgctctttctgaattataattttgtgttgaattttggttcttcgagatcttctaatgctagtgggtttgggattttttttttatatataaatattttacttttattatgatatggtcattctttattgtattttatttattatttatttaataaaaaaaataacaagaatttatacttatgcaactatctgaattacccatttgatcctttgtgttctgctgtttctgaatttcaaaatatgaaaacatatttcaattttgtttgacagaaaaatctcctttttaatatatttatatatatttgaagtattactgaatttattatttctattatcatttattttattttgtatttatgcttgtaaagattaataatgctgtctctgcagcagtacccctaatgttctgatcttctctgcatcattgactggtttattttttatttgctctctgtttaaaattttgggtctttgagattcttctttggaactctgagcttttagcctttaggtgggtattttctgagtacattaaaaaaggttcccttttatggaaatgggtctgctttttcacatctcatcataatcaataataacaataaaaatactaaaccggcaattataatattattattaatattaacaataatagcatttatccattttctttcgataatacactaattaattgcactaatcttcttgtaaaaaatattataataatagtaataatagtagcaaaaactaataacagcaaatggaggtcatgattcctactacagaacttgtctcatatggctctatgctttaaactattccaagggttagtttacttcatgttttgtctgaaagcttttggttgatgtaagcatgtgcagataaggagatatgattatggggtttttttttattatttatttattttatttttcaataaaagataaaatctttgtatattttaatatcagagaatgtatcttcctttgttcttttctactcaatcatcatcatcatcatcttatatcaccatcatcattttcttcttgttctaactgttttctcttatcattgtacagagatactgatatatatatacgtttgtgatccaaaagaagaagaggaaaatcatagagagagaaagtgttcaatcaaatggaaggtcatgacacattttctgggctaggaaatggtattggtacccagatagatggaaaagtcttacaaacatttcagaagaactttgttcaagttcagaacatcttggatcaaaacaggctattaatcaatcaaataaaccaaaaccatgaatcaaagattccagacaatctcagcagaaatgtgggattaatcagagagctcaacaacaacataaggagggtcgttgacctttatgctgacctttcaacatctttcaccaaatccatggatgcttcttctgaaggagactccagtggtgttctcaaatctgatggcagagctgggcttaagaggaatcgtcccatttaaatggtttttttttttctttttcattttttttttttttggatgtgggaaaccaagtcttaattctgtggaaatgatataattaattatgggagggattagattatgtaactctattgttatcaatagtgagaaactgtttactgcctcactcataagtcatttgtccttacatttgttagacaaaggaataactgtacggaagtatcggttgtaaactatggatctaattcaattcaaggaagaaaagaagaagaaaaaaaaatccattgggggtgttttttttttttttttgggaaaaatgattgtgaaagactgtttaaaaaattagtctttgcctttctagttttcagttgtttcaagttcatgatcttcttattatcaacttttacagagcatcagatgagatgagatcttagtctaatcttgttgtcataaattcataaaagaatttgtggttttcttcaaaaaaaaaaaaagaaaaagaaaaaataaataattcttcttattaacttttgagtctctcaaaaagactgaaatctgatatgggtctaccaatctactttttcattaaataagtatttattattattatacacaaatcaaatatattactactttctaatgcaaactccagacttgccctttcatttcactgcattttcaaccttaccaaacagccaagttagctgagaaatagagagagagagatttttctaactttattattctatatatatatatataaatttcataaatgaaggggcaaaacatcctcttttgaactacacttttaggcacataaatttctacatttgattgttattttcagaaaatcctgttgccaaggggtgaacataataaattctacatctacagtaagtttcatggtgaagatggtatgaaataattgaaaagaaagcagctttttttagattatttatttatttttgagagagttttccaatcacaggccaccaccacaagaacagaatctcagataaggagttgatgagcttttgaccaatttattttttaatataattgtttctaaccaatggcaatccatttgatggttactactggcatacatataaaaaagaattaaataaataaataaataaataaatagtttaaaacaaagcactacagttactagagaagacagatgtgtatatataaacagtgacctcaacaacatgacaagggacccaatggttctctccttttgggatggaactcaacttctccatgcttatccccttctttcctttttttttccttaacataatatttttagttgacttattataaattaagtaccaaaatagtttttctaatctctttcaaaataataataataaaaaannnnnnnttttttttttttttttgggaatgaaaatggaaataatccattaaacacaaaatacaaagagaaacacgaaaaaaaaataattagatccgaagccccaaccaccaaatacgagacccatctaaaacaagcgcccacttaatcttttaaaattattctaaatctttgaaatttagttttgttaatgtttttttttttttttgaaaaatttatataataaactttaacacggaaatttttttatttttactcttnnnnnnnntttatttacaaaaatactttttcagtaaaagtataaatatttttttgattgttttatagtttatttatagttgtattatagttgttgtgaagtattttttgttgttttataatttatttatagttgtggtgagattaattgttttttttaacaaattgtatttttgtatttaaaaataaaacatattttaaaaaattctcctttttttagtgtagcatattgatacactactgtgagttggaaaaataactgtgagttggaaaaattgtatataagtatttggtaagctagatgattgaatgactattaaatatacaattaccaaaataaatatgatatttgttatttaatttat

SEQ ID NO: 19440 - DNA, 4145 bp, Cannabis sativa
  modified_base (560)..(561): a, c, t, g, unknown or other
  modified_base (3465)..(3468): a, c, t, g, unknown or other
  modified_base (3645)..(3646): a, c, t, g, unknown or other
ttattcaaatgctaaaccttttccatccatgtgtcatcatccggttggtccacgtattttgggcaaaatcaggggcaacaaaaataaataatattttctccaaaataatatatttttctctttattattatttaataataatattatatttaattaattaatataattttatctaattaaattaaataattaaatactattaattatacaattcataatttccataattaatcaaaataataatttcacaaattactattttaccttttagaatttatttgtcatagaaatttatacccactcaaaatatatttatcaaataaaactttcctctatacagtgttgtatagaggtgactcggggaccatggacctatatttcaaagctctaataaatccaagattaccatcaatttcatcaagagaataatctagtttattaattccattattagtccactataaatatggaattgtactctttgataatatcgaattatatttagagaattcttacttgtaattgatataatcaatagctcgccctccaattattagttnntaattagagttggtcaaaatactattttaccttctaattagctcttgattctttatgtaccatttattcaacgtgaacaattaatttataacttattatagatttagatctaactgttagcactcccaaaattaacactataaaggaactaatattcgatccgttaagaaagcttggattcttctattgtataacatgttcccaaccactcatgttattaagctcccaaaacaaaagttgtaagaatcgtcttctctaagaaactttcacgagtgaatcaaagaactcaatgaacacaaataggagttcatgtatactcaggattcatactgatctactaatgatcatcattgtgatatgataaactcttttcatggtaaacaacaagtttgataaaaagatgtttagtatatatcagtccagtcatgcataatctaattagacacagtaacttaactacatgttcatctacatatgggatctgaatcaaaatcacacacactagaagtatagtgtatagtaaatcgtacttagtagtttcatattaaagattcccagaactttaatacactaccgacttgttttattcatatcgtataatcttaattctcttgtacatctttacaagattataccttctccatatgaataagaaattttttgatatctaataattatactcttataattaatatatcatttatcttataattctatttcataaattctctaatatattatctaataattaattgcttttagggtataaattccaacaccattgagatttctccagatgaagtacaaaatggtgtttcgtactctagttcagacatggtggaacaactacgtgcgcagggttcttggcttcttgccaatggtgatgccttaatttgattcaaggctgagaacattccattgtagaagttggttagctccaaaccttcaaatgttatcgcccaaagagacttccactattgccgtttgagactgaatattcctcatcaacatcatcgctttgattatgagagtcattacgacaattcttgtccttccaggaagtagacttcttgatttcggcatcatcttatctttaagtgcgactctacctctagaattagtctggtcacctttccctgaagcatgatttcctttctttttctgttgaggttggtcgacaatcttagaccttttttgttgtttagtcgaaggagccttccttaaagtttcaccaattatcctttttcttttatccttgtgaggattagaggttctaggatctttagggtcaactcttctgggagcgtcagtaattggagttgtttgcatagtagtgtttctcttggtgagggctgtcatcacgacttctattcttgtcattttaccgagtagtatcttattgaactgattttgtcgagataacctgcttttagttaatttgaactttttggtcatgatgaccaggagatctgactcatcgagattttttttctccagcaccaccttcaatggatttatcctgatgatcatccttcagggtgtcttgaggatcatctttcgaggtgtcttagggatcatctgaactattctcttctaatttatcatcttcgaatataggagcgtctagatatttgtctttcccaagttgatccttgtgacggtcggtcgcctcattttgatcttcaatatcccctgccttggcattaggattgatgaagtgaagatcaaacttgtttcgggtgagtgccacgattactgaatgtaattttcagatggtattactgcatccttcaattctcaatgaaagtaccaaaatatttatcgagatttttggaaaataaattataataaattagaactgaggaaataaataattcaagaatgagaataacatacaaagtttttacgtggttggagcgttaactagtcttagtccacgagtcaatattattatgtatttaagctagaaaagcccttgagatacaatgagcataagttctttatttctatctgagcaaatattttaagagaattcaaccctcaatctaaaagatttgttgggtatttataatgttaagaaaattatacttagtttctttttttttttcctgtaatggggagtttacatcaaattacataacttggattgttctcgtgaagtccaacccttgaaggagtcgatctactgactaagtagattgaatacgattaatgctgtcaaaaccgtattctataattgtgggcaattaattatgtattaattgtttagtcttcatttaggtatttctcattttagcttgatactatcttttgtcgagatctgaggagtatttactttcttattttgtgcacttaaataaaaaggaaattggattgatctttcaggaacgcattgtctaacctttcgacatcacgatacatagggctgcttctggatacatatggaagatcatctagtcacggaactaaggtgccttcctgtaaggttttgtgtgacttgtgcttggcccaaattatcttctttgggattgctgatatggaatccacgtgtctcttgccggaaacatggataccatatatatatagatacactcttaatgagtatcacatatgaatgggtagtattaggaaaatttgagtttttatgcttagtttttttatctaattaaaaaaatctttcgtttttacattatataggctagagttgttccattagctaaaaaaaaaattaagaaaaaaaagaattgagtttgatttaatattttgtatataacatatttttgatatagtgtaaaaataaatattttttaatatttttttaattgagtatagtaatttaaatttctcttttattatttgttattgcattaaaatttaacagtttaatatttttaaaattaatannnntaattaaatttatttaataataaaaagtaatttccatatatatatataaaaaggtaagtactattttggaccttttgttttgcaaaagttactaattagaccctctattttgttaaatgacaaaatggaccttgtattttccaaaatgttacaaataggaccatgagcttaattttnnacaatttttttttaatataaccaacttgaaaatatgaacagatacagaaaatgtaaacaattttgtcataacacctttagattggattatcattaaattttcttttgacaaaaaatcagttcagggtcctatttttatcattttggaaaatacaatgtctattttgttatttaacaaaacagatggtctaattagtaactttttcaaaaataatgtatttttttttttcaaaatattgtgtaagttttatactatatactatgttaaatttttaccgttattctacggttgttaattagttattccactgttatttttaattgttatatttcgtgttctactgttgttttataaaaacacaacatttttaaaaaaaaaaatcgtgtgaaaataattttataaaaattaactcaaattctaatattaagtttcactttttacaggcgaattcacctagtgggggtaggggtgttcactaagtatccgatccaatccaatc

SEQ ID NO: 19441 - DNA, 2248 bp, Cannabis sativa
ctctcatcttatttatcaataccccacatgaacagaacagacacaatgagcaaaagtaaaataaaacattagtaataacaatgtaaagaataaacatattctatatcagtaaaatgaatcaatttttactttgtagacaggaaaaggaatactaaagaaaaagtataatcagatcaaaaatctaagaatctaaacatggatattcagataaagaaaacaagaacataaacccatttgataattaagaacaagaaaaacctaaaaatgaaaactttaaacataaaaattgaattcccaaataatatctgataatgcaaacctttgaggacttagttccacttttggataagcgaagcccagaagaagaaggggttggtgtggtgggtcggtaatcagagccatgatcagtaggagaaagagcaggttggattggcaaagcggcatcggatagtctcgtagaaacggcgccgtttgacggtgaagaagaatcctccaaagtttggggaacataaagacaagtattaaggccaagagcaagctttgctttcctccatttactacccattttcttcttcttcttcttcacttagagatctaaaaagaaaagaaaagaatatcaaaaatcagatcgcaagccttattatatcaatagtaaaactcattaaagctattttgagtcttggactgagtttcgaaccaaattttgctttatcaagaaatggtgaaagacgccattagaggtgaaaagtgaggattttaagatatgggtttttgaccctttagggaatgaagagaagggtttgtttgagtggaaagcgaaggatgaaaatggatagttgagaatgttgaatgaaatgaagatgaagatgaagatgacgataatgggtggagttgttcatttcaatgttaatatatttttatttgatttgatttttattttttaaatgggaagaaaataatttaatttattaataataaataaatggttgaacaaggaaaaagtctattgtccaaattacccttatctttttgctttattttcttatttgccatgttgaaactttttttttttggcatctcacctttgacatttatttggtaaattttattttatattttgtgttttttataggttattgattagatcttttgttttgttaaattataatttagattatatattttttaaaattgtataaaatgataccttgagtttaattttcgtcaaaataaaacataatactattagagatgttatgacaaacttggttatattttttgtatttgtttatgttagaaattaacttcaagttaattatattaaaaaaatgagcttatggtagtattttatattattttagaaaatacagaatctaaattattattttcaaaaaaaaaatagttcgatgagtaaattttgcaaaatttatggtctaatttatttttttttttgaatttttcattttaccaagaatttaaaaaaagaaagaaaaaaaggagaacatatataggaagttgtttgatcttaaaacttggaaaaggaaaactattttctcaccaatgccaaaaggagaaggtgtcttctttctttttcttggttatttatgattcaaaacaatattggttgtaatttagttgagattttaaattatttcatgccaataaaagaaaattattgtttttggtttattaaaaaataataatagtaataatgtgtagaattcaattctaacctaacctaacatggcacatttgggtttttagtatttttcttgtttatatgccaaaatgagctaacataaccatttcttataagcaaatgcaaatgaccaagtgtaccacttgggaaaccatttattttttttaatttttaaaatttatatgcatgagttttttctatgaaaaaaataaatatctttggtgttacttgcaaggaataaataaaatgtggatcaattcttggctggccaagtagtgcatgacactctttgtgctgcctatgccaaaagctcaactttgtattttaaacaattaacaatttaatcaaataaatatatataatttttgtgaaattgagtgtttttgttgaaagttttataccatcaccactatgttattgattcacttggttgtggtagttgtagtgataaaaaatagggctattttcaaaaatatgggaaaaattattaaggttatgataaatatggcataaaaagtaaataccactaaatatggcattatctaacca

SEQ ID NO: 19442 - DNA, 4271 bp, Cannabis sativa
ggcatccattacaccagcccacctctcttatattgtgataataccgccgctatacacatctccgaaaacccggttttccatgagcgcacgaaacacattgatattgattgtgacactgtgagggaaaagctccaacaaggtcgcctcaaactcctacatgtttctacaaaggacaacattgctgatatcttaaataaacctctatttcccaatcaatgtcaatctcttgtatccaagatgaagcttgataatttgtacactttgaggggggtgtattaggattgggcttatattgggtttatttttattttgggctttgtttaggtttttaccactttgtataaataccactttttcctattttattgggtaatgaaaaatatattttttcctaatatcctaacactttttcttgttaattggtcttttcagcccgtcttatctcaatagtttgatttcttttcttaaaacagtagaaatttcaagcccttttcacaaggattctggctcaatattctttgatcatttcatgtgaaatgtcattagtatgtttaacataacaacaaaaatatttctgtctctacttctagaattttcatcccaagctgggagaatagttctacagtcatgtatggaacgaagggttgtggagtaaatttaagtttatggtccaacactttttttcctttatctttcctaatcctatgttgagatgattaaaagttcctttattaaggttcaattcaaagttgatggcaagcttgggcaaatgtctttgattatattaatcttctgtcaattaacacgtttcagtttaaaaaaaaaaatacttattcacaataaattagtctgaagttgactcattcaaactggggtgcacaatcaaaggtcttaggaaatataagacaaggtctctcgcagttaaataatgttttgtttttgcagttatttacttctctaattttggtttggttcttcccaagtcaagatttttctgacattatctatgataatacaatatagttagcttgggtccactccatgaattattttaattatagtaatagaaaattcattattttgtgcttgtgggttttgagttatggtcaatagaaattattgggtgaagaagaaactttcaagtcaaaaatccataaacccattgagtttgccgtgtccacatctaatttcccatcctctatatttgctccatcaacgctttctctctctataatgttgtctaatttgccataattgagttgaaaaatacagctacagaaaatgaagttctttcctccttgtatgatttgcttctcctcttctcaaaaaaacgacattgataatagttatggtaagtgtacatttctggtattctttcatttttttttacattgattgctcatgactgatttttgagcaaaacccagatgaggaaaacaatgaaaacttccggttattcacttataatgaactgagattagccactaatggattcagctcatcaaacaagattggagtaggtggttttggcactgtgtacaaggttaggaataatatcacttttgggtctaaattttcttttgctgaggatggtttgtgtattcatatcatacgagttgactttttattttccttttcttttctagggccggcttagggatgaaagtctagttggggtaaaggttctttctattgagattgaatccatgagaggagagagggaattcatagctgaattagctgctctttctgatatcaagcatgataatctagttggccttagaggttgctgtgttgatggagctaccagatatttggtttatgattacatggaaaacaataacctttcccacactttacttggtaaccaacccttgtatataatgattattcatcgaaaaatactttacattctttgttgttttagtaaatttttatctgggttttttgtgtttatgaaaattcttgctttggtaaaataggtggagagcagaatagacttaaatttagttgggaaacaagaaaacacatttcattggggatagcacaaggactttcctatcttcatgaggaacctcgtatagtccacagagatattaaagcaagcaatatacttctagacaaaaatttcaccccaaaacttggcgatttcggtttatcaaagattttgagagagaacagctctcatatcagtactcgagttgctgggacaatgtaagtgaaaaaatgttcatactcttttattattgtgcgaaaaaatgacttcaaaacaaggaacatgctaatgtggtttctccaaacaatggcttaaacaaaaaaggggctaccttgctccagagtatgccattagtggtcgtttgacaaggaaatcagatatttacagcttcggtgtactgctcttggagatcgttagtggccgaaaagttgttgattttgacatggaacatggagagcattacctggttcagaaggtaacagagggaaaaaaaccgacatgttaatcaataatagtagacagtaccatgttaatatcatgcttgaaacatattaaaagacttccttttgtgcaggcttgggaagcttacaagggagatgaacttattcagttagttgattctgttcttgaaacaaactttcctgaagaagaagcagtgagattcatcaagatcggacttctttgcgtgcaagaacatgccaggctgcggccatcaatggctaacgcaataaagatgttagctaacgagattgaactgagagatgttgagatatcacaacctgggctagtttccgatctcatgtctataaaaatggaccaccagaatttgtctcaaagcactttctcaaagggctccacaatcagcttccaaagtcctcgtacatcttatttctgactaccatgattctctttttcttccttttagtttgttttttttttaacacgagatttttgctcatcctaactaccagcttgtgtagagtccacacatgtattgtattgtgtacatattgggtttggatgagttattttttttactccagactcatgactcaattagaatagagactcttgattgtgttttgagtacatataacaacagtgcaaaatgaattttgtatctcttttcttaaattctgcatttactatgaatatacaatataaaaaaatttaacaccaatgttcctaactcttatgctaagagaaatattgttgactaagcataacagaagaacaagaagcatagacaaatctccttaccctgaaacttgtaaaagaaataagcttgaactgataatcaattaatacataccaaagactttaaagatgtgaacactgatttctggtctattatgtgagagtctagttctcataaagcttaccatgatcaaccagtcagtaagagcaaaacccgcaacaagcaggcatgcatggctcctcgcacgccatctaacaatcccaccaatttgctgatgggctcagcagatggcatacagggagccaggcatactaatatgaaatgagactacataatttgaaatgaaaatttatttcttacattactatctctcatcaaagcttcaaaccagcttcatccacattgcaggctgcaaactactctgtcaggattgatgaactaataaagatgatttttttatcagtttattggagatctggggtgtatttatttataaagggttaggctttgtgttctcaggctattaaatcaagtctcaatcaaggggcttctgtaagactgacccttttacatgccccatactccttttttttttacttttcagtttgcccttaaaccaatcaactagcttttgagttggcaatttggcattaagcaaacagctctagacaaaccaggtactctctacctgaactgccaccttcctttctacactttttgtctcataactcggttaggataggcgcagggggccgtggcccatggggtataagttatggtgtgtggaacaagctgaagagaaagtagagaagcatatgaggtttagagatattgttagggtgtatcaaaaggttattggccttttccctcctgttttctgggtcataaagataagcttctttttcttccttgtgaaactgatttgtctgggagtggttggatggtttggattccattctctctacacttccaaatagtaacattgtctttccaaattcttcttctttctaatctatcttttcacttatcattaataaataaacctacttttgcaaggggggaattaaaaaagaaaaa

SEQ ID NO: 19443 - DNA, 1861 bp, Cannabis sativa
tttccatcgcagcttcatttagtctagtttcggacaagaaaatcatcccgggatgatgatctttaacatgggagcaaagagtttttagtgtttaagggttcccaagcccctggacattccgaaacatgatattcatggctttcggcgaccgagctccactgggttcgccgcttccaaaagtactccagagaccaaatccgtcaagttagaaatgttccctggttgcatcacctctgtagccttttcagtgttctcatccgacactttttctgtgttcaaaggtgggggtttgagtttagcatcaaccttcttgtttctcttggccactatcttcttcttccttcctcctttttggtcttgattggcaccttcaagttaagtttcaaaagttattggtacatcaacccatccatttccaatctcggtattatccaatgtcgatttcagcttcagatgaggttcctccctgtgtactcgcttccatgtgtttatccttatagtttcctcactgttatgtaattcccatggttcagcccttcgtttaacacctgaactgccttctcccacaaagtccttcttgattcttttctcattaatcttatccataatgttaaaacaatcagaaggcaaagaggagatagaaatcggtacctccataatagcagagttgttgtttgtgattcttggaacaaggttgactccctgcttgtccgagaaagaattcccatccttcgcgttcatacgatcgctcactggctcctggttccacttacgttgtccatctctttcgtggccctctcccaaagactgctgtattttattacctttgttcattgttgcttctgtagtctttctttccttaatgcccaggtttttaccctcatatttcaaccacgcaccaaaggctgcagtactttttccctctccatcaatgattttctcaagattctttgcacatgatcaaaaatcatgacccaccttcccacagctgaaacacatgaaaggcaatctctcatatctgaatggtagccaaatccgtccccccgagtttggaaaaagatacccagggcacaaaggcttatcaatcgatatccagactttgaaccagaaatagccattcaaggctatcctagttgtatcttctttctgcacttcgatgacctctcctgccattgaagccagtcgaaccatgttgctcctggttactgaacgagtaggaagatttaacaccctcccagacagaggaaagcgtgtcaattcaccctcccatttagtcagaatcttggatagtcgctgaagaatcaagacgccattgttcagcaaccaggggatttattcactattcttgtcaaatcattctcgttcttgaatgagaaaatcataaatgtagcttctgttgttgtcttcttgatcttcactccccaatcgacttccgccagtccccacactctgcccagaattgttcgaataagggttctgttcaaggttttattagagcagaacctccccatcaggcaagatttttcgacatccgtttcctttgtttcattaatctcccaaccctcttcgtcttccaccgttaagttgttcgtacgatcaagcagatcctccatggttaattcaggcgtttgaagcattcctattggaaaggctcttctctgaaagagagagcaaaaaaactattcatgacttcttttttttattaatttgtttccatacatagatattactttttgatgtatgttatacttatttaaaattatatgttaattttttaaaaaaattcaagcagtttatgataccgaaaataagatttacatattttattgtactagatagatgttacgtgccaagtcacgta

SEQ ID NO: 19444 - DNA, 4665 bp, Cannabis sativa
  modified_base (2378)..(2393): a, c, t, g, unknown or other
  modified_base (2435)..(2438): a, c, t, g, unknown or other
taaagccttgtaaggcgccaaagccataaataatggcgcaaatagattaaaatcaatataaaacaaacctataacaaaattacattgtaacaaatggggtctttttaaatgtctcaccatagaaattttctataaatatgtataataaaaacatatatttatatataatccctcttaatccgtatgttcgggctagttcgggttgattggacgggttggtattatttttagcctaccctatataaagattaagcgggttatattttcgtcacatttttcaattcgtatttttcgatagattatctcagtttattttgagcacgtaagttattcaagttgagtaatttacaaaaatttatgtaacgtaatttaatttcttgtattttcaattcttaggttactcccaaaattgaaggaatatttcatgttggttggtattacgtaagagataaggtcataatctcagacccttcaatcttcaaaaaaatggcaagcttaagaatacttaatctgtcagcaaaattttctcgaatacaatttgcattccctgatggtcttcatgacacttttcccaatgagcttagatacctggaatggccaaactaccctttggaatccttagggtcaaattttataccaaaaaatcttgtttatcttaaaatgcaggaaagccaacttaaggaactatggaatgaaaatcaggtatgtgaaataactatatgctttattctttaaaaatatattataaattcttggatggagcgtatttagattttatataattaattaattttcaatcaaacaatatatatggtataaaagaatattttgtaattaacaataaggtgttagtagaatggtattgacaattttataacaattgagaattacatatattaaaataatgttatattttataataaagtttatatttttatgatttaaattcatggttaatttatagcagtggtacaatttaaattattataaaaataaattggttagtatttctttttctcttaatgttaaatattttcaatgttgagttgttatctttcttttactttttgtcctaggttaatataaaactgatttggcacattagatcctagcgtattttagttatatcaatgcaatgtgtataaaataaataaatattttactctctaactgttgcaaaaaatatgtactctctctaaatttattaacttttaaaaattatttaaataatcaaattaataaaaactcaattatttttatatatatgcaatcatagttaaagctcaaagatatatgtatacatgcagtatatctttaagttaattaaaatttataaatttattattatattttgaactgtatattacgagttaatagaaaacgtatagaatatgtgaagatgaaaaaagtcaacccatctatattgcataaagattttgttgatgattaatatttttataagttatatttatattattaattttgatattttttagtgttaatattatgaattgtagatgaagatgtttatacgttatcaatttttaagagaagattttaatttattaattatgatatagagattaaaagtataactcatcaaaaattagaaaaaaaatcaaaattttataaaaaaaaaagaaagaaaaaatacaaagtaaaaaatatataggatgtcatatgatttcgcttagcttttctttattatatatattgataatccaccatggcgattttcgtttggggctctaaagcttccattctccacgtcaaaacacatcctttggatcccataaccttaaatataacctccaataaacccagagaccagttaaacttactcaaatttgaaatgtccatgaacgtgtctaaggtggaccgaaaatggtgattgttgatattggtgcttctagactgcttggacatgttcacaccactccttaggatcccctatgattgaatataacctcttttgatccaataaacaacttaaacatgttcgaatccgagttcgtttcaaaaacagaattttcgaatgtaaaccttgcaaaccccgaccttggtgcttctgagttgttttggcacattcgaactatttcttagggcttaagaaactcactcaaaacattcacacctatctagaaactctctcaactctaagttgaaatttcactctcaagtttctcttagtgatttgcttggcactttctcggtcacagtcacactctctcactttctatgtacgttagaaaccataaaaataactcataagcttcctctatatatatccccaaagactaatcttaatcctaaaacaaatatatatatatatatataacaactaacatacaggtatatattataataataataataannnnnnnnnnnnnnnnaataataataataataacaaactaaataataataataataannnnaataataataataataacaacaaactaaataatatgttctaatatatttacccatattattattattaatatgcctataataatatttataaataattaaatattaaattatctctaataatttaattatttatctagcattatacacacccttaaaagaaaaaaaaaacaaaataaaaaaaaattgttgtcactaaaaaaaaatctcatactccaccaaacttataaatattcgaaatgataaattatctccatacacaaacaaaataaacataagtataaagaaaattaattacccttcaagaaaatcagatattacaatgtagattgaagccaacttattctagaggcccaatgccttgattagtttaatgtgattcttgaactctaatccctaagctctgatactatttttggtgaatgctcacccttaaaataggttgttacatatataatatttaagaatgcacaaacaaaactaaaactaatcacagaatcaaaacttaacttaattgaaattagacaagaaaaacttagctcgagaatgaatgaatcatggatttattgcttaaattgtcaatagtacgtacaattgaaatgtccaagaataaaactcaactgagtgaataattacaaagcaatgtctcacatcgagagaaattacttcaagagtgatactcccattacatccttccacacacactcactataatcttggacactttctttctaaacttgactctaaaatctaaagtatgagcttagagataagagatcaagactcactctcacttgaaagaatagagacactcctatctatatagttgttggtggatcccctataagttggtattaaagtcaactgttataactagctaacaacaactttcttcaaattcatctgataagtgaatagatgggcctgttagtgaacagaatagttagttagtctgttatagtagttagtttgttatttgtacaactgtaacttctaacttactcttgtatatatattcctctctgcctttgtgcaataataagacaattcatttttcctcaaatctttactttaacatggtatcagagctctttttctctctttgatattttcatctctttcttcaaacatcgtgatctttcttgattcatcaatggcggcttctgctcttgccaatacagcaactactactccagttattttctctcacaaacttttagtgaagcttgacaatcaaaattttttactctggcgtcctcaagtcctagctgcagtccgaggccacgacctacttctttttctttcagcaacacctcagtttccaaggaagttcctcactgaaaatgacaaaagatcaggtactatcaatcctgcttatcttctttggatcaagcaagatcaattactctatgcctggttactttcgtctatgtctgatacaattcttatgcgtattgttggctgtgacacgtgctctgctgtttggagtattctggatcaatactttgcctctcaatctgcagcaaagatcgatcagtatcagactcagcttcgaaacttcaagaaaggatccaaatcgatcaatgattatctgcttggagtcaagactctagccgatcgtcttggatctgttagacagtctctttctgcaaaagatcatatatctgccatctttaatggattaccacaagattaagatatcttcattatctccatcaactctcgtcatgatgaatatacagttgctgagattgaatcactttttctagctcaagaacatagaatcgagaaacacagtcaagatcttgattcagctccctcagctaatcttgctcataagtgccttcaagaatcattcttctttttctgatcaatcgaatcaaggaagtactaatcaaactagaggatctgctcctccatctgcaagagctccttattggaatccctatgctacaggctctcgaaatttccctcccaacaatcagggtcaaggttccacaatgtcttcaaccaatcccagaggtccctttcccactccatttggcaccaaacctgtctgtcaattgtgtggcaaggttggtcatgtttcctcaaaatgctatcaacgatttaatctggagtttccaggccttggtgctggccaaaatgacaaatcatctccgatgcaagccatgcttgcctctgcctcttctgtcaatgatccaacatggtatccagattctggagcca

SEQ ID NO: 19445 - DNA, 3421 bp, Cannabis sativa
tgagagatgacgaatgagaggcttaggatttttagggttatattttcctatcttttcaatttaaaatctattaaaaaaggcccaaagtaaatctcatcagaaaagcttaaaaaaaaaaaactacatcagcccacataacaacagagccctagcaaaaaaaaaaagaaagaaagaaagaaagaaaaaaggattgaggcgtgcgcctcaagtcatcagggtgaagcgtatgcctcaatgacagcagatgaggagtagcctcagatacgttttttcactgcctcgcctcaaggcttcaaaactttgccagcaaaataccctccattacaaagcacaaaagagatagagaacaagcaataacatatgttagcctctagaagaatcaaacaaagctgaaagctaattcactgcatgttatccattgaagcattttcacaaaacacatggtttgcataacaacagagcactgaagtaaataacaaaaaacaattactcaggggctatttggcattgttctttgttttttgttttaaaagttgtgttttaagaaaagagaatagaacccagttttttgtagttttcaaaatctgaaggtgtttggcttatgttctgaaatagtttacgaaaaataaataacaaaaaacatgtttggataatatagttgactaaaattacattataattgacaaattcctataatcataataggagtccacaacttgatcaattctgtagcactgaagtaacggtcacacaacttaaaacagtgaaatacattatttatataatacatataaaacaaggttaaaacatatatagctagcaaaaagtaaatagttgtgcaaaatatatttactgtatttttagcatcctgaatcaggatgttcaatcaatatacatataaacaaattcttgtgtatggaaactataatagttacaccgcaatacttgctatgtgtagaaaagaaaaaaggcttgattcaagataatttattatttgagcagtcactgcattacattgacaaagtcagagtcagagataggcaatacaatttgggtaggcgtgttcatcaacatgtattaatcaataagtatctccattctgtaattggtcttgaatacatacattgaaataatgaaactagaacctattgtaggaaatggcaaagtgttcatagatccatgaggagaaaaatattggagtcgtcaaagttaaaaaagcaaaaccaacaaaaacaaaggacaaatcaaaatccacttttcaaagtcctaaaatgtgaaagtgcactcttgttccatgatcaactccacaacaaggataaaatcagctcgaatataaagtcatgcaaccaaccagtcaataattttttcgtttgttttttaaaaaagtaaaataaaataaaagtttgaaaaatagcatcaatgaataaaactatactcatggagaactttaaaactatacttagcatttgtttggaagtaattatgtaattactaggtagtgtaattactaaattagtaattatacattatagtaattacacttgattttaaaatacaatatgtgtttggatattgggtagtaattatatatgaattcttattttcatgtttggcaaatgagttagttattgcataggttaatattactccgaattacacagctttccaaactcgctctaaaatggtctcaaccaaataacagaccaccatataaacatttaattcaactcacattgaccctagtttgaacagataaatcaagtgcgttcttacattgtcattaaaacattggtactaacatacctaaactaaataaaaatcaaatcagatgaaatgtttgacagataatgagataccaaacaagacccaaaacggagaagaaactcaggaatttcaggtctaatcaaataatcagattttaaacgttatcaaagagatggaaataaactagataaataatcacacatgcatgcctacagtcagtaagattcaagtcagataaagaaatacaacaaagattgcaaatgtaaacaaaatttgggagttgcaattattttagggcacaaaagaaccttaagcatctcatttataggttatagcgataatgttagatacctcaggcgatccgtctaacccccttttgaagttcctaggcgattttgaaacctgctgcaaccaaggtatttatgaatttacagctcttaaccgtccgtgaagggaagataagcacattttgaagagaaagtgtgtttcaagaatgaaaaaatggctctgatgatttgttttaggtttttatcaaggaagtgatgtatctgggtttatcgaatttcagctctttaacactaattcgaaaatctaaccagaggctcctccccctacaaatagaaatatccaatattgtcttgcttcaaaaatcagaaaacaaatcaataatacgtatcgtatcacaagaatcaaagtaaaattgaaaagggaagattttagttagatatataaatatatacatattcacctgtaaaaatgaaaaagttcgtaggagagactgagaggaacgttgagagagaaggacagtgcgaggttcgactaagaaaggagtggacggagagagggagaacgtcgggcggtggtgtggtggagcggtgcggtagtgcaggggtaatggttgtgcggcgagtctcagatgaaggaaagagctatatttgcttgagtggcaagtgagtgaatttaatctttatttactcttcatataagattgttaaggtcacacgagcactctaaaattaatctctcttaaattttatcttcttttttattagatttataaatactgattaattaattgattttttaaaggtaaatttcattccgttggatcaattcggcctcaacaatatcagcaacatcaaaagggagattagactctaaaaaatgcgatcaacatataaacgagacactctaatcataaaatgaacaaccccattagcagatcatttgacaaaatataaagaaacatcactaaaagaagatacaatcctcaacaacaccaccgaaagtggatgacaaaacattcaaatttctaacagcttgtaccaatacccgaaattctagccacaacctgattgtggtgatctcgaacaactctaccgaaaccatgcctttcctccttgtcaaacaacgcaatatcaatattcaccttgagttttcataacctagtttagagtatagctcaacctcatccgaaagataccaattaccaaataaaggaaccaaacttctttcttgagcttttctctattgatcaaaagtgatacaagccaatttgacaatgaactccacccgacatttcttacatttcaaaaagagttgatttcgtgcgaaccaaattacacaaaccatcatcgcttgaacactttgttcctca

SEQ ID NO: 19446 - DNA, 2151 bp, Cannabis sativa
atttataaattgtatgaagaatattattattaagtagtgtactatatcgatgtgatacttaataaatgattaacacctttatatattaaaattattaaaataaaatatatataactttgatacttaattacacacttatataaccatatgatattgctaagccaactaggaacaaatagttagttttttcatatattaaacgataaatatgcaaatatgattactgtgtatgagattgaaatttacgaaagaagtaccaacttattttgattttggtatctacaatatataatttaatacaaaatttgagtactcatttgacgtaatttttggataactacgagtatgacattaattggtgaaggttggatcttatattttactttttattttcaaaacaaaatattgaatggcttcaaaaaatctaatgttaaacaaaaaaacggtatttttccaaataaaaattaaataatttattatttatttattttgcaaagtggtaaaagattgaactaaatgttgaataattgatcatcatctcaattaaagccctttgaaaacaaaatggcttcaactttttatcatgataatcttcaataataaaagaatgaaattaattaattttcagatatatatgaacgaatctattaggcaatagctgtgtaacatcctatgacggcttattaggagtatttattaatttatagtgttggacacatattatagtactatatttactctatacaaattatatataagataacaattaagaaaaataatcaaattaatttgcaaaatcagtcttggtcttataaatataggtagatataggactaggaaagagtctttatgttaatctaattaaattgatatgatcagaagcgtaatacactcgtgtgataaacatagttgagtcaggtacaacgcttatatggttcatacagatttgatctatcttaaatagtctgattatattcattaataattttttttttatatttgtattaatttaatttatctctactatacaataataatattcgtttgtggtgggaactcgtgcataattaattaaaaacataaaataagatgaatatcttacaattaatgtattattttataacgtgagcagtactagtatctggcaacaacaattttgaaaatgaaaaaataaattatgtcttcttgtggcctaattatttttatatattttattacaaccacaactaaatatatatatatatatatatatcactttccctaaaaaaaaaaaatatatatatttatatatatcactgaatcatgtctattgtcttgcccttgagcataggttatgatttcgaaattcgacaaaattagccagaatcttcagaaaaatgacaaacgaaataaacaattatttataattttatttgttagattctcgataaatttctttgaaaaaaatgacataaataaatatttataatatttttataattatttatgttattgcaaaataacatatataactaaatattaaattgaatatacatttaatttaatattttatttattatataaatgtctatcttacctattagactcttcgggaaaatggtcttctactgtttctctcttttttcttttgttctttttgttttgtccatcactattactgttcccttcaatttctttctagtttttcatccttttttgtgtgacattttttttttttttttttcatatttttaacattcagaaaactactcataaagttagaacatatctctctaatttttctttctaaaaattagagcttaaatacttaactattttctgtaattaccatatcgtgagaaataaaaactcgaagtagacgtagttctattatcgcaacatgaggaatgaactactataaactttgtatgtctctctagattattaacttatacttattattcatctcgtcaatctaacgagctaatgttagccaacttttcagcgtcaataccatattttatgtaattttcacataatagaatttcaagttgttttcataaaaatagttaatcattgtatattttggtatttttttaagctaattaggatttttacctcctaaactttgacatgtacgaaattatgccccctgaatttttaaagtcgtta

SEQ ID NO: 19447 - DNA, 7580 bp, Cannabis sativa
  modified_base (223)..(240): a, c, t, g, unknown or other
  modified_base (2822)..(2835): a, c, t, g, unknown or other
caagcttagacttcgcttgaaaaagatcaaagggaaagcgtcacggagggtagggcagacttcaagcagtccttccaatccgggaaggagagttgaagacgtatcgtactcccagtgatgcttcttgcaagaaagacgacgtgcatgcgagagtcttgttgaatttctatgtaacaagtttcggcttccgggaaggaaggttgaagttgtataaaaattcaannnnnnnnnnnnnnnnnnaagatcaaagggaaagcatcacgaagggtaggatagactttaagcagtccttccaatatccgagaaggagggttgaagacgtatcgtatccccattgatctttcttgcactaaagacaacgtgcatgcgagagtcatattggatttttatgtaacaagcttcggcttccgggaaggaaggttgaagttgtataaaaattcaagcttaaacttcgcttgaaaagatgaaaggaaaagcatcacggagggtaagatagacttcaagcagtcctttcaatccaggatattttatagtatttttttttaaaaaaaattgtaatttatagtagatatttttatagaaaaattatgaaaataatagtaaaatgttaatttatagattttatgttctaataaaatattaaaattgagagaaataaggagagaagagaaaaatattaatctgtagatttactttaaaataataataaaatattaatttgtaaatttattgattaaatagaatttataatgatcttaattgatatgacatatttctttaaacataattttaataaaatacatgattataatttaagaattttgaggggaattacatgcatagtcctccacgcatagaatacgtagatagaacaaccactcctaagtacgccttgtctttttatattttaaaataaatttgatttgcttatagtaaataataatgtatcattattgcgagtgtgaaaacagagtaagagtcaagagaggagtgttgatgaagccttaaattaaaaggaaaagagaaagagaaagagaaaatacaggcaaaaataaagaaagaaaaaacaaaactcttccacatgaaaaaaagagatcaaattttggtcctgttcttaatatcgattctatatacaacaactatcaaaggaatttcatcaaacactacaaataatattaataactgcgtgcgatcatgtggctctggccgccacggccgaggccgacgactttcactgccgtacccattcggattctcagccggttgtgaaatccagctcagatgcaacaccaccggaaaagccttcgtgggcgaatttccggttagatcaattgggtcagacagcataaaaatcaacatcgagagaaaatgtaatcgtcccctgaatacaagcgtgggtcagctcttcggcacaaactacgccccaacgtctcgaaacgctatcctcttggagaactgtacagaaccaggtgcggcctgtgagattccgacgattcttgtccagacccacttctcgtccctgagctgtagcggcgacgatagctccaactccagcagcatcagttgttactcggagagtaacaccagcaccttcattaatttccacacacttagaaagaaaaagtgtgagtttctgttgtcgtccatatcggcggcttcacttaatagctcggaatcgccggtttctttggagatacaggtggcagagcttggttggtggatggaaggagcgtgccagtgtgatccgaatgccaattgttcaaagcttttcacgccaaatggcagacccggatatcgttgcaattgcaaacaaggtttccaaggagacgggttccaggccggttcaggctgccataaaggtcagatttaatttattttaattaataataataataataataataattaaatttacaggccaacctttcttgaataatatatattggttgtttcattaataacccttttttccttcattatttatttttcacgttaaattcccggcaattaagttaaggctgtcttttatgctttgaattagtttaattttaaccaaaatcaagtactactgactttttaattagtacttatctcatattttaatcgcaaccttatcatcttttgtgctagtaatagacgccactaataccaagccttaataatagagttttggtaaatagtaattgcactaaaaaatagaataagccaataataaatgaccaacaagttcgaccacgctccaatgattttcagttggtttattttattatgcgcattaattcataaggttgagtttttgtggattttagagtcaaatgtccccaccgtgttaatacataattaaaagcaccttcatttcaaaaagaaaaagaaagaaagcatctattgttaaatcttcagagaaagaaaaaaagtatttatttatacattttgtctaactacagcaatgaaatataataatatcactcaactaaactaattaaccagtttgtaggaaaaataaacatatttaatacattcttatccttgttgtaataatatagcttaggaattttaagttcgaacacatatatacttcctttttcccactcctcccttattactgaactgatgaagtttagagaagtagaaaatgtgtacaagtaataggcattaaaatagaaagaaaggaatgcaagtatcataggtattgttaaaagtaggattgctaattacaacctcctagtcaacttttacgttcgaaattacatgtcgaatattttttttcaatttttttaatagtgatattcgtcatggttacagtatcatccatgtaaattttnnnnnnnnnnnnnntagtttacagtaccgaaaatagagttcctgatattccagtttaccacgcgcattcaaaaaacttcaaatgtattttcgacatcgtaaactattcgaaaattttcaaaattttacaggatgatattgtaagcataacaaacacccccgtgaaaaaaaaaattgaaaaaaaatattccgacatatatttttgggcatagaagttgactaagagattgtaacaggaagttgacgatagtactcctctaaaaataatgcatgaatattgtaggagtgctctaggagtgagggtttctttagggttaaaatgggcccatgcagggcccaaaacattgagcaaatgtctcttgaagacatcatagaacttaaaatgcgggaccagtacttcatcattttggagaagtcaaactaattattttggcccaacttgtccattgccaagaataaaataataaaagtagtgagttttctttcttgtttttttagatgattttaattgacctttcttcttgcttccggcttcttttgtcgagcatgcataagatttaaaggagaatagcctaaccaatacaagaatgatagggttaattttcttccagcactagctaggttataatatatatatatatatttatataatgacgtcttccttcttctctcttgctttaatcagtgcgtcttttatatttttgttttagttaatccaaaactgatactatctagataaatttattagcaccgaaaatgtaaaaattgaaattatagttatatatttaaatatgtactagtaggttaagaggagtgggacgaaacataatgaacgagaacttttgaattaagtgacagggtcgattttgtcaaaccttgatatcatttttgattcaagaaagggcataaaattagtgtaacgctatatacaagtcgtattcccggtagattgagttaggtggattttgtaatattgtcaaacttgaagaaaagacgtgtcaatatttatatacaaaaataagaagaaataatatatataattgttgtaggaaaaaacatcattatatatttatcttattatggctttacataactttaaatcataattttttttctcacacatagctagctagctagctagacttgtgggacataaaagtaattcattaataagttcacgaaaaaacatcacttaattgagccattaaactattgtgtacgtagtttgaaacaatctaataaaagctcaatctctagcatacgacatgtcgtttataatatatttttaagaaacgtctcatgcgttgtgtcatttgatgacttgtgaaaaaagcagtttcgaagtgtagtcctgcaagatacttcactgccaagtgtggaggagccactcgagtaatcacactggtcggaggtaactttatatatatatatactcaatttaacatgcattgttaattttgagcaagaaatttgaattaattatttgaatggtgtaaaattgtcttgtatttcttccttcaggtattgctgctgctacttctttaatgataagtcttggtctagtcatgtgctgtttattgcgaagaaggtcaaaaatgaaagccagacacctcaccaaacgccgtctttcggaagccacaggtaacttaaacatcccaatatatcactacaaagaaatagagaaagctacaaatgggttctcagaaaaataccgtcttggcaccggagcttacggaaccgtttacgccggaaaactccagggagacgagtgggttgctatcaagcgaatcagacacacaggtgctgacagcattgagcaagtagtcaacgaaatcaaactcatttcctctgtaagtcaccccaacctcgtacgtctcttgggttgttccatagattttggagaacagatactcgtgtacgagttcatgcccaatggaacgctttgtcaacatttacagagagagaggggtgatggactttccagctggttgattaggctaaccatcgccactgaaacagctcaagcaattgcttatcttcactcggctattaaaccccctatatatcatagagatattaagtctagtaatattcttttggatcatagttttaggtctaaagttgcggattttggtctttcgaggcttggaattattgaaacgtctcatatttcgactgccccacaagggactccgggatatcttgatcctcaataccatcaaaactttcacctttcggataagagcgacgtttatagctttggagttgttcttgctgagatcataacgggacttaaagcagtggactttactcgaccccagaatgaaatcaatttggcttctctggcttgtgagagaataggaaaaggttgtcttgaggagataattgatccatttcttgagccaaaaacggatgcttggactctttcaacgattcataaggtagcagagttggcttttagatgtttagcgtttcatagggacatgaggccttccatgattgaagtggctgcggagttggagcaaataaggaagactagatggtcttgttcggaacagaatacttgtacggcttcctctgaaataggttcttcttcctcctcctcctcatccaatgtaagtgaaaaacctttcagtattaatgatgttgttttagagagaagcttagactccaacaaattgttgaaggtaaattcacctgtctctgttcatcttgcttggttgagtgagcaaagctctcattcatcaaatagtatgctaagaaattcaactcaatcatcttcatagttgatttttcatagctcattcaactcaacatgaccagtcataaaataagtaagtgcaatttaagcttccaatcaccattggtgtatgtgtggggtgattttagtctgtttgtattttagtacgatgatgagttgatttacaatataaatagttcattttaattttatgaggctttctcttctgttttctgttgtgtgacctaaataaagaatattttaaacttcatttgtaaaaattagaaagttagatgagtttcaagttatcaatgtgggaataacaaccacatgatcaattttattaattgaatccttataaaaaataataaaaaattattaactaaatgaatttttgctatctccaaatagcaaattgaataattaatagtccattatataatgatatattattcaaatagcggactcaatataatatgatagacaaattatattgtttacaaaaataggaatgaaaatcctaatagtacatttaactacaataccaataagttattatcgttgaagcgtcaaaaaagcgcgaagaatactaaaatctccaatccaaatgaacatatgataaatcacgcttatcaatgactatcaaccaaaaaacttctaataaaatttaggtaataacaaccctatttttcaatgtagaataaaaggatataactaaataaccaaccatagcgatgacaatcgtaacaaacaatcgcaccataagtcatgaggccaatataaatttgacaatttgacaacttctagtatgccacattaaaatgcatagaaatttaatactctaaaattaattaaatctcaaaataccctcctcatacattctctatttctctcagccatctctccctctctctctaactctcacaaaacccaaccaatacccgcgaccacaaaaccaaactgaaccagacccaaaccaaactcacaaccacctcaccaccttcaaagaaacccactccgaagacaaaacgtagaacaaaaccgaggaggatatcgcgaaaccacaaacagaaattgtgaaacccgaagccccaaaatctatgagttcaaccaccccgaaacccccaaaatccctacccattgttggagttctcagctcgcttgttttctacgtattttttatggttattgacaatgacacgaaacatcgcgaaatcatgaaacatcactaaatgtctctaattcacaatatcgctaaacatatcgctaaatgtcgcgaaataatacccaagttttcacgatgattagcaatatttagcgatgtgcagtgcattttttaatctcatatcacaaatacatcgctaatattatcgctaaacattgctaaatatgcaaaacattgtcaaatattgcaaatcatcgctaaactaaacttcaaacttcatccctaacctcagatttcttctatcttctatcattgtaaatatatcgcaaaaaactagtaaactagaaaaagaaacgcaaaaaaaaaatgagagaggtcgtgagagaagacgaccgcgaggtcttgcgactggggttctaggtctgtgtgttcaacggtaggggttctgggtcgagattaacgctgaaaagtgagagagttagagagagaagttttttcgaaatgtgagaatatttttgggagtaaaagatattaaatatatatatatactatttctaattgggtggtatattaaaacaacatgtttttaatttaagcatactaagctaaatttccctataaatttgagaatcctccaaatgtgaacatggacaagaatagtcatgcaactaatagctttgagccagttgaaattcccccactgtccccaaaaaacaagactaaatcccttgttatgaatgaataaagtcctactacgataacacactacaaaaaattttatttttagtcacaacaaaatttatgactaaaagtaaaatagttgtgactaattataaatcatcattcttatgttgt

SEQ ID NO: 19448 - DNA, 2336 bp, Cannabis sativa
aaaaaagaattagttagaacaacaaataggatacctaaccctatcactcaactcactaactaacaaaaacacatacataacaccttacattaatctaatacccttaaagtagagtgtatatattatataatcttattttgtctttgagagcttgaaactgagttcgcagtagagctttagtgtagatgtctgcattctgctccttgctagaaatgtgaaatgttttaattgtcccttcttgagccttttgtctaacaaggtggcatgcaatttttatgtgtttagtccgttcgtggaagaccgaatttgtagctatttgttgagtcgccttgttatcacaatgcaaaatagctggttcacggtgctcaattcccagttcatcaagtaatgacagcaaccaaactaattcgcatgtggtattaaccatggctctatactctgccttagcaaaggatcgagacacaatatgttgcttcttgctcttccaagacacgagagaattgccaagaaatacacaaaaactagtagtggatcttctagtgtcaatataagatgcctagtctgcatctgtgtaagcttcgagcttaatcttagagttaacagagtagaacaacacctgtctaagactccctttcacatattggagaactctttggactgcatttaagtgattaatggtcctaggtgaagctaggaactgactgagtttattaatggaataagctaggtctgatcttgttatgattaagtattgcaatttaccaatgatcttcctgtagagagtagggtcaacaagcttgtcatcaccatcttggctcagttttaaattgatctccataagtatatttgcagacttgcatcccaagaatcctaggtcttctaacaattgcaaggcataaggtatttgtgaaacaaaaatgctttgttggaccttgcaattttaagcccgaggaagtatctgagttctctggggttcttcaatttaaacctatcatttagctttactttcaaagcttctaagtccttgatattattgctagccaaaatatcattatccacatagactagcaacaatattaaactcgatccattttgtctaatgaacaaggaatgatctgaggcagaatgtttgaaaccttcctcaatgagagctgttgagaatttttcaaaccattaccttgaagattgtttgaggccatataaagatttttaaagtttagaaacaactcgaggtggtagctcccccttaggactatacccttgaggtatagtcataaacacgtcttcatgtaaatcatcatgaaggaatgaattattcacatctaattggtgtaagaaccaaccttgtatagcagcaagagccaaaataaatttgatagaaactaacttagcaactagagcaaaggtgtctatgtaatcaactccttcttattgattgtatcctttagccacaagtttgagtttgtatctttcaatagtgccatctgtattatatttctttataaacccacatacatccaataacatgttgatgaggaggtagagtaacaatgatccaagtcttgttagcctctagagaaagaatttcaaaagccatagcattatcccagaccagaatacccttagcttgactgtaaaacttaggctcatatatgcttgatattgctaacacagtagctcaaaacttagaagacaacttgatgtaatcaagaacttcagataaggggtacttagtaataggggtagaaacctgaaaatacacactgttagtggacaaaaaataatgatagtcatttagataagatggctttttagtatttctaacaagtctatgagtagaaggaattgtaactcatgattgtcatgggttttagattcaaatgaagtagcaatagggggagcagacatggaggtatctgcatgatgatgtggtgtagaaataggaaaaaaatcaaaagattttggtgatatggttccagcaaaaacaaaagggaaaatatgttcatgaaacacaacatccctagaacaaaaaatcctattagtattcaagtcaagtaatttataagcattcatctccatggggtaccctaagaaaacacaagcaacagcacaaggagcaaacttagttctagcaacccctaaggtagagacataggccaaacaactaaatgctctaagatgatcataattgggagctttagaattaagaatttcaaaatgagacttgtgtttgagatttggagtaggtgtcctgttaatgagataaattgcagtattcacacactctcactagtaagataaaggaatgtgagactaaaaaagaagtgatctagcca

SEQ ID NO: 19449 - DNA, 2754 bp, Cannabis sativa
  modified_base (58)..(68): a, c, t, g, unknown or other
ccatgccagcgaggcatcctaatcagcctatcttctcgagcagatgctccaagtggannnnnnnnnnnaccattcttgtgatgccacgtcatagtgcaaaatttgggataacactatcaaatagtgatttttaaacttttgggtaacgttttctctctgtaaatacaatccctcggctgatcgtaccttttagttgaacctttttaatagtgaagatgatgtcatatttttagacagccatgcaagatggatgtagttgatccatatttgtagggttttcctaggtttaaatcccaccaatggggtatttacatatttggatattaggcatcaattttaaggcccaaatccaaagtggcaaatgtgagacactatttgaatgtaatatttagagctgacatatccaactgtttgtggtcatctaatgcatgggaaattggaaaatatcaaagaagtggccgttcaatccctaggttgatcataccttctagctaaatcctttcaagagacattccatagattttgtgggattctgtcaaagggatacaacgtagtatatttactcggggtggtgcaatatgcctcgaggacctatgagatataatattgatgatgtatgtgtctgaggagttgtttctatcatggatgttcatttatggcgaggtagcaagattctaactatccacctttcctcttgggcttgaacacgacaaacaggttgcagctggctccttagtgttccgcatgaaggtgagtgattgagtgggttatcgggttgagagtatagttaatccaaacttgctacatttctaatttcactgatttaggaccatatattagttcttgatcccggtcttgccgttcctaggattcagcaattgggcctggaccatattttcctcttgggcccacattacagactgttggcccttccatcctctcgtacggaggccacttgtcttgatagagggaaacacaaataacatttaccccaagtcctcttctgcacgtggataagggacttgccttcttatccgggtatgaagggcctctaggtgtaagtaatactataagaaaataagttcttagtgattagattttttgtgactaaataaacttagtcactaatagttagtttttatgacttttaggcgtagatatttttagtcatgagacaatgcttaattgaaactaaaagaatcaacgaccaatttttagtcactatttattatttttagtgacaatttttacttagtaactaaaactctgacaccaaattagtaattgtggcgggagcactaagttttattgactaaaattatttagtcactaaaaattttaagtttgtgacaaaatattttgtcatatagcaattaataattttcaataactaaaatatcaattataaaaaaatttatatttacaatgtttttatataccaactaattatttagtcagtataaaacataaaagtaaactactagatcaatatatattatgtgactacaaatatatattatggtagttgcgactgcaaatttagtagttaaaaaaggcaatacttgtgaataatgtaaattacctttttaaaatacatatatgtttatatagaagatgaaagacacgtggtccacttttataccatgtgtataatataataatataaatatagggttcttgtatagtagtgattaaaattaatcactatttgtaatgatttatttatgaaccttagatcttgatgtaaaggttaataaaattaatcactatttgtaatgatttatttatgaaccttaaatcttgatgtaaaggttaatattgacattatatttgagcgaaaacattaaatacataaataattttttaataaaaaaatgcataaaagataaacaatttgtggtgacttgttgtatggatagtgacttcagtataccaaaaatcccaattagtgacatttttaaatgccactgttactaatatttagtgacattttatagtttagtggcatttcaataaaatgtaagctgtgtcaatgtgactaaaaatttaagggtcactaattagttttgtagtgacattttaaaatgtcccctaaacataaattgtggcaatttcaaatgttactgtaatatttattatttatttatttaatgtttaaaaaataatttagtcacattttgaaaatataaaaattatactagtgacatttttttttaaaagtccactaaaaattatttctgtaatgtattatttatttttaattacaataataggaacaaaattaattttctttaaatataaattcaataagtaattttaaataatttttacctatatttttatttcttattgaatttgtatatatatattcaaaaaagaattctaaacataaaagctattagtatataaaaaatctctaaacataaaaaagaataaatataattttatatgaacagtttttaactaaaataagtttgttacataaagattttaacaatataaagatataatacataataattttgtattcttacaacaaacatgaacaataacaataaaaattgtatacaaactatctatataacatcaatgaaaataaagaaatatttacatgagtctatttctctatgtttataaagtcatattattgagtcatgaagttgtttaattttcgtgaaacctgcataatttttagcacaataaataacaaatgaataatcattcgtatatgtatataatgaaaactttaaaatt

SEQ ID NO: 19450 - DNA, 3494 bp, Cannabis sativa
ttcaaataattagcattcctattagatttcatatatggtaatgctattatattgtactccttaaaatatacggcatctgaataatcaatgagagaaatgaatcgaattaaaatagaaaaataattagaaataatattttattatgttgtttactaaactgtctagaaagaaaatcagaatcatattatttaatttacataactaagaaaggtaatcggaatgttttaatttgattaaatgtccaatgtcccacgagcacttcctctcacagtctggactactgtgagtactggtttttcacaaccagcttccccatgaggcaagttccaacactttcgttggacttcaaaattctaggtatcatcttttagtcctttgcacttttactaccttgatggtttgtagtatagtttcatttcaaaacataatgtcaattcttttgatgcatcctttccttacagaatatgttcctagaatggagctcacagaggagtcaaaacaaagaatcgccttttatgagccttttttaagacagagttgagagtcaaggggttggtgaccacctaattattgcgccaatatggttttattgcctccttccaacgcattcacggagtcaatggcaggggacaacccagacgtggcgtctaccgtttgatcgatctgtgaaagcgaaaaataatcttttgggtaagccttattcaagtctataaagtctatgcacatcctccatgagccgttgggtttcaaaactaataccagatttgtaacccatattgggtataatgattcctagaggaaatcattagcagttagcttgtccacttctgcctttactgcttcagctctgaccgggtctaagggcctccttttttggcgaacaggggtggcatcttcttggatattcaaagcgtggcaaatggtattgcgatcaatccctgtcatgtcagaatggctccaaactagcacatcttgattcctcttgaccatatttatgacattttcccttatggaggagggtagatttcttcccactctgatagtcctcgtggggtcatcctcactaatactcacttcttctacctcttccattggttccaaatttctttcaaccccaactcttgggtctaactcatataaaaactcctcccaaatagttttagtatccatcaagtcttctgttccagaagcaacaagtgtttcttctcggaccatgaacacgatcctcgtcgaaacattgtaacagtttcttgtgcttctctgatcgccttttattgtgccagtgcatccattgtcacacgggattttcatgcacaaatgttgaacagaggtcaccggcccaaaatctacgagggttggtcgccctaatagggtttgtcaacctaccacaacaaagtttgagtgtttaaaagcactcacctcatttttccctttgagggtgactggcaactggatcttacccattgacattaaggtgtcaccgttgaaaccctgaagctgaatgggacaaggggttaaatttgctttagtgagcccaattgtctagaatgtgagtttaaaaaaaacgttaacagagctgccattgtccaccagaactctaaagactcatttgttagcgatctgtgcattaattacaagtggatcgttgtgggggaaatgcacattcttagcatcttcctcggtaaaagtgatgggttgatttaacatcctagggcattgagcaagagactgcaccagggcacacacttccccattttctatttcccttagatatcttttttgtgaattacgggtatttctggggagatgaggtccaccagagattgttgcaacatgttcgtctacaagtggcggagcaagtttgggaggatacggggttcccaatctcggggcaagtaatgccaccctagctgaagctgatggagcaggaagggcgggcaactatgttcccggagcttgagagcgtcctaccccctgcggaggatttacagcgctctgctgtcctggaattatcacatgtccgtgtaccttcccctgttcgggataaataattaggatacagattcactgtcccaaatatcccgctcaaaataatatttcagtctcatcctttaaataatcacactcatttgtggtgtgacccttctctccatggtactcgcacacctccatgcgacatacgtagaggtttcctgtagtagaccatgttataggtaactttatagacattttccgtgagtctattagtatttaggtcatattctttcctccgtttcatcaaagaatcattgcggttatgactctttccccctctcttattctgggagtggcttgcattggactccaggacctcagtctttgcttgtcctaatgctaggctacatccggtctatgccgccctgtacccacaaaagtgggtctgcgtaggggcaagaccaaaaatggtaggtctgtaaatagatggagtaaactgagctctaggtattggtaaagctagagccggaacttgaggtgtaattcggagcagttgtggacggagttggagcaagagcaactctgaaggcttgtatgtatgcatcttccaggttgatgataccttgggccttggccatgaactctctcagagttttagctcttttcctttgcatttctcctcacatcagggagcctacagccaatcccgactagagggccatcaacttcatatcatcattgacttttgtgtttggcagctgcctccatcattctttgaataaaagcctttaggctttcattgtgatgctatttaacgttggtaagtgaactaacttccatttgtctcgcgcaatgatgaattatttgcggaaggctgattgcaggtgtttctagctatcaatcgatcctggaggtaatcgtttccatcaatcttctgcggacttagtcaaggtcaaggagaaacataaacatttggcgtcatcactgacgcgagcgacttgcatcattttgttgtattttgctagatgcactcgcggatcgattgtcccttcgtataactcgatgtgaggcatcttggagttttccgggagtggagtttctgtaattctccttacgcaggcttccagatcctcatcttccgaatttgataacgctccacttattttttgaccaacttggtcgaagtagcaatttattcctccaaccttttggtgtcgctctcaaggaggtcgcgccctctcatcttactgctcatatggtttctaaggtcacctctacatggccttgctttctcacttttgtatttttcatatttggcatctaatcgtcgttgaaggtctgtagtagaccagttgtcttcgaattatcccacgactattctaccatctttgttaaccgagtcgctggggtggtaccttcaacctttatgtgtggggtgtccttttggcgtggctttgcctctagggttagaagggcacccgggctcaaaagcaccggtggccttctgcgcccttgagggc

SEQ ID NO: 19451 - DNA, 2964 bp, Cannabis sativa
caactttgctggcaagctgagttaattaattctctggaatatcctgtacaatggcatgattaatgatcaatgtggttgagtttggaagttggaatagggttcaggatatcacttgatgattttgttgctacggtttgaccatctaaaatgtttggccttacttttacaggttccttattatcttgacgaggcatctgggtggggactagagacttctgaacttaagaaacaactagaggacgccaaatccaaaggcatcagtgtccgggccttggttgttataaatccaggcaacccaactggtcaggtatgcaaggattagactcattggcttttctgaacgtttttgtgcaaactggattttttcaatttggtgcttgtctagctgtctttactcttggggtcgacattcaattgatattttgaggttttgcttgtaggttcttgctgaaggcaaccagcgggacattgtggaattctgcaagaaagaaggtctagtcctgctggcagatgaggtaggtggagtttagatatataaaaccaaaattgtcttatgtgttataattttcagtttatttgatttcattattcagttctgtagaacaaatatataataccgtggctactttgtggcctgtgacactgtctggtgaacatattacaggtatatcaggaaaacgtttatgttcccgacaaaaagtttcactctttcaaaaaagtttcccggtccatgggatatggagaggcagatatttctctggtgtccttccagtcagtctctaagggttagtttacgagttcaatggtgttaaaacttaaaactgatagcttatgcaattaacaagctttgcggaaatattgattatttatttattcaggatactatggggagtgtggaaagagaggaggctacatggaagttacaggatttagtgctgacataagggaacaaatatacaaaatggcatccgtaaatctttgctctaatatttctggtcaaattcttgcaagcctcgtaatgagtccacccaaggttaacatttctcttgtcctttctatttaaactcttatatgtgagacagcacaacttttggtaaaccgtatgaatagtaagaattaaaggcggcttaggccagtcagaagtttctagtccacatattagtcatatgaattgcttttgatttttgctgttgtgaaatgtatggttgtaaacaaagataacaatttaacacaagtttctccataatgtagtcaatatggagattgattttaaaatactttttatgcaggttggagatgaatcgtacgattcataccgtggcgagagagatggcattttatcatcccttgcaaggcgagcgaaggttagtatagtatgcttgtatcaatcaatttaagttacatgttgcatgcttctaaggctttttattttttgtttgtaaaacataattgtaatttccttgtggtataaatagacactggaagatgcattgaacagcttagaaggcataacatgcaacaaagcagaaggtgcgatgtatctctttccccagatcaacttgccccagaaggcaattgaagctgcaaaggctgcaaaaacagtacctgatacattctattgccgtcaactgctcaatgccaccggaatagtagttgttcctggttctggcttcgggcaggttagtgttgtaattatattgtcagcggaaaatgacattccttttcgtatttagatttgacagttttaacattgtttgtctttgtttatttacttaaacaggtcccaggcacttggcattttagatgcacaatactccctcaagaggacaagattccggccatagtgacccggttgactgacttccacaagaaattcatggacgagtaccgtgattgaatgaaaatgctatcgagtggatacggagataatagcgggaataataaggtaggtttgcctttcattatgcagaaagaagctttgtaatggggaaacaaacattatagacagcaccattccgttgtctttggaatataatcacctcggtattgtttgattgattattggacaatacttgaggatgattatcattcgtttcatttttcttggctttctctgtttacataataatttaaacagctactagtactatctatctattatattattgaaatatgattggaaggaaagttcttttgtccttttttcaaaccatctcatgaagatttatgtcagttccccttgcaccaaaattaattgaacgtgttctggattcaccttccctgtacacgcaaaacaatattgaatctacaaatagaaaatcaaaatctaagagaagagctctttttttcatttctttttcctgatctgaaacaatcgcatttattcaaaacccctctattgtgtatcaatttactgtcagtgtcttgtggaaaacaagactcaaataagttgcataaattacaagcatttacatcaactcaaatatcttcggataaacctcaaatggaaaatcattttctaattttcgtcggtgcatatgtggcatagattaattagatggcacttgttgtaatgtagtgaagcctcacacgttattgtgagccactaggctaattatccaacatacctttttttttttataatttgatcttactttagaaaggatctgacactattggataactctcccaccggtttggccttttatatccaacattttcaaccaatctctggtcaacaggcaaactattctttgtctatatagcattcatcaaaatcaaatcttacgtccaattctaaatttactatgtgcaatactttaagtcccaggcttcatacttttaattgttaagttgaaaaaaaaattaaataaaattatgactaaatgttaatgtcaattttttattatagtctttatgtttgaaaatatgtcaaaatattttttttttctagttttttttttt

SEQ ID NO: 19452 - DNA, 3830 bp, Cannabis sativa
acaactataaaagttactactatgattccacacactatatttatcttcaatatttactttaattttttaaaaaaatattgaccattgcccctgtgttgtagctggagtagttaagtattttttgctccaatgcattagctcctcttcctactagctatacccctgacaaagagagatggacatccataataaaaaaagcattggaactgctctaagtatctaattatttaatcaaagttattatccattattttttattagtatatttaaatttatttttaaataataaaataaaaatttaataccccacatggccatgatgcctataaaagtttcaaaagatgatattaccgttacactaaaatatttatctacaatcataaattatatttaaatattataccataaattactcttgatttttctcttggactccgtgtttccgagtaacagttttttattttccaaacatcgaaatatgcataataactaaaatcaattttatgcatgtaatagtttctctcatgttctaggcaaacaaatactgtaaatatttattgcccagagaaaaactaaaaaagaaaagattgcgagctggatgaacaagacatcaaactttacatgaagtggatatcatcaatgtagacgacaattaggtttgccttgtacaagtgttaataatcaacagtgaaagaagcaatagtgtatgaggaacagaataccaaacacattttgtagcacataaattataaatataaatccggaaaaaagaaagaaaaaagatttagcaaaagaaagaaagaaatctccaccctccccaacccaatcccagtcagtttgtgactcttctagcagtcttttacactctggctcagtaatcaacagacaaatttttggcaaggaaatgaaattggccaatccaaccctacacatccaatctcataaaaaataaacaaatatatatttatatagaaacttccgtcttgctatcctcccaggcaaacaaaccccgcatttctgaataattaacaatgttgtgactgctgatagaactgggatacctgacctgctctgtttatgaagcatctggagctggggccggtggcttcaggagcggttgaagtgccttcacaacaatgctcatatttggccggaactcggcttcatactgaacacacaatgctgccacagctgccaactgtgttaccgaaggaaatttgcatcagttgcgaaattctaaaaaacaagttagttggaacatgcatagagagagagagagagagcgagagagagagagagagagacctttgcaacccctttgggaggatattctcccttcagctttggatctacacattgtttgactttgtcttcactcaaccttggagtagcctgaagaaaacaaagaaaagaaacggtggtgagtgcaaacatgtcagattataatattggtaaaatacaaaattgtagaggagaaaggcaaacaaactaacccaagtaacaagactctgctgtccacgaggcatggtatgatcaacaggcttcctcccagttaaaagctcaagaagaaccactccaaagctgtacacatcacttttctgtgtcaattgtcctgtcattgcgtacctgtagaacaatttaatgacaatttagcaaccgaataacatttaaatatacaaaaattttgctttcagattaaaaaaggagagggagaaatagaatttcattataggaaagactgcagcgttgcaaacaatacccagttaacaactttaaatacaaggatatgcctaattacgttaccatcacctagttttgataaccattactcctgtccaatgtagaaacaaaattattactcagactctaactgaatcggaagaacatgaaaccatacaaaaagtatggttattactagttagaccagttaaaaacagcaactaagctgtacagcacaggcaatatcgattaagaagcgtgtgaaacaaaaacgtctcatagactagtatagatgcagaaaaggaattccagaaacattactctggtgcatgataaccgaaggttcccaaaactcgagtagaatgaagacgagcagccatgtcaggggcctgatttgaaaggttgaaatctgcaaccttggctttgaagtcttcaaagagaagcacattgctagatctgatatccctatgtattatagaaggttgaaccttctcatgcaagtattccaatcctctagctgcatcaacagcaatcctcactcgctgcatccaatcaagtgttggacctggttgtgcaccttgaactccctttctacctgcaaatcgtgatttgaaaattgaaatgttacaactattctcaacttttaaagatgaaaaatcaatttgtaaattaatggacaagatgaaagtggcattcctcaccatgcaatatgtcatgtaaagatcccatggtggcaaattcatatgcaagtacacgaagatttccttcaacacaataaccaagcaactcaacaagattttcctgcttcaatctagaaaccatggaaacctgtaaaaattcatatcaaacagtcagaaagaaaattaaaaagctacaaggcaattcacatcaacatttaagttgttgcacacctgggtcaaaaattcaacatttgtctcaggttcagaagaaacatcaagtttctttacagccacagctttcccattgttcaggcttgcataatacactcttccataggatccttcaccaatcaatgccttggatccaaaattatcagtcttctctttgagttcttccagagacaaagcagccacctcaataggtggtggtgctgccttttgtacttcaggtttgacaggagctgctactcttgaacccttttggttcccttaccatcagtaaaataaaagacccagttatcatacattgataaacaaacaagaaaatagtaaagaggaaaaacaaattacaaacaatgatagactggtcagaagtttaacttacatatagatgtataatatgtgtggaatacatgtatagaatctttcaaggttttttttctcagttttttagaaatgaaaaacttcaatatgacttatagttagaagtttctattacaaaagaaccctacaacagtctacaaatacacagaacagaagctctcaatgagttcagcaggtacggccattaagacaaatgcactaacgacagataggaaacacaatcaacaatatggtatgaaatatattgcaagacatttgtttgaactatattctaagcttgtcatgatatatatattatatataaatagggaaaaacgaaaaacagcttcgcttgtacataccatctgaataattcctcggactcttcaaatgctcattttcatttgaagggtaagactcttctacctgacaagtacaacaaagccacctacgcatcctgactctcttcctcaaatacaaatcgtcttcagttctgttttccaaacgtacaaagtagccaggaggaggtgcatgtgcctgcacagtgagtaaatcttgaatcataataaccccaagcataagacatcctagaaattcgtaatgggtactaatgccatgagaatttcaacccaattcaaaaacaaataccaatcccaacataacgcttacagaaaatacaacaaacaaaatccccaatttgcgtcaaactaagaacaaattcttgaatgatccaccgattaattcaaatgtaacaaagtagaacaattgaatagctaaatgcagccagtggcatccaaatccaaatcaaagtcaatctaacacaattaccaattccaaatcaaatcagat

SEQ ID NO: 19453 - DNA, 2822 bp, Cannabis sativa
aactttgtttttcgtgttttttttcttctaattttcaatctgttgtttttacttagattgagctgttgtcaagacttaatcattgtcatgtggtgcctctgcttggctactgctctgaatcccatagaaaactcgccgagagattattggtgtttgaatacatccctaatggaaatcttcgagattgtttagatggggcgttggagaaaactatggattggggtactcgtgttgcgattgcaattggagctgcaagaggcttggagtatctccatgaagcggctgctccaagaattctgcatcgagatgtaaagtcaacaaacattcttttggatgaagaattgcaagcaaaggtatgagaaagtgcggtttttgaagaatttagccagggtaattgactattagaagagtagcacattcttcttatatatgactaatagatcatatctgaaaaccaattggttatgagaagagtagctcgttcatcttatatatgatattttatttgtacacattaacaatgtagaactaactcgaatacatctcattgtcttgggagttcttgtttgttatactattgtcattgtatttcgcggtgtttctgcatttaattgagttagaaaatgtgcagataactgaccttggtatggcaaaacactggatagctgaaggtctatcatccagctcttcaaactctccagcaaggatggaaggaactttcggttattttgcaccagagtatgccattgttggacgagcctctcttaagtcggatgttttcagtttcggggtagttcttctcgagcttatcactggtcgaccgcccattcataaacgaaatggcaaaggagaagaaagccttgtcatatgggtaaaaactctctaccttgatttcaaacttatgctaacacctttgtgcttatgtttgcgtgtcttgtttttcaggctactcctcgtttacgcgatagtaggagaataattacagagttggctgatccacatttaaatgggaattttccagaagaagagatgcagattatggcatacttggcaaaggaatgtctgcttttggatcctgacaccagaccaaccatgggtgaggttgttcaaattctttcaactatcaaacccgaaaggtctagaaggacatgcatttctgtgaatttttctcaggtaatttattctccattaactacataatacttgttagtattttggccgagctcgtttggtacatcgtattacattttattattgtattgtaaaatttaacatagtattatataatattatgatatacaacagaatgcttaattatcttgtatcaccctcctattcctatttcaaatccaacaaattgttttcgattttggctttcatgcagagatcatctggatgtggcatagagaaacctgatcagaatcatatttacaaaagaaacacacatttggaaggttctcaagatgtagaggagctaaagcgagtcgtgtcctgtgaacggtcagatcgttgttcgctacctcttgatgttgaacgcaatctttgcagtgaaaagatagaagaaaataaaatttcagccgagcacatggagcgattggtactcttagcatcaaaagctagaagctggcgtgcatcagatgacgaaatagttgacttaaccgaacctcggtttgaatcattttgtatgggaaatattagtcccccataaaaacctctaggcttggatggattaagggggaaaaacatgtagctttcgagtcttggaacatttcttttcctttcaaaaatagtggaaaagaaaagcttgtatgttaggtgatcatgtggtgattatcatctttattgtttcattttgttaattatttcatgtacagaaaaggaaaatagaacatacaaattcaaacaacccttgttatacttttgaatatgaagttgatagtcattgtagtcttttgtacaagatatcaataatttggtttcaattttgctcaaatgtgggaattgtttgtacctataaatttggttataggtacttaaatttccaaatacctcttgagtttgtctatttacttagaatcaaatattttgtgaaaaaatacaattaaagtgcatttttttataaaagagaataaattaaaagggtagttggaactttaaacttttagttgaattgccttatattttgaatggtaggtgaaatatgacttatagacaagatgatatatttatatataaacaaaaatgataacttaatccatatttggagaattcttagttcactttcattcttagaatttgtgctatagatatggatcctccaccaccaacaccgccaccagcaccaccaccaccgcaaccacagcttacagaaccactgtttcctccttctctagctcccccagatgggagatgctttgaatcatggtatatttttatttgttttttatttttaatttgaagctaaatttgagtgttgtgtaaattatttttaattaattttatttaatttaattttcagtttgtggttcttgtgttgctgtggtatatttggaagctgttgtttctcaggcccactatttgaagcagggtctcctcctccttaatagacatgttttcattgttcacttcacatttctaatttgtttttattattattattattattattattgcttttgattgtgattgtgagtcttacagaaactaattttttgtttgacaaaatagtatttctgatattgacatctttgtaatactttgttttttttttctttttttttttaaataaatttattattcttattcttattattattattatt

SEQ ID NO: 19454 - DNA, 5188 bp, Cannabis sativa
agtgcgaattggatcggatgaacagccctactcgggactcaaacccggaccggccttagacccagaccggatccagaacccaaacccagacttggacccagaacccagacccaaacttaggacatgggacccgacccataatcagggttggggtcgagtttattaaaaatatattataactttacacaacctataaatactaccaaatatagtattgcattaaataatactcatacaatacagtataatacaacataccaaacaagtttgagactttccatcccaaagcatcattttatactttggctagctgctttacaaagacggtaaacaagtgatagattaatgaaattcaatatctgtcaaacaaattcttatttattgtgtaatgtacatgttgaaactgtggagcacctttactttaaatgtcactttagcaggatttgcttacagcagattaaaaagtggttttgatggagatgtttgagcacagatttaaaatctatcctaagatggattgatagagcgaaaatctctaaatttagaaggcaagtttatagtgtatctatacctgttttggtttaccacatatggatgattcggaataaagctctttggtttcaatatgtgcaagttattacagttagttgtaatagaattcagcaagaagtcaaaactagagtagccatggttactccaaaaaagttgaaggaaatagatgttcaatagtttaagcaattgtaatttttttagttagttcttgaattgattgtatagaagaatttaaggccttttttctaaggtggtgatagattgtatatgatatgttggttgaatatactaagttgaaaaaaaaaaaaaaaatacaacataccatcattgttatatatttagcttgatacataaaactccacataaacccttccacattctcttccaaaagggattatgtgtatctatacaatagtcaatttagcaaatacaccaacttccatgctttgctacttctgtaagagttagaaaatggtaaattcaggtccggcattcaacggcaagagactccaatatgcgccgtgattatcaacgaaacaactaacccattcaactctgtaagaacctgttggaaatctcgaaatgtcaagcaagcaactcgagaatccctgccctctctcgtctgcttcgaaacaaacatatgtcttcacaaacccgcattcaacattagtattggaattgatcgtatttttcgtttcgtgttgtgtcacgtaatgtagaagcttttcattcatttctaccatgtcagcagtttcccaaacttgataactgcttctagaagaattctccttagtttccgaaattggttttggctgctgaaaagatactctgctgtagagcatggtatacagcttcttgggccgaactggaagatcggtaggaacatttcttagctgaagacagagacttaaagaaaggctgtcaccttgtgaaacaaaaattccatctgcatttttcgcgacattgacagcgaagagttctgacccaatgcaaggcctgaaataacaaaagttcaattctttatcacaatttcgggtactatttaaatggtgtttgactactttgaaatttcataaattatggaagacttgctctaaagcacaatttaaagtaacacaaactatacttatgataaatcaatctaagagctaaacaaaatcaagagcttaaaacaaaataaataacttgataatgagaaaatctgctcaattaccttaaccggaagaagtatttgggggtcctgaaagggattttcctccatttgataagaattttgaatatgaactgtaaaacattcttagtaattcgatatgtatcctcctcgttaagagtcccgcttgcttcactttgcaagcaagctatatcaaacacagcaacacgacaaatatcaagaacatcccttgcttcataaccgacgttccaggcttgatttctgaacttcaagttactgttacagcaatctacattgttgtggtcatcggtattcatgatctgataaagttttgcactgacttcattgtccatgtgcaacaacttcccagctaggctatctattagatgagcatgtaaattgttggtcgagtttttcgaacaaggatcgtgaaggttaggaatgaaaagagaagaacccgttataaaggacagaagtgaagtactgagtgcaaggcctgaaatgattttcaaactttcgttgtccatgtctacgaaggatgtactaaaaagatcgaattcctttaccagcttctccaacctcaaagagacttgagcaatttgttctaaagagaacaagcaatcagccagggagccgcttttactgctttcctcagatattgcacctagaattttgagtacatccgccacacctcttaatgtttttgctcgtaatgacaaaaaccatcgctgaaagagaaacgcttgacatgtaacatcaccttctaatgttttctttgaagagcaaagactgtcataagcactgaaaagaacctcaccaaaatcggcttcagctagaacagtgtagaaatgaggaatatagggtctgattttctttgatcgatcagctaagaagtaaccttcatttttcaaaaccagcaacatgactttttcctcagatttagcaaattcaactagtgatttcaaccagagactgcaggaatcggaatgaacgagcgtaattagctgctgaaatatgaaagaagatgtgagccatgaaccctgacatgaagaatacattccaactttgtaagccaaccaattcctattctctgccaatatcttctttgcaaattcaattgtaaccgattcatgctcaactgaatacgaatgctgcactatacccgatctatcgtcaagattgcaactttcctcactcttattcatattgtgaccccaaatggctggagaatgtaacagtagagagtagattgtgtgtgtatagcaatcaaaatctttgcattcacatacattgtcaacaagaagcttcactttgtcatatacaagtacatcgacaacaccggcttctttactttgaaattcaagacaggttaccataaatctataaactttataaacaagcttcaatctgattactgtattgttgttcatctcggagaggtatttcaaaaatacaaaaatctgatcaataagtacgccaactgaatccaggtgtgcatcgattatagaaagaagaagattgaataatttattaacttcttgaaacactgtagaatcaggacaagtatcaaacaatggcttcacctctaaggtgatccaattgaagattattgaaatcgccccggaagtaattgaaggacatgaccagttggaaccaatatctcttcttcccttgaatttatttgacatctcaactagaatacaaacagccagcaagctcttcgacataaatggtgacatggatgcattctcagcaacagtcaagagcttatcgagatcaagtatgtcactcggtagactatgcatgtataaaaccatctgcaattgtccaatgtaaatcaaaataatttatatttgacagcattaaacaaacttatacataatttagaaacaaccttacgcaaaatccttaaagcaatgcactgaatgtttgctggaactaaagattcaccgagggtgctgaacaatgcttcggccagattcacattagccaaaaaattgtatgctcctttattaaacaaaaaacaaaggcattttagtgcagttgcttgtagcttcaaagtcttatctgggctgagaaacaataaaagaaagccaacctgtattcaaatgtcaataagaaacgcccattaaggatccacataaatggtaggcacaaaaaagtatggaatcaaatggtgtctgttttgatatcaagaaacatacaagtttcttgggaactccaaacacagagataaatatctagactttacatattaattcacacctctgtcaacagcccatttggccatttatacatttagttaggaaacctcaatgacatggacatagctaattaaattttcaagtcagcaatactaaaaaacctctcattaatccagttagcagtacaagtgatataagaaccagtcctattcatacaactgggatactaaacataggtaataaattctccttcagtatgtgtactgaataggagctatttgttctcggtgttggaagcaggaggatacctggtcagatataagaactgaaaatgtcgatgcaatttttgacagtgacagcagcattgcaatctgataattttcttctggggaatctaatactagctttagacctgtctgcaaccatttgttagaatcaccttaaaatcactaatgatattagtaagagtatatactacatacaatcaaagaacacgaatgtaagacacgagagcagagcagtacagaataagggggaaggaaggaccagagctaaagcaacacattttttttaatcaaacacagcataatgtatgaattatgattgtttcagttggacaatgtaagtacaatggaatgtgctgattcctgttgaattttgtgcaagattgtaccaacaggaatatattttaacaaaacaattactaatatcaagactatagttatgtttggtagaaggcagagttatattgtgtaaagaaaaaatggaatagaatctagcactcgatacaagtgacctcttacgagtttgttcaagtaagcatagatagagccataaaattttatcacaaacccaaaccatgtcatagcatagaatcatgattcatgatatgaccaaaacactttaaagttagatgaatgctttcaccattgtccccttactcaccaaaataagttttatattgtaccttataagctctaattgcagttgaatatgaatatctcagtttcgcatagacacgagctgcagccaatctaacaggtaacaaggtttcagttgagctcatcatattaacaagaatctccaatacaatacatggaaagtcatctgataactcacaaaagcatcctgcagcaaaaagagcagcctttacctgtaaaaaaccaataaaatacaaacatcaaataccaattccaacaggctcaaataaaacaaaacagaaaaaatctcaaaatattttagggtaattctatattttccc

SEQ ID NO: 19455 - DNA, 2551 bp, Cannabis sativa
acttgagctagtttggaatagttagaatgtattgttcttcagtctttatgagtttggagtagtctattatgggctatcctttgggtttgatcagcataggtacttgtgaattgtgattgggcttgaattagagcacccgtgagctcatggttgactcaacactgctttacttttgcatgtaaattagagcacccgtaagccaaaccccagtaaaacaataataacaaatataaaaatcaacttatagcatatatcacatacaatacgctcttgtgtaaatgattgtgccaccgcaccatataatacgctatctcatatataatgacaccacatcatcttatatctatattacatagacatcacgtgttacactcacatgtctatatatatttaaggccttcatagggtttatcttggctttaattactgaatctaacctagctatgccttaatcgcataactcttatcatatattcacataattcctttaggatttgcctaatcatagaaattttagggtaataaccctaacacacctttctacataaatatacatatatcatacaaatgaaccattacgctatactctaggtgcttagtttgttgtcttacctaagtttcaatgtatggggagatatccagtccacaggtgatctcgagcaagctagtgttggtatttttagtcacaatcctgatttatacacaataaggttaatccagaaatcacattaaataatattcacatttaggatcccaactctagactaatgaatagagctctagacgagctttttaacgatataaagaacatctaagtcgaggtttagagtaaaaaattatgaccaaaaacaaaatgaaaaaaaaaaaaagtgaattgtcgcctcagggttgtcacaactaattgtcgccatgactaaacatgtgatcgctgcggccaaacttggcaggggctatcccctattttaggtaaagtctcgtcgtgaccaccataaatttagtcgcagcgactagactagaaaaaactcaaaaaactaaattttcactactctgaaaatacaccaaattaactcaaacttaatttaatattgcaatcactttcaaactcaaatcaaagtgtaaataagcataatttaccacaaatattacatacctaaatacacatgctccaaaaaatccatatcctcataatttacataatcaaaactcaagaaaaccaagtagaattcatacttgaacttactaatattgacattaccaaagtcccatcaagactaaatcataaagaccaaaccaagatcatcacaaccataccatttaacaactacatgtaattcaattcaaatttatgaactttttggaaattaaattaagagaaaagaaattaaagctacctaaaatgatccttccaaagctaaacacaacccacaaccaaaattctcttcaaattactacacttcttctcaaaattaaagaaacttcatcaaacagggataaatcacaaagagtaaagggcagcggggttttttttttccaaaaccagaaaaagaaatatttatctcttgaaactcagaaaataaacttacgatttgattttaaagtttggtcaaatggtccttttgcccctagaactacaattcggagccaaattctctgtcccatattcctgtcccaatatatgtcccaaccaattatattataacaactcatttaatttgccacataagcatttaacagactttacaattctacaaatacaaaatttagtaacaccgttagtattcctctctctccagcattaattctctattacaattaattaaatgaattaatattattatttttaaaaaaaaaaacttttcaaattcagtttccctttgtcatctattactcaaaaaactccattaggtttttcattttatttttttagaaaaactcttctccacatttcattttggctctttctctgtcaatttttgtagctcttattcacacaagattttcctactgtacaaggttagtaatttatatatactttgtattttatattttgtttcatttttttaattataaaaaccaatatggatataatattagtagagactatatcatatatcatttaactaataaggtttaaatcttttcatcaatatatatataaaatatactgaaatttataatatttcatttggtgattaaacttttgtagaaaaataaatattttcctcaatttgtgatataggtttaatgatataatgttttctaataaaattagaattttaaattataaaaataatgttatatattctataatttataatactgttttgtttgctatatatttttttttttataattattgaagatgatggactcaactaatttagtgggtgaagatttacaatcacgtcggaaaataaattttgaaagtgatgaagatggaatattgtcttcaaatattgatataaaatctcttcattctaaaattgaggatgaggcaataccaaagattggtatggaatttattactgaaggggaagcttacgatttttat

SEQ ID NO: 19456 - DNA, 2111 bp, Cannabis sativa
ggctgtctccttacaaaggaggtgctcatcatggttgtgcttgatagagcggtggctgctgttgttgttgaggccatatctttttggttgatagaatagagctttttcttttttgtgttttgtttggagtttttgagtggggggcttgtggatatagtgtagaagtaatatgagagtgtgtgcattggcatgggattctatctgccacgtggcagaatgctagtggttttcagttttatctagtaattaattttttctctatttcttttgggtatttttgataataaagtattggataatatttttgtatatatttggaggattgcatattttgtaaatcttttctttttctggagatgtaattttattgtgactttttataatcaaagtaaattttaggaaaaatccgaagtataccctctaaaactggttatttattttggcatttcaaagaggttttttgtttaatttttttataatagtgtaagttaggccacttgtaattttttttaaaaaaattttgaaaaatttatattgtcaaaaacaattaaggggagaatggccaaaaatatatagattaattagataaatacaaaaatttagcaaaatgactaataaaacatattaaatatatattgtaggtataaaaagttttatttttaaataaataaagtggctaattttttgtcagtatatttataatttgtttattaatacgtatttttatgtcaattttaaatttagtaagttaatccgtctttaacttaaaatttttagtatacatgtttaacttatttgatttgtatttatttaagttaattgttaaattcaaatccgttaattttatattcttttctagttatgttatcgtggacacttatattgacacccatttaaaaaactcgtccacatgtaaaaatttattaggagcattgctattagatactttaaggtgtccaacactatattgatgtggtgcgttgtatgattagcaatttcttatattatttattaaattaaaatatgtaggactcaatattaaattacacttataacgatttatcacttcttacagtgtttccacctaaacgccccttcagcatttctccaaataatgtagagaagttatttaatcttcagagtcttattcaatatggaaagtgtcaatctgaagtcaaattttgagtggttagggatctatcattttattttgaggcagtagaatttggttggtttagaatgagtttaaattgttatacaattttttaagaccatttccttcagtatatataaaggtatttatttcatacatggaaaaagataataaaaggcagagggaaagggggttttttgtagaggcatgcctcaatatatttatatatataaatataggaaaattttttggtgagaggaccatttttgctctcactcatgagggtattttttttagttttgattggttgtgtattggagatgtatagggttataataagttgtaaaacatgttattaattgttttaatattaaattttttttttttgtaactttaatgaaagagttgattagggggattttattttctagatcaataatatactatacaatgagttttttaatttgattctttttttttttctaaataaattgaactctgaataggacaacctgaatttaataaatatatcatacaaaatttacacgtatatttcaatcttagttgtttcaatatctccactccatctaatgcctttagtcctattattttccacagttaaaaaaaagttttccattgaagtatctcttgcattccttttaaaaaaaaatacatatctctggcattctctctttcagtcttaatatgcatggtgaaatttttttctataacagcattgtacacaataatttgaaattaaaatacataatgaaaaatgcttgtggctaatagaaacaggaggaagatgaagaacaaaatgtttttgggatttatggaattgatgaagaagattctttctattatcatgagaggtgatagggtggaattgaaaaaaaaaaattgtattctcatttgattaatgggtagaatacgtgggtattaaatctaataacttctt

SEQ ID NO: 19457 - DNA, 2858 bp, Cannabis sativa
tttatggcatcttattttacataagtaagggcgttacatatatatatacactatatataaaccactataccattaaatttgaaaatcagatttcatagagtataaaattaaaaacctgctaacgaacctgacttaagaattttgattacacaactatatatatttttattttgtcatgtacttatacatattatattagacgttttccacaatgagactaaattaaatagttagagggatccttattattaattggaatacagaaaagaagtaaatataaatataaatataatatctcacgcaatctcgcgagtatctattattaacggcaatgatatatatataaacccataattctataaactaaatcaatactctatttatgactaagctactaaaagtacaaaccttattttcctcagtagaacgagtggttgtttgatggaatagccaaagtgcccaatgatatctgtaacatattgatcaacatttatctataactataaatctatatatataatacaatacagtgacgttaatggcgaaatggggatttaagatttggaagtacctaacacaaatagtgataggaaataagagatttatgagaattataaattttagattaatttttccaaatatataccaatattcttaatcgtaacctaattcaattagatataaaactcataaaactgatacaaataatagatatttgtattatttatgcactaatttatgcatttttttttttataaatatttgcagaatatttaaactaatattttataattatttgataacaattataattataaaataccttgaaagcactaaatacactaaatcaatactcctccaacttttccaagaatttgacccaaaaattttataccgggtagttatgttgttttgtgcccatcgtatgttgcaatagttcatggaacagaacatgaactatttaaagtaattgaacctataatcattacatggaactcaacataatcatggttaaaataaattttctaaaattatctaaagataattaagcaacaaataaactaatgtaattaagattatattaaaaagataacctcttatctttcatattcatatgtagtagattgttaagatataaaatattataggatataatatgatcaaagacttttgtagctaagagttttaactggatgctctgtctgtaatctgaaatgaataactcattgcaatattgacttaacaagtgaaaaaaaaaaaatgagagttttcttacatattaatcagattagatttgaatgcagttcgagccctcacatctgctgatcatttggcttttgaggtgaacatcgaagaacctttcaaatggttctcccctatgtctataagaagcttgtttggattttaagattttgtagttagtgattcacaacattgctagtgggctaatacacatgccgaatatatcacaaggaaaatctcacctgagcatgtggatcatggatctttctagtcacctcaacttcttataaattggaaaagcgccattgattaccatacttgttgtgactaaatgaccactatgcaatttgcttgctttcagatgggagcacctgaatcgaaaattgcagaaactacatattcataaaattgcattactgttaaataggaacaaaaagaataaaaaagaatataaatctgaacacctgaattgaaaaaagaataaaaaaatcaacttactataagaggtatacttgatcgctaccaacaaagaatgaccactatgcaatttgcttgctttcagatgggagcacctaccattattgagtttttttttttattcagatgggagcacctaacaacaattgaccttgaaatcaaaatcaaatgtaacgaaatcaaatgtaattacaatgggaaagcattgaataaaaccaaaagttcgcaattaaaaccttaaaaaataaaattttcaagcaattgcaaatttgcaattaaaaacacctagaaaagttatgcactcaccccatgctgccgcggtacttgagcgtataaggcccactctccaacatcctcccgaaatggctatgcaccttgtgtctatcctttccactctgatccataagtgtcaattcaaacaacgccctcacatcagttccctcgctagcgagcgcgataaacaacaacacatacattgcattatcctcggcactctttccatcggggtaaaagtaaattgcccacgagtacccaccaacattgaaagtatcagaagcttccccatccaagacccttcgaaagagaatacccattgatcttgaaatggtgagtaacattcacagtctcggtgatcgaagtcgaggtagtagtcgccagaggagaagccacgacagatgaagaagacgacgatgagggcttaccggtttcacggagcaccttacccatgcccaatccgaggaaagaaaggaagaaaaaaaaaggaaaaagactcacgtaaacaagacttccgaaaatagaaatcaggatctagggtttacaaaatacgaaatgtgaaataggggcttcgaatcaaaagaatttataaaattggaaacagaagaaaaatcaaattgttcaaccaggaagtgagataaaataagagaggaatgctcggttggaagaggcaattttcgggatgggataaataaaaagtcacccaatcgtatttttggatttattttattatatataaataaaaagtcacccaaaaatttttcataaacaaataattctggtatatagccacattttatatagaatagatatctattctatataaagtatgtctatataactaaaattattggtttatgagaaat

SEQ ID NO: 19458 - DNA, 8364 bp, Cannabis sativa
  modified_base (1833)..(1845): a, c, t, g, unknown or other
atgatcatctacaaactacaaactacaatcacaaccaactaatgcatcaactttacaaaaccaatattgatcaattttatttttttgttttctctttcaataaaatcattggttattgttctctgcaatactgttaacaactttcaaaataaactaaagtgttagacaagtttgaaactttaatgattatgaatatatttattgcagcaagcaaagaatttatttactttttctttttgtcttttagttcactagatcttataaatatataccatacatagcttcataaggcataagaaatcaaacatatagtactattaatttgtgtgaacttttgttattatttaagttggttgcctggcaattccttgattcatttggtgagtatatctaattatttggtcaaattattttagtattcttacttaaaacatataactaatatttttgattaatttggcagttgtctttattagattgaaatggagactactcaacactacttttgtccccaaaaccatgttttgttggtaaaggatagtgagattggtaataaccaaattacttgtcaaatatgcaagtcctctgttgcagctccattttatgtatgtcatacatgtaaatactatgttcacaagtcttgtgtaattgagaaaattaatcacccttttcatccttgtcaccctttatctcttacctcaagaaatgctttttgcgatttttgtggccaataccacaataacagtttcatgtttagttgtgttgaatgtaattttgatttggatgcggattgtgccttgatgtcaaactccataataacatgtccagaaggtcaaaattgcatccaacattctactcatccccacttgttactacttgttgacataaccgatgctatttacaaaaacattcatgttagatgctttgcatgtcaaactaaatattcaccatcagatggtggagtttattatggttgtaatagatgtaagtattttcttcataaacaatgcattgaccaactcccacaacaaatgcaaacatcccacaatcctaatcacggttgtctctctcttcgttttaaaaggtactatattggtaaatgttttctttgtaaaaacaaagaccccagagccttttatttccaatgtcctcaatgtgattttcaattgtgtatgggttgcaaagttatcagagtcttagattataaatatcatgagcatcctctttcctttgtcaagaacatgtcctctgcatttgaaattgaacaatgcaatttttacgacacttgttttaagacatcagtcatgtctagttctaaagaattccaaaaaactgagtccttcaaattctggtgttgtgattgtgatttcgagcttcatttattatgtggtccactaccttctactataaagcatgaaagtcatgtgcactccttacttcttgttgattcgttcattgaagattgttttggtgaatattattgcgatatctgtgaaactgaaagaaatccacgaattcgcgtgtactgttgtggcgagtgcaaatatattgcccacgtgcattgcgtgatttctgaggtaggccatagtatatatttttttaattctttctatattaggtgaaagatacttacaatgtttatatttgtttgattttatttgaatttttttttgctttcatatacaaattttaaatgaataaataattggagaatttacattaaatacttttaattgaatctaatttgcaactatgtctttgccttttttttactttttttttttttttttttcaggtttgcttaacatttacaaactctctctctctctctcnnnnnnnnnnnnnctctctctctctctctcactttttgttaaatttttgatcacgtcggttaattttaaaaaaatatatatttgtgatctactcattaatgtgaacatttcaagatttaagaaacattttattttcgctatttccagaaaataaatgaccatttagttattaatttagtgataagttactcttttataacttgtttaaatcttaatcaacatccattttctaattttgtcaattaaattatttattattatacaataactaattatctttcaaaataacaaaaataaaaattttatatattaaattatagcttgttatattagatgataactcattagtttttttaaaaataatttttaagcatacttaaatgtattttaatttataagttaccataatataactcaaaaataactaattaattactaagatgtatacaaataagttttagaattaaacaaaatatatataaaaaattatatgatgtaaaaataaattcttttctgtaaaagtaaataattggtttgttacttctaatattattatactattaccctcaaacatatatttttttttttttgaacaaattaccctcaaacatattaaatcctaattataacatttcttttgttttcttgacaaataactttttttttgttttcttagatacaaataaactaagaatatgttatatgtaatttcttttttaaaactttaaacatggaaattaaaataccttatttttttaattttttttttaaaaaatgtgtcttgtaattgatttacatatttttctttaaaaaaaaaaacaaaataattaaaaattgtgtttttattctttaattcaaatggagatataagagcactcctaacaatttctcaactttactttttaaaataccccagcaaagtcttatttttctgttttaactcacgcttttacattacactgtatatcaactcttttatattttatattatttctttctttatatcatttaaatattatattttatatttaatacattattttttattttttttatattatttctttctctacattatttaaatattatattttataaaatcttttattttatataaacaagaatgtgaaaaatattagatggaaaaaatagaaagatgagagagaaattattaaaataatgtttgaagaatgaatagtgtttctctacatgcagagaaacactattcataatgtaaagttttgaactattttatctcctttgatagatcttactttaataacacatattctttatattttatctttttgaactattttgaaaatattattgtgagtgctatactttaagagaaagtggtgagagaaaaaatgaagtgaatttatataaataataaaaaagtactaaatagttatgagaaaaaattattaagataaatttgaaagtaatattattttttttaaaatttggattcttattttaaacaaattctaaataaaagcagttttgttaaacatatctcttaaaaatatatttacttttcaaattaagaaaaaaaaataactttttaaataattattatcaaacacaccctaaatttattgtactgaaacaaataattaaaatttcaaatctattatatctatagatgatataaaagaaaagtaaaaaaaataaaagattattgaaaggaagcaccccaagttttatataagaaaatattaggcatgtcaaaggaaacttgtaaccatttaggacttaattttacaaatccctaatacaaaattaaattattatagatgtgtaatttctctttcctctaccatttatttttttaattacattaaattcagttacttaagtggttgactagaatatatttaaattctggccaaatctatttgaatttattttaagtacaactaattagaatgtgtattaccttttgtgtgtttttcaaattgttaatatgtaattggggaaaattaacaaattcttcttaaaggataaaattatagtagtaactttttattataataatgtgtattatttgaatgtgtttagattataaatgtatggaagggggaccttaaagatgtgaagctaaaggccttgggagatgatttttggaaattatctgaagaaacagattatggtggatgggcagagatagagcagggcacatctcttttgaccttgagagatttaatacttcaattcagtgaatctgagctatctctattaaaaaactcttttacatgggatgaggaaaataaggaagaaaaagaagttagtaaaatgaccactcatttggagactgatgatgcaaaaattgatgaggttctaacattctctagttttactgaaaatgcgttcatgtcatttatttttgatgagtttagtaagagctttagagaaaggaagatgaaaataaaagctagtgatctagcactgaaaatcgttgattttgaaggttatttcatacctttagatttggtccctgtttttaaaaatttgcttcacaaacatagagatattggcagtcgtagcggttattcaaaggcattcaaaagcgtgtgctatttcttgatatgtaaagtgatgaggaagatgcatactactttggtgatagacatcactaaagatcttcttcaatattggtataaccacataaaatttgtagaggagcacaccatctttgaactggattttgtcaaggcaagtctagaggagatcacaagagatttcttctatctccaactaagccaaatgcttgaaactgatgtcccaacaataatgaacaaaaggatagctcacataaaaaagaagaaggctcagataaaaaagaagatggcagagtatcaagaattctgcaaatctacttccaaaaagaagttcgtaaaagagggcttgaacaaagtggagcaactaaaatggaagagggcaggccaagtgggtgatgatattgatagcacaccttcacaatacttcaagtagtagtgggtaatattctcttaagctctttgcacaaaacacttttttattttacttgttatttataaatgacttatatatatatatgataacataaaaaatagaacatttgtaggattaattttttttaatttcatttttactgatttccagaactcccaccaccaattgtgacgttggtacacatcctttgctcttacctaagtaagtttacaatgttatgcgctggtgagcttctcatggatgcattgggctctactaaaacttttgttgaaagcctgattgagctgtactttaataaaaactatgctttgcttcattgaaacattcctcaattattattatttatttttttcgatcttgtgaattttagtatgcgggtggatcttataattatgatttagtcgtagatgcccttgtcaaatggtcgtacatgttcctcttaagactattagtgagtttgttttaggggaactcttctgtggtgagttgtatttttggaattaaatgatattacaatactgaatctatgacctatatataaatatttacaaaggaaataagagctcaaatagctcaataaataaactaaccaacctaatagaataaccactaacgatgtagaactaactgaagcataaatgtatataaattttgttatcccctcaagatggattgtatatgttgtatacagatattttggcaatgtgagaagtaagggtggtagagggaagaggtttggtgaatgcattagtgagttgtaaggtgatattgatagggattagccgaatggtgttgttcttgaatcgtcgatgaaatgacaatcttgctcaatatgtttaatccgttcgtggaaggtgagactattgactatgttgatagctaattgattgtcacaatagataaaggctggagcatcttacggtatttgaaaatcagtgagcaaatattgtaacaatgtaagctcactacttgaggtagccagcgcatgatactcagcctcagtagagttctttgagatttttcgttgcttcttggtccgccacgagacgagacagtcaccaaagaacacacaaaaacctatggcggaacgcctagtagttgggcaagaggcccaatcgaagtatgataatccacaaagatgcaatgaagatgatgtagagtaaaggaggccttgaccaggacttccttttaagtaacgaatcaaatggtgaactgcctgcaaatgtggtgtacgaggtttcaacatgaactagctgaggttttgaacgacgtatgtgatgtcagattttgataaagtaaggtaaaggagttgaccaatgagttgacgatgtggtgaaggatcatcgagaggttctccttgttcatcatccagttggatacaaggatctattagggtcttggcaagcttactgcttgtatttcttgtatcttctaggagttgaatcgtgtatttttgttgagataagaccaacccttctattgatcgcgctattttaaagcctaagaagtatttgagaggaccaagggatttgtgtttgaactttgaattgagtgagtcttgtagttcatggagcagagatatgtttaataaagtaatgattatgtcgtcgacgtacactagaagagctatgaaagtgtcatttgaaccctttgtcaatagagtgtagttagcttgggattggtgaaatccttcttgaagaagtgcatccgagagtttacggtaccattttcttgaagattgtttgagaccataaatcgattgtccagcttgcatacaagttgtctatctgtagtagtagaggaaggaagtgtcatgaagacttcctcatggagatcaccattgaggaaggaattgttcacattaagttggaaaataggtcatcgcttaattgttgatatggaaagtagtagcttgaaggtaaccatcttttctactgatgagaaagtatcaaagaaatctaattcttcttgttgatcagtgtagccttgtacaatgaggggagctttttaactcttgacagttctctcacttctcactgttatacttgactttatagacccaacgacatccaattgctctcttcttttgaggaaggggcactacagtccaagtcttattgttgagcaaagctagaagtttgtcactactacaaaaataagctttagtgatccacatgacgagagactctaaagatgcttagtgatctttcaatgtgggtgactgaaaaagtaatatttagtaaccctttgacgtgggtcactaaaacttattagagattctcattgaacgtcactatagattttagagtaccatactgtcagactctaaagataatagccaccctcccaatgcgtggctaaatctatttttaaaattatatttcacgtatatattttttaaaaaatattctacttatataatttaaatgggtataattattattacttttttttagcctgaaactaaaataattactacaattatatcttttctacttttaaaacaataaaatttcagttttggtggaattttatagatcaatataatcaaaataggcataaaatgctcaatatctaatacatatcaaaatatctaatatataatattcaacaaataatacacattttgaacaaacaaatcataaaattaactcagattacccataacagtataaaaaaggtgagtacggacccacattatacacaaaattccataacggtatataaataaaaaaaaaataagaaatcatagttcattgtttaaaaaaaaatagaaatcatatagtcaaatctcattccaaatattactaagcctctccctccacgaaccaccaatcgccaacgaatacaaactgccacgaatcgccaaccgcgcatctacaaactaccaacaacaaccatccatctacagtaaaaagatagattgagaatggttttaatctatgagaagctttacataatggagaataatattctaacaacaaaaccaaactagacgaaagtccggacgaaggcttctccccatcgagctacagagaaaagagacaaatgggaagttcgtctccactaccgcaccatctatcgttcgtctccatcagagccaccatccctgtcattcctctccaccatcgccaagatctgggggttttctacagagttagatcttgggtttatatggagagaaaaaacatatggaaagatatggaggttttgaagggtgtagaattcataatcgatcacctagccagatttggccattcacctggctgtctgcttgattgtctaccttccttccgcccagaccaagaaaggaacaaagagagaggggtaggcggttgggaatgatgagctaggtttgagaaattttccaaacaaactatttcatatactaagatttgcaaaataaccccacttaatattaaaattattaaatatcccttcttcttgtattgttattttccctgttttctctctactgttgtttgtctcttgtctcttgtccgttgttagttttttagttgaagtagttagttag

SEQ ID NO: 19459 - DNA, 2728 bp, Cannabis sativa
ttttgctttggatgcttcgataaaagggtagaaaacatgcaagccgataatagtggtcgacgatacagtcttgaaagtagcttacggaggaacattgctttcagcatgcacacaagatgcagcaggatacatattttcgcttgcattttgtgttgttaattcagaaatgacaaatcttgaaatgattttttaaaaaattaaaagaagcatatggggccagagaaaatccatgtctaattttaaacagaaatgagagcctgatcaaagcaggaagagaaatatatgcagaaattacacacgcatactgtggataccacttgctgaacaaccttaaaacaaccttcaacacatgctgccaagtacaacttgccattctttggagcagtgaaagcatacacagaaaaacagtttgagtaccacattgcaaaactagacgggttggacaaatgcataacatcatacttggaaaaagttagttacgagaaatagtcaagaattcacagcaaaaacaaaagatatagcaccatgacctctaacatagtggaatcactaaacttggcaaatttagcagcaaggaaacttccaattacaacactgctggaatgcttgagagcattagtgcaacaatggacacatactaataggacaaaagcataaaacacattcactacattggcaccacctgcagaacagatgctactggatagctacacatactcgttgaacctggaggttagatatataatatacattttaaattttaaaaaataaaatcattctggagcattcgtgtgtttttcgagaattgttttagggttattgtactgttgttctgaatgtataataaattttgtttacaagtaagacaggtaaaattaactactgattacttgtttgaggtaacaagaatgaaaaaaatcatgaacagcagacctcaaggagagaacatgcacatgcaacaagttccaaatagatgaaattccatgtggacattctgtggccgtgctaaaggagatgaacgtgggcccatacaactactgctcagaatactacacataggaaaaatggctagaaacttatgtaggtgcagtgtacccaattagacaccaaaacgagtgggatgtaccacaaaatgtgaaagacgtaatagtcttgcctccagttgaaatactgaaatcaagaagacctaaaaagaggaggtgggaagctggttaagagaagaagcaacacatcaagtgcaacaaatgtggagatttggggaacaacaaaagaacatgcactagaaggcatcaacattaaaagagaagaagaacaacagaggaacaatcgcaaaaaattaaaaaatataagagagcatatggtacaaaaaaaaattagaaaacaattttcataatagtttacttttttttttttaattgggatgtcatattgatgtgattacatacattaaaagatttttaaactattagatactaaatagaattgagatataaattgatttattacttcagattatttttatataaaatgatactgagaaagattaaaaattcatgagaacaatattgttggtggaaagatggaaaaggagaataaaaacacaaaggtaaaaaaaccttatcacaaaaacaacaatgattattataatttttttaaaattttaatcacaataatattctaaaaattatatgaacaagtaagaattttaaagaaattttgtaaaccaaaaaaaaaaaaaaaatacactacaaaagaaaaaaaaacaacctcgaaacaatatagaaacaactcaaacataaaaaactttggaatttaatatatattgtaactacggatgcacatttccccatccccacggggacccgcccttaatagagcgggaattccccatctaaatgggaaatgagacgggaacggagattactttttatccccgaatgttaaacagggcggggacaaggatgactccccaccctgatgagaaagtatttcatcttatatttttaataatgttttataatttataatttatgttcgtatttttttagtatattagtattttctttatgaattttaagttgtgttttagataataattagtttattgagtaataattaatgtgtaatattttaattttgatgtagtttgatatttttatatattaaaaattttattataaactttatttttttattaggcaatttcccgccccgtccccgcccccattaggggattctccgtcccatccctgatggggaataagtggggatgggaattaaaattcttaacgtggatggggacgggggaacactacctgccaatttcccgccccgtgtgcatctctaattgtaacgccttaagaattaggcacactacgaaaactagtaatataacctaatcccgctaaactgggattactagaaaataagagcaggaaaaatttaaactttgattacaatggaataaaaatataacttgtaataatttaaactttacaatcaatccaaaaaagacaacatgtttcgggatctcataaaactttttgcaaaatattacaagttattttacatgtcgacctatgcggcaaaatccgagaatacaaaatatgtccgctggccgcttggtctagtatggcccaaacatgtacaatccatcgccaagctctcgaactcatggatgattatagacagatttaccatttcctgcacagtagagcacccgtgagcc

SEQ ID NO: 19460 - DNA, 5289 bp, Cannabis sativa
taataaaaactccttagtcaaaaagaaaacataacaaaaaaaatgtctattaagtccttcctagcaaaagcaaacaccattaatcttcttaaagttagattgcaccattgttggagaattcccaccattcattatcttgacaatgcaaaatactgtcaaaaccaaagacaaccctaaaatgataagtaatgttagtacatatatatgatgagaccataaaaataagaagatgaataagtagaaagaattggctttaccaatcaacacagtagctagaatttttgtttcatattcttaaatgttgtagtgacatatatactcaatttttgtaaaatataaaaataacctagttgtataaatattaattaataaacaaaaatatcatcctgacatgtaattttgacaaaataaatataaaataaaatgtccacaaaccaattcaatctatccaaaagcaattttcactatttgataaaggaattatgtattcaactaattaagtgaaacacacaacaactgatctaaacaaaatgtcaagtttcttcctttctcaaccagcagagtgccaaaactgaccaagatacctcaatatttcaaaaatcttagaattacaatgtcaatagttataattatatataataaacaaaatctcctctcaattaaattctaacattttctgagcaaccaaacaagtgaagaaaatcaaacattatagtaaatttaatgatcgctccctccctgtacatacaattagtcaattaccttggtggtgacgaatcagagcttgggattatgggagagatcaaaggacacattggaaggacggcaggaactgtaggtgtattgagaaaaagtacaataagaatttacacaacagctttaccaaaaaaaagttgaaccaattatgactacacaacatcccaaataatcaatacctatgactgatcaaacaatgaatcataactaaccgatgccataagtggcgtaaaattcccgtctaaaaagtggtcgttggttattaattattatgctgaaaaaagtgtctctaaaggcttgttttgtagtagtgaggcagtagcaagattgcaaatcaattgtggcttgtaaccccagcggctcggagtcaggaccccgattaacaataactactttgagagggcgacgaagttctataccaatcgagatgtcaatgatttctacttacttgtatcaactatcttctttccatcagtttgcacaataaacaggtcaatctcataatgcctcgtttgctttatagtaaattgtccataggaaatctgcttgcaaagaagttacattcagctttcatattttcagagttcacaaatacttgtatttgattctttgtggaggacaaagatgaagtgaaaaaataacatagtttgtgctaattgcttcaagaaaaaataacaaaacaagatttatctttgatgaaaaattcctttatatatattcaattattttccttaaaaataacattgcacttatccctacctgcaattaatgggaagtgaagatatttatggcttctcaataacaatcctataaagaaacatatatttaccaaatacattatgctgcagggtgagagaagtaatcaatccgagctcaaagatggtttggaagtcaaatccagggacataggattaaatgtatccgctccttcaaaacgaaagagtaagaagaagttagagctgatagaaacactattggacataagtgatccgcttggtagttgagagggcatttcgagtaaaaatatatcttccgtgagttcagaggggagaaacgaacgcagtaatttcagaactgaccttttctatttcacattctatcattgcatcccccagaacagtttctaagtatttacgagtctcattcctcctttcactggtgtgtagatgctccctgatgaagatacacataaacaataagtcattttgcattttacaaattgttcttgatggttatcgtaaagccttagccttccatacttctagaaacacaatgtatcaaccattaatcaatctctgctacaatgtatacaaacactattacagcagagatgaagatagatacatcataaatctcaagagattgtgaatcgctagaaaatgataatgatgttgatgatgaacatgtagtaccagtaattgctctggtggtccacttagtgacttatcaaatacaatttttttcttttattgcaaaacctcactgcaatcagagtaaataaagctatggtgatcttcgaattcatgcgactccgacaaaaaagaacagaagaagaactatggattatgtacatacctcctcctatcgagtccatcaaattaaattgaagaattatctctcgttacgaatctgtagaacttcagagtatgaagatcaagaacaaaaaacagaaaagaaagaatagagagagagaaacagagtatgtgagaaagagtaaaacccagaacttatttctttattgactgaatgtctatttatacacaagtaagacagcagtaaagaagagtttgttatagaaagaattgaataaccaaaaatagttagaaagactaactaaaaaatcagacttaactaattatactaacgtccccctcaaactaaatggtgtagataccatttgtagtttggcttttaagtacaaaaacctctcaaaagacaaagcctttgttaatacatcaacaacctaatccaaggaaggaacatatctaaagaaacttggttgtctaaaatctgatctttgacaaaatgaaaatcaatctctatgtgtttagacctcgcatgaaaaactaggtttgcagctaatgcagaagcacttttattatccacccaaatgacatgaatttgcacaagagaaacttgaagttcttgtagtagagaacgaatccacttgagttcagcagtagcattagtcaaatctatgaactcactctcagtgctggagcgagcaacaacctattgtttctttgcggaccagctgattaagttctctccaagggataccaaatatccagctgtagacctgcaatcatcgatgcagttggcccagttagcatcggagtaggcttgaagtgttacggaggaagacggtagcagccatatgtttgatagtacctttcaaatatctaagcaactttttacaagcttcccaatgaacagtcgtttggagcatgtaggaactgactaagtttatttattatgaacgccacatcaagacgagtgagagacaaatattggagagcgccaagggtgcttctatacaaagttatgtcttgaaaccattctccatcagttaaggacaactttacacttgaacttgtgggatttggacatgattttgcaccttccatatgcaacttcacaagtaaatctgtgacatactttgtctgagacaaatacataccagtattgtctctatatatttccactcccaagaaataatgtacttgtcctaaatcttttagggaaaattatttgttcaaatcagaaatgaaccttgaaatcaatgtggaattcagtccagtgatgagtatttcatctacatacacaagtagaatgacgagattggtacatgtcccatgtatgaacaaggagctgtgatctgcacgagatccttgaaatcccaagacacaagactttgtctcaacttgtcattccaagtcgtggagcttgtttaagaccatatgttgctttttgtagcttctagacatgagttgggtgagttgaatcttcaaagccagggggctggcacatataagttgtttcattcaagggcccattaagaaaagaatttgttacatcaagttgagacacattccagttgtgagaaacttctaaagagagcacagtgcaaattgttgttggtttaaccacaggactgtagatttcttcaaagtcaatcccagcttcttgtagataaccctttgccaccaaccttgatttatatctgtttagagaaccatctttgttgagcttgaccctctgtacccatttacacccaataacattcattgaagagtcatatggaacaagtgtccatgttctagctttcttaagagcactcatctcagtatccattgcactatgccattttgtgtcagttaaggcagctttaagtgactgaggttcagaagggaagagagactctggcaatggatgtttggtggcaatgtaagattttagtttcaaaataccattttgagaccttgtacgcatgccatgagttctagtcacatttggtggaataggattgtcattgtttagaggttgtgttgatatattgtgtggcatagttggaactgtactaggtgtgggattatgaactgtatggtcattgtcatgatcagtatgggatgtagtgggaataagtgtatgaggggtcttgtggttgatttgaatggttctcaggatgtggtatggggttaagggtaggtgtggcaatagggaccacatgtcctggtgcgagatggtctatgggagagtgcgtaacagtaggcatattgtggacagtgacatgttcttccatgtttagggaggctggtggtcgagtggggttcacagggacatgtgttgaattaccatgtatagtggggttaggtggacaataagtacatctgttgtacggattaatacattttgagatgtaacaaaaatagcagatgtcacaagagtgggaagagatgagtgtacctgtgttgatgtgttcttcgatccaacatggaataattgctcattaaaaaacacatttcttgctataaagagtttgccttcaagactttcacacaaatatcctttgtgagatgaagagtatccaagaaaaatatactgttgtttacgaaactccattttgtgtttattgtatggcctgagatgaggataacaggcacatccaaaaggctttaggatagagtaatcatggacttgacaaaggagaaattcagtgggattaggatagttgtggacaggagttggtagcctgtttatgagaaaaacagctgtgtgaaaggcatgccaccaataggagaagtctaggccagattgagcaagtatagtgagtcccatttctgttatatgcccgtgtttgcgctcaactttcccattttgttcactagttttgggacaaggatgttgaaagtgaatcccttgatcactaagaaatttagagaatgctcgatactctcctctccaatcggtttgaactttcttgatggatagattaaattatttttctaccatggctttgaatttgatgaacat

SEQ ID NO: 19461 - DNA, 3711 bp, Cannabis sativa
ctactcccaaacactagtggtatccaacatcttttataagtgacgtttcataattaattagtgatattctctaaaaattattatcttaaattatatacaactcaatacttaattataccaatagcaatataacaataaaaaaaatattagacaccaacataccttttggcaattctcatatgaacactgttattacttatgtagcgttttacaattgattagcaatattttttaaaaattattttcttataactaaaagacacgatacttaattgtatcaataacgagataccattagtgtattttagcaattatcttttcatattgctacggatattgatacgtttcaatctgattcgcaggagggtcgaaacttgagcaaatcaaaccccaaagagtccaaagatgttgaccctaatccacatagttgtcaccgaccaataaataagttataaatttagatcgagaatcacaatacatcatgcagttgatccaatcaaacggctacaaattaattagtgacttaaggtggaccacacaggaacacacacaccccaattgggttgatttaattctacaacaacattgactttatataacaacttatcataaaaaggggcaccaataccatattatgtattcagatccaacggtccatatcagatgaggactttaatagaaaagtttctccaaaaatggggtccgaaacattaataggctaaaaaaaatggggttaaactcagatatttactaaaattggggaatttactaatttagaaggggagaaaataaaaagcagagatttctaaccttaagctgaaaagggaaacaggggaacagggactttctagaaatggacctctgtctttggtggtatttcttttagcttccctataaattccattacctctcacttggacccaaaattttttgtactctctagatagaaagattctctctcactacaaatgttgtggttaacatctgacaaaagcttctggtgaatggtattttactctcttttttctaaaaaaaaaattaataaaaaaatctcactcagcacttatttgccataaagaaagtaaaatagggcataggaactacaagtagcttcagattggtgtttttattccacaaatgaaaatgctgctagcttcctgttcaactttctttatcataagttactcattactctttagattattttataagttactgtttcagtaatattttattgaaaaaatatgcgttacacctccctaaaaggcttaaatggaacatttcgataaactcactatctattttgatcttagaatcactcttttgctgttagtataagagaaaggctaaaaggcatcaatgatgcctaacatcttcttacgtatcaatattgctattggtgcaattaaaaatcaagtcccaaatagtttaatgtaatagattttaaaaaatatcgctaaccaatcgtaaagcaacacgtctacaaagtactaaacactactggtacctaataacaatgctctttatataattaagtatcgaactcatataacttaaaaaaaataaattatgaaaaatattgctaaccaattaaggaacaccacctataaaaggtgttaaacaaggtgaccaacaccaatgcccttttgatattcacgaactagtttatctaatagttatttaatattactagtaaatcttcaaaaatattttttgtttctaacttcataaataaagttcgaacaattattttgccacctgtttaaaaaaaaatatcgtgtagtttaatatttaaattttatttttaataatataaattatttaaaattttccaaataatcttaaataatgaggacatacataattaaataaaaatttaaactcctaaataccaagacagatagatagaatttgtaccgaaacactccttgggtgtagacttaccctattttatttcaggatttttatgtttttgttacactttactatcattaacattatcttcttaactcttttgacattgatatgaagaaagaaaaagccccatatatttatcgcaactattcttagattcaaacattaaagtcaaaagcataaattccatgtgtgatacattagtttactaaactaaacttgtaactaaaatgaaactaaatataatagcatggctttaaattaaattcaatcacttaatatgagaaaaagaaaagaattatataaaatttgggatattggaagttgaatgaaagacacaatttatgccattcaaaatgagcaaatcaaatattcacatgaaagagcaaaacgacatcaatatccccaaagtttttgacatttttctgtacaaagtgcattgacctaaatgtccttaacttggtactcaattcccaactaaaaaaaaaaaaaaaaaagagcattgacatccaatgtcaataaaataaaaaggcccccaaattaaagaaaccaaggatatttatgtgatttcacatgtcatgataaagtaaaaaaaaattaaattaaaaaaagaaaaagaaattaagacgtactcacataacccaaacccccaaattaaagaaaaattttcttttttcttttttttttcctcccttcttctaagttcttcccccccattcgatatttttatatatataatataatatttttttttaataaagaaatttctctcaacttaccgtcacagtcatggctcacgcgccaatccttcggtgaccgacgcgagtttctggagattgagcttcacgacagtatcggcgaagagacgcgtatcctcctccgtgttcccttccggcacatccactcggtacgattccaaaacaacggtccagatcttatcatcgcgctcgaatccgtggaccgtcgtaacggacctgtaatttctcagcctgtgttcgccgccgatgatgctaaatccagtcacgcgccgctcttcgtcgagcatatcgagtatctccgtgctagtagcggccggtaaacctgaaattacatttacatccctggtggcaccaaccgtcatttgaaacccttccttgacaacgcaactcttgatgaagtgcttgtaagtctgtggcttgtcgaatcgccgtactactgaccaaactacgtccggcggtgcttggattcgctgcgccagtagcgaggagcaatggccccgccctacttggtaggtatggaactcggtaacgaatcgtttcaactcctcgaactcgtcctgagtcaaacctgtcgggatcgattggtggtcgcttgttggagttgtggcggcggcggcggcgctagtctcctcggcatcttgctcggccattgagctctcggctttctttattgctctcgactcgaaacgacgaagagagagaaagggagaaatctagagagagagagagagaaagaggaaagaaggggaaagagggatatgagagagtatttttatttgtttataaggaatggaaattttaggaaatgccaagggcaaaacgggaatcgagaatatattatgtgatttttcttttattgcacaaaattatgtgttttattttttaacaaataaataaatatgagtatttttaaaatgtatctcttcctaccaaatttattttttatttgtttttgtatctaaacaaaattttacagtggtatatgttaagttatttaaattaatttgtaaaattttgagaaatttgaaaaaatttaaca

SEQ ID NO: 19462 - DNA, 2126 bp, Cannabis sativa
  modified_base (222)..(229): a, c, t, g, unknown or other
actttatgaatctgacttctgaaacaccttcaaaccacagtccttcatcaagagaaaattacatgggattaggtgagtctcgctgtaagcaggacttgcacaaggggtaatcccaatctacatagcactataactggctaaaacatgaacgaccctgtaatatctcgaaaaataacattgtatttaattagacatattttattaaatatgtaattattctgnnnnnnnngtaagattatgatcttacttagattaattagtgtaaatttaataaatgattaaataaagtgtaatttattaattacgaaaattttattggattatgtgggtatcgtggatacaattcttggaataaaatattttcacggcccgcgaccgtggaatttggcagagaggtcaaaaatgtcacgataataagagatgaattgaattggatgttattctggattagtttagagtgttaggttgtcggtttgacgtgttagttaaaattatcaaaatgcccctaggtttcaaatagtttaagttttctttagaagggtaatatagtcatttcttatgttaagttttattttgtctttagtgataattagtcagaagtttattaatttaaggttagaaaaatgctgaatttacttttggaaagaaataaattagtaacttagatactaagaaagaaaatactttgttctctctctctctctctttcgtgcaactagaagccagccaagtttgggaggaattcttgctgcaatccatctatttttctagctgaactactccttaggataccataaaagctttgaggtaagtcttttttactttatggattgagaattttctatttttgagttggttttggagtaggatttagtaatttttgtggctgtgggattaaatgggattgaaattgtgtttataggcctggtttggaatagctttgagtttggaatgagtgattctaaggggctgctaggtatggaataagaatttttgcataatagggtccaatttaggttttgacattttaatttgagataattgttaaattattgtaaattagtgcttgaaatatgttgtatttgtgatattacactgtcactactataatttagacttttagtgacattatttagtgacttacacttttatgcgcgtcactaaagagttaggattattttttagtgacacgcatagttagactctaaatttcggtattagcctcctgtaatgtgggtcactaaaaatttgaagtgttactaaatagtaatatccataattttttgattttttttcaataaaaaataccaacttatagagtcacactaggagagactaggaaaatgtgtcccaactctcttagagcgtcactataagtggttttaataaaaaataaaaaaaattaaaagacacatagtatattcggtaattcatatgtaattatatattatggataattgaaaaaaaaataaatataaataattttatttatagtaagtaaataaaaaaaatgaaaatgtaaatgatataattaggtttgcatttgaaccctacattatcacttagcaaaaaataacctgtcaaacaaattgttatagtgagatttttctgacctagaaactcgagaccagactactgtttaaaggacacgtgtactcaatttccccaaggaaagctgagttgtcaatgggagactcctcgagtttaaacctcgtatgagctaaactcagcgagatgatgcgaatatgaccaaagtctaatcgcatttacgaggctcgcattaagtgggatcaaggaacggacttaactgatatatgcaagtatcctcacaatccttctacggaaacatagaggacgattctctataaagcgagctggtcccgatgacccaacagcctcgataaaccaatacagactcgcgtgtctacgttctatcagctcgttatacgaagtccataagtgcaactatacaagaacgcagacatcctagatttaactaaatcttaggtgtatcctaagcccgcgaacttacaccagaatatgaacagccaactcgcacatcagaagtcgcatacgttgctgtatttagtgaatagaaaatattcttcatttattaatgtttacgt

SEQ ID NO: 19463 - DNA, 3756 bp, Cannabis sativa
  modified_base (3720)..(3721): a, c, t, g, unknown or other
tcaaagctatggacctagctttgagttccaatatcgagccaagttaacgggcttgactaacccttacgatagttgtaaaaggccactattgttgtgtttggtacaccatacttcgcacaatttcccaactccgacttagggcataattgcctactttatgatggattttaggctaccaataggagtttggtgggatgttatatatcccttctttatgattaatgtatagaagttcgtgaaatcaaggaataatgggtttaaacccttaaacacgtttgacggaataggtgtctaacgctctttctcatgacgcattagatgcatgtatagtatctcgatccttgagtgacatgtcatcttttgttagtactctcgattgaatctccgtatgtacttcactcgtggagcgaaaggggtgagagttgctcacggagcaagtggacccttcggagattaataacgtgttagtactccttgaaaatagtagactccaagagtaattaaggtgatgcgtcatgtaacatgggttccattgccacatggtttctcctggactgccacgtatttaagaagaaatctcaaaaaacgacaaaataaaacattttttcttagtagactatataatataaatttaatttttatctaaaatttaatacaaattttacatcttgttgcattaagcataactaaattagttataaaaaaaaaactgtaaataaattaaaaggaaaatgattattaaaaaaattaaaataatcactaaaagaaattcacaaaacgacaaaataaagcattttttcattcttctataaatgttatgatatatatttttattataataaataactcttaaaataatataagggtccacctcatttgtaggtacactcactttgcattttatttaaatacggaagtagtaatgagctaagcaaatggtttttgcacccaaaaccacagatttcttccaaactacaggtggtgaagtggtctctaggtttgctcctctttcttcaatcccaataactccctcacatactactcctctatataaccacataaactttcctaaactaaactaaactcaacacaatcacaattgcatccagcacaacataactttcccacttccaatttgaccagagaattttattcaagaggaaaaatatgagttcaacaagcaaggcttgggcagtggcaacaagtattggagtagttgaagctttgaaggaccaaggcgtttgtagatggaattctgttttaaggtcaattcagcaacacacaaaggcaaatctcagatcatattctcaggccaagaagattccagctcagtattctaataacatctccaaagatgagaaattgaagcaatctgaggattctcttagaactgtcatgtatttgagttgttggggtcccaataattgagactcctatttttatgctcatctttttaataatatatacttccaatttttatagtgaaatatatataagttctatggatgcttatggttttgagtttggcgcatcaaagttttccgtaagcaaatagagataacgaaaaaatagaagttttctctcgtggatgttcaggagaaaaaaaaaaatagagataactaaaagcaagggatgagccatgttcgatgaaagcaagcatgacggtaataaataaataaaataatggaataagagagatgtgttttttcttttttcttctaaaaatacgagtttcccaacttgtttgttactttattatacaaaataaataaatgatttacttgtacgcattttttttaaatgcttgtgcatttcaatcacggtgataataaattgtatgattgtgctaccgtcaagctccttacaaactagaccaacaaactacaccaacggcatattagaattttgcaaaccagaaaaaaaaaaaaatactcttgtttacatataattttggcttttctgtaagacataaattttgatttcaaataaagaaattcaaatattgagacataatttttgttttcaaataaatttaaatagttttgaataatccatttcctcagctcctttcacaccacacccatgtaatgggtccatacaagccctcttcctctattccctttctttccgtctatcctttaattgttttttattttttttttgaagcagtaagaatttgtagatgctaaaaagtggttaacattaattcgctagatttgtgagatgattgataagtttaagtaataatttagagagacaaaatttataataatagggttgcatctacttcgagttgtaattacaacaatagactaattatcaaacactctaaaatctagagagagatgtctagagagataagctctcatattgtgggtagttttttgaatgtaaaaaatgagctaagggagctctccatttataggtgaaggaggctcacaaaaacaggagtaaaataaaaataatttgtgttctactgttgatgatgatttaacgataaaaattagcttctggtgatgatggccaatttttggtgaccgatgagtcccactgcagattacacggagcttattttcataactccctttgggtaaattttgacaacgatatcgttagaattatgtatgaagtgtgagagaagacatgatagagcgcttaagtagcttcaaaatacaagttgaatcacgtcaatcagataaaaattgagtgagttatggccgttttactaaaggcaattcaagtccaagcgcctaggttgacattcccgtgcccaagttgacatatgacgtcaatctggatgttctataagtgtagaaacgtccaaggggtgttctttgagatgcccaagtgatagtttaacaccacttagttcatttatatgttctggcaaaattgttcaccagttcttaaagatgttactgttttactgaaacggaagactcaaaacttacgatttctgagtgagtcaatttgtgaaaaaattgaagttatgaatttgattattctaaattcatggattattgcacttgtgaaaaactagattgttggtcaaaataacatcagattcggataaacagaacctaacgaacaaagctatttgttgacctaggcaatgggccctttaaactgagcttttgggattctattttttatacttccaaggcttctaaacttgaggatagggtctctttccctgttttcgaccatgctagatttaacggtcgcatcagatttgacttttgagcaatcaaaggcagcatcccaagttgattgacaacctaggcgatggcccaacaccaggtcaaccttggtgctgggccctaattccaggaactcggttttgtggttttctccctgagtttactcgaatattcattatttttaatgacgatgataatgcccaaaacactttttcactactacaaaactagcctttagaggcgcttttttcagcataataattaataaccgacgccatagggttgagaatttttggaagggaatttggacgccacttttggcgtcggttatttctaaataacagacgccaaaagggtttataaccctagcacatcacttcgtcttcctcattcgatcagccaacccagaaatttccaaatcagagaaaccccaaaccctctctaccaaccaccacggaaaatagcccccatttcaccattttttcaccattttagctcatttttgtttctaaatcttctnnttttcatacctaaaactatatacctgaaaagatca

SEQ ID NO: 19464 - DNA, 7278 bp, Cannabis sativa
  modified_base (7155)..(7155): a, c, t, g, unknown or other
tccctacaagccatcaaaggataagaaattgctcaataaacaattatttttcacatgtttgatctctcgaatcgggtgaaatacttacaagacttggaaggcagtgcagttccctatattcgggggaatactaccggttaagctgttgttcctcacatcactgcaataagggaaaaatcgaatgttagcttctataatcaaatccaaatagtaaaaatcactcgaaatgaacatgttagatacttctagctatgagcaaaaataaaagtattttcgggggtaaaggattcgagaattggatatacttacaaataccacaatccagttaactggcaaatatccggggaaagagtaccgaccaagttgttccctcgtaaaccactacacaatcgaaaaacaacaatgtagttaagaataaccgacaatcaaatcaaatcaaatcgccaaggacgaaactttaacaactgatttcactcacagatattgaagaacttcattccaatatagaagccttggtatttccccactaagattattttgtgccaagtctcttgagaaccatagttgttaagattagacaaataattaagaacattattaaagaaatgaaagaatcaaacatgaatggattaagaaacttacaaaatcttcaagttgggaatctgagataatgttgaaggaattggtccaattaacttgttgtttttcaatatactgaaaaacaaaaaccccatttggaaagaaaagttcacaagtcattatttactaaaacaaagtccaaactttttcaataaataacaaagaaaaaatgatgaaaaaaaaagtgttattaaaacttacagaaacaccagttgctttaactttgagattgaaaatggtatatctccacttaactcattgaatgacaaatccctattcaaaaaaaaaaaaagtcattaacaaaatttttatattagcaaaataatcatttttggtcgtaaaagagatcaaaaattacactatgcgaccatttaaaacagctattatagtcattatggtcgcaaagtgtaattttaatgtggttattttggcaaagtgctttgtcaaaatggtcatcatgaaaaatttcattagcaaaataaccacgttcattaccataatgaatgtggttattttgctaattaaacactttcatgttgttattttgacaaatttcgcataacaaagagtgagtggtaaaaagggtctttacgaaaaaaatttcactataaatttacactgtacgtcgcaaagtgtaacttcaatgtggtaaatttgcaaattaaacacttaaatattgttattttggtaaatttaagcaacacttacaagtttattaaagatgaacaatcaccaatctcatctgggatctgacctgataatctgtttcctttcaactcactgaatgaaaccatcaaataatcaaaaaccattttttccaaatcttagaaaaagaaccaaaaaaaaaaaaaaaaatcaaaactttaataaaagggtaaagaaaagttacatattttgcacactctttagattaccaatagctggtgaaatttctccatcaagattcaaacttgataaattactaaacaaaaggtacaaaaaaacaaaatcatattattaatattataatcatttgaaacaaaaaaaattgaaaaaaatcaaaataaataagtaaagacttacagtgtaagaacactaaaggtgacattatcacaagtgatacctctccaaacacaataatctgaagaaggtgaatcagtccaatcatacaaaacattatcaacatctctaaatgatttcttaatctccaaaagtgtttctcctacaatatttaaaaaccaacaaaaaaaagttagtaaagataacaatgtggttagttttaatgactaaaaacataatctttctgcattttcccgagaaacaaacagaccccttaacttaccatcatcagaatccactctaccaaaagggagaaaaaccagaagaagaacaaacccaactcgaaatgccataactttacaccaaatcaaacctcattcaaactaaaaaaccccttcttcttcttcttcttacagacattagaaaaaccagttatgaagaagaagaagaacaccacactactcactttctcactcaattcacttccatttcagtaaagatacatactttaatctttaaatagcagaaaacacttctgggtatcaaagcaaattttaagaactgaaaaaagattacagctttattttcctttcttctgtttgttcaatcacatcgttttttctttctttctttcttcttctgccacatatagacagaagacctctaaatacaactgtaacaactagagagagaaagcttgaagagagagagagagagaaagcttgaagagagagagagagagggagagaattattttacatgaataaagttaaaaaacaatctgccacaacctctgcaataagactctgcaacattttgcagctctttctctctccttttcactctctctctctctccctctctctctcatatatatacataaagagaagagagagaaatgtgtgtatataatgtatatatattttttctattttttgaataatgaataatgaaaaatgagtccctttctttgtagtttttctccaaaaaagagttttttactctctatttatttgttgtaatacatattggaaatgaaacaataatagtcaattgaataaattctctttttttcagagatttttaattaacttattttgttccataaataaataaattgtaaaataaaaatattatttaaaacgttctatttcgcaaaatttactaattaaattcctgtttttaatatgtatatatttagaataaacatcattttttataaaattaccaattttaacccaaaatagtattaatcctaaaattaatttacttaaacaaacttataaaactacaaaagtaatatttagaaaatactccttcatcattatacccttttgtgttgcaaataaaacttctcttgaaaaaatttatattataggggtaattatataaataccactatttattatttaaccataaactatagactataaagaatagaagtaaataaaaagatttaataataaaaaaattatatttcacaaaaccatgaaaaagagtttatggcatatggttgacaaagcatattaatattaaacaaataaaaacataggtacattggaattaaggccaaataatctaatattaaggtactataagtttaattgtttatttattggataatgtacaaattaagaatgtcaacttctggtatattctttatttattttttattttattcttaatttaaatataattatatataaaaacaatacttataattaccaagaccaatgccacatgcctaattcttttaaaatattttattatttgctataaagttattattagaagccttgggataaataattatatatttttatttaacaaatgtgtatatatgaatactatactaatcctctattaacaaaagtactcaaattttaccaattatttattttatttttgtaaatatactctattataaatttgccaaaataattattctatcaaattttatttgctatattgtttaaattaattcaactaatcatatttttaattactttcatcttatcatagagtactctattacaaaatagtaggtattaatgcctactatttggtaatttaaaagtggttagatatttttgataataattaccctcaaatatattaaaaatatattttataattggtaatataatatatctcatcaaactctttatatttatttaagattaatttacaacataaatatataaatttaatttctatttatagataaatatttaagtttaatttttaactataataatacttaagttatatttctgaaactcctgctacctgacagtcttaaattagtacaagttattaaattttttatttttatttaaaaattaatttaaataaactaataataaagtgactcgtggataatatcttaacacttaacaaaaattttaaaaatataatttaaatattattataataaaaaattaaatttaaataattatatataactgataattaatttaaatattaagaaacaattcactctttaattaactctcattttcaaccaaacacatcctaacaattaagtaggtcaaagaaaaagaataaaagtcaaaccaatatatatatatttcttcctaaaaaaaagaagactttaaatagatagtcttatcaaaatcaattatactatgtgtacgttactataggttgcagagagtaaaaagtaaaaagtaaaaaataaataaaagaaataaaaagtgaaataggtcatttatggaaatagagtgggcccacctctactctgtctcatgtaataactaaaccaataataaataaataaaaactttcttaaaaataataataataattaaatttaaaataaaaaaataataaaaaagagtgaccttgggaaggtcaattgtcccatcctttcactctgaaacttgacagaaacccctacgatgatttctagtgggtcccaccttatttttgacggacttctttcttttctttaacgccgtttaacaccttttattactattattattattattattattattatttcggctaaactcccaagtatttttgtattttattctcaaagtttaaattttaatagtaaaattctctaaattattgaattattaacaaatttagagtgatatagaaactgtgaatataaactacttatatatatatttatacacgtagtacgttatactagtacatttaatattattatttaatttttaatttttataattttatttattttaaataaattttcaaataaaaatattaggtatattattataaatgtatcacttgtataaaagtgtatacataagcagaccatacttcatagtgatagttaatgagatgacaccttaaatttattaataatttggtattttgaaaaattttgccgctaaaatttaaagttggggggttatgcaagtaaaacgatagttaagagatttagttactaaaaactctttaaaaatagtatttgcaattaatagtattatttagagtaattttcggtgtaaataattaagtttatttctcagttgcagataaatacttaagttatatttttaaaacttcgtgtagctatctcaccattaagtgataagttattataacatgtcattttttattggtatatataaattattttttttttaaaaaaaaaataaaaaattaataagctaaattaatcaagaattagcacatattaacttgataattaataggtaggtacatactaagttctaaaaatataatttaagtgttatccattacaaattaaagttagatatttattaaagggtaaatagcggcataagtacccaaagatttgggaataactgatactatatattttcgtaactatactgataaaattggaagaaaattgcagttttataaatatttggtacttatgctgctaaaaaaaatcattaatttatgccgcttacaaatttaaaattttgagttttatgccactatttaacctttattaaatttaagtatttatttcctaaattattttattatttattataaaaaatgccgttaactccgttaaagtccctatctctttccctagttgtcgttttcacccttctgcttctgcctttgcttttattttgttttgtcctttttttcaatattattattattattattattatttattgctttatggccccacttaattattttttttataatatataataaaaacatgagagtgattttttttaattattattaagacaattttatttctttttttaaaaatgtttcctggtttagagaatgctcctccaaaccctacaagtgacacgtgtcattatataagtggttgatcttttacttactccgttaattgtgtttgcatgcatgtaaatacgttaaagttagtaattaattagagatcttaaatcattattatataatttttctatcctctttaacgtttccttaaaagaaattcattaataatatgttggatttttctttttaaattaataaatatgtataaaaaattagaaatttatgtagtagatcataaagaattgttgtagtagattttttatttattttagtatttttaaaaaaatagtctatttattttttatttaaaactaattataaatttttaaaaaaatttaaataattaataatatagaaaataatattaaaagaattacttattatgcgtataacaaaaaacagtcttacgtgtaataaaatatatatgtacaattgtacatcttgttttcaatattgtaaactattcaaaattttctaaaaatttacagatgttcttaaataattataacatacacgattataaaataagattgaattaaaaaattctcttcggtaccaaaataaataaaagtctagtgaaatacctctttatggacaatgttattctatctaaagaatgtcaagtcaatttataccacacaatattaaattacaaacaacaaataggaaaattgtttttggaaaaattgacaaaaaaaaatttttagatatctttttcattactattttataataaaatataaatagagatgatgcatattttttttcaatagaattagaatgaatagagattttttaatttagaaaaaaaatcatttttaaaaatgaaattgatattcatattcttaatatgaacacttctcactaggcctgtacatcggtcggttttggcagtttatcctatttattttctaacccaatttaaagttcgggttgctaaaatttaagtgcaacgtgcaacccacccatcacccatttttttttttaaaaaaaatatgtaaactgaccaacagtttggtcgggttaacccgcccaaaccggccaaactttttattttttttagtttcaaagtcaaaatcaataaaaattaaaaatatcacattccaccaaagtacaacacaatatatatgactttaaaactaacaattaagtatataactttatattattatntatttaatcatttatattatataataaaaactaaaagaattaaaaaaaaaattaaagtccaaaattggattggtcggtttaattgggcgggttggacctattttcaacccgcccaattaacag

SEQ ID NO: 19465 - DNA, 2545 bp, Cannabis sativa
atatatatatatatatatccttttcgttatcatttcgactttcatggccgactttcaaccatacttacttttcattatttaaatgaaagagtgtatttgaccccacatgaaactatatacttggaatcttggaaaactgaaaaggaaataagcgagcaaaaagattattagctagatagcttgatggatttttcgaacaataataattgaccattttgaatgatatatatgtgtgtgttagtggccacaatcattgcaagcttccacatatatactacaatgcaatactatttggaaaattttattttgtgtgttaccaaaatattcatattaaaaattagactccaaatttgtttatatatttttattcttaactaattaataattaaaaaaattaataaaaagaaaattaatcacatactcggctctctctttctctatcactactctctctttctatcactcggctctcctctctctaacactctctctcaatctctccgctccctatctcttgacctattttggtggacgactggaccttatcatcgaaaagaatcacatatattcacctcaataacgagtaagtgttgttcaaaaaatttcttaaacatttagattagtatgtagtttatttttaatagatttgtgtggttattgtttacatggtgttattttgctagttttattctttaaaatggcaatatctaattttctcaccaaactgagttttttaataaatttggatgtttttttcgattaaatatcaatatcttctcactagttaaagtaagatagtaagtgatgacaattttcgacacttcttcaatattggtatatcgagattatttcgacaattattgtaccaaagataaggctgaaaattttcgataatttttcgatggtatatcgatacaatttcattccaggataaaaatataacaaaaaatagccaaaattaatcacacatgacagaatcatcaaaaactcaatcgatgtactatcgataaaccatcaataatcaattaaaatactaaacaaaaataaatgtcaacctgccattgatttactatcaataaaaccatcaaaaaagtgtcataattttttatggtttatcaaaagtaaatcaatggtatatcgatggcaggctggcattcatttttgcgtggtagtttaattgattatcaatggtttatcgatgattccgtcttattgtgtgatcaattttgctatattttatcctaaaatgaaattgtatcgatgtaccatcgaaaaattatcagtcctaaatttggtgcaataatcatcaaaataataacgatataccatcaaaaaagtttcaaaaattatcatgatatcttacctttttactctaattattgagaatatatcgatatataatcgaaaaagcatcgataatttgttaaaagacccaatttggcgagaaaactagatctcgcaatttcaaagaaaaaataacaaaataataccaatgcaaacaaccatacagatttatcgaaaataaactacaaactaatctaaatgtttaattaaaaaattatttgaataatacttactcattattgaggtgaatatatgtttttttttttttttttatgatgaggtttggtcgtccaccaaaataggtgaagatatagggagcaaagagtgttagagagagagttgagtgagtgagagagagagagagagccgagtgatagagagaatgctaagtgagagagctgatagggagagagagtcgagggtgtgattaattttgtttttatttttttttagttaattaagagtaaaatgagaaaaatatgtaaataaaagaattattttgtataaattaattaaagtctaatttttaatgtgagatattttcttaaacatacaaaataaaattttcttatatatatactccttaccggttttttttttgggagggaaggatagtactacaatagtaacagtaggtagtgatcatgttttcttatgcataagtattatatatattcacttaatttgcgcttaattttcaattatctctatatgtattatgcatgcaatatctattatgtaaagataactaatactattgtgaaatttgacatatataatctgaatacttccttcatgttaggattactttattatattccttgaaactcttcccataaactccctttagtactccttaatttgggtgatctctaagatattgcgttaagatttttattctcttattagtctcaattattacatatatcactctaaaagcagcaatttgcgactaaaataaagaatttgtccaacaaatcatcatgtataattatatactatatatcactataattaaacgttgtgatgaatgatagcatattaatttcgataataaatgcgacttggtagaataaacttaaatggttatttactaccaaattacctaacatgtactaccaaatattttactcaagtataaatggagttcggcgggttttgggttttgggtcgggttcggcgggtttaatgtggtcgggtt

SEQ ID NO: 19466 - DNA, 4200 bp, Cannabis sativa
aatgatattcttgtctggttttgcaaatcgtcttcctctcagaggctttcaaggagcttcactttcctccttactcagctctgtactcaaggtttggttttttctttctttaatttaattatatatatattttttgtttacatactgtaaatagctgaaagatttgaattttatttaaaaattaaggaaaaattcatggcccatgaagtattaaatctgtaatattcagtttttagttgttaacttgaaaattgcatacttgtactttctgctactgaaggagctggttcttttgagaaatgggttacatgggttcataggaaaggtctaaacttatgtgtgtaaaatcactggtagttttatggaagaatattagatattttggttgaaagagttcacttacatctgcaattacttactttgttttatcatactccctttatattgattcttcattaatacaagtttgtttcttttcaaaaaataaaaactggaaaattactgttgggttttatctctctgaattttttattagttcagcatatagaaatatccattttcaaaagagggtgagtttgaaaagttgatggagtggtacttgaatttttttgagaattttcttaaggaaaatgttttaacatttcccaaatagggaatcaaattttgtgcaggtgcctttctttttctattctctctgcaagcttttgcaaataattgtagaatgtattcaatgtagatgatggatattgcttgttacatagcttttgaaaaaggctctggacagctttgtgtatgaacattcaattagtgaccctcaagaaatgtatttcttgatatgaattctagactgtcgttgaatcataaaaactaggttcaaaaatatgtctggtcattcaaatgtatggctcctgtggctatactagcaatagtgttctcttctaatttacattattgaggtttggatgagtggttgtaataaatgtaactcttgtttattttaattttcccagaaaggaggaagagatgtcatccactctttcggccagagaaattgttccttctcttctacgggtaaatatttctttgtgtttattttgtcatctgcatgaacacacttgtatttgactgacaactttgcttacactataagagttctttcccttgtagacatagattacttatatgtataaacatatatatatcttaatatcttaaataagccaaaacacattgtccaacatctgtaggagaagtagaatgttacagatgtagactgtcaaatagaaaatttcaagagaaaatttgattttatttaattttttgccaactcaattagtgtttatgtccacaaatgaaatgctggttagtttatgtaggtagtgcttgatctcaaccatgttaactactttatacttttctgtagaatttttctttaaaacaatctacatgcatttgaaataggttagttgttttatggtattcaaattatctcccttattttaattttttttttgtaaactttacatttctcagtggaagtttcagagtttgaacatgatggattccatgatgatgctaaatcaacagagaaagatgcggcactatatttagcactttcacgactttctggtgattttgataaagagtcaccattgtgtttacgacggttctttggcattcgacgtgtgcctgtggtatcaacgggatcattgaagcttgatctagctcttggggttggaggactaccgaaagtgagttgttcacttacgttcaatatgctaattatcttcaacttttacttatgattgtaacaattattggtgtttccattcttttaaagggaagatttgttgaaatttatggtttggaagcatctgggaagaccacactcgcacttcacattattaaggaagctcaaaaggctggaggtgtgtacttacttgtttgattagtttctctaaatttgaattctatctgtctccttacatcaattattgttagactcactcaaatttgtttgcaggtgtttgtgcttatttcgatgtagagaatgcaatagacccttttcttgtagagtcaatgggtgtagacacacaaagtcttcttatttcacatcccaattctgctgaaaatttacttagtgcagttgacactcttacgaaaagtggagccgtagatgtcattgtggtcgatagtgtgagtgatttgttcttatcaatattttaacttgcttttcggtacctgaaaaagtttacagctaatgaaatatacattttagctaagaacttgtgcatgtaccgatatgtgatcaattaaaatctctgataaattttcctgtttttagtttgagtgcttagaatcaaagctctagactctttctttcactagctcaatcaatagtaattttccagttgaggagatgttaattgattcaacttgcatgttcatatttttcaggtagcagcccttgtaccccaatgcgaaatcgatgtttcacttggtagtgtgagaaaagatgaacaatcacgaataatgacccaagcccttcgaaaaatacattattcattatgcaattctcaaactcttattgttcttgttaatcaggttgaaattaagctacaaagaactttgtttcttcttgagtatgttgtggctcaatgaaatttactatcttatggtttcttcactgtccaggttcgatttggttcaaaatcaagtgaaggttctgactctatagacgaatacacttgtggtgggaatgccttgaaattctatgcggctattcggttgagaataaaaaagactggacttcttgagaatgaaaataaggtaagcatgcatattctttttagtatgtgtttttactgttaatataatcataatttagaccgagaccgcaacgacctgagcatttaatgttgctttcaagcccttcttgtttgattgtgatttttgatgaaaatgttactttgctgtaacttggagaactgttaaagctctttacacgagttcgatttttgcatgggaactgttgttagtgaagatatattttcagtgaatgtgcttatacaaaactttcgttgatcttcttattttaccacttcgttgttcactaattgttttgtgtttataaatatatgtttcaaggaggttaccggtctggggatcagtgttcaagtggtgaaaaataaacttgcgccggcaatgaaaaaagctgaattgggattgcagttcggaagaggatttcggtgcgaatctgaggtgttggaattggcttgtaatcatggagtcattgtgaaagaaggaaatagttacctaatagaaggggaagtttttagtaacaaacatgcagctgagaaacatcttgctgaaaatgaaatgatttatgacaatttagtgagtattttaagaaaattgctgttcgagaccagaagagagcgtcggtgagccttggatgaccgagcttcaagctcgattttgaattcatttcagcgcggaaggacacaagctgcattcagttttataatgtccaaatctatcaatcgagaaatcgatagagctgattgtgtgaccgacgaagctgtctgattggtgtgaacatcgaagttgctccgttgttcaagacccttcatgtcatagaattcgacaacggatcagatcagctggccattagttctacttgtagaagaggcaatagaaatttgtaattgtgaaggtaagcaagctaaaagagctcttccctttgccatgcatgattttctttactaagaaatattctattatgcacaattcattgcccactattattatcattattatttaaatttaaggatatttgtggcgaaacacttttaacatttacaattgttacatatatgactctaataaagaaagtgacggtaaaacgatcttatcttatgattttattgcagttgtatcttttttttggttgtaagtgtcagttcaaaaacatgtgacaatatatttttttaccttatttaatacatagtctaataataagtcgatatgtgtttttgagttgacacttaatggctaaaaaaaggtacgattgcaacaaaattgtaagataatataattttgccgttattttttttattagggtcatgtgtaacaattttaaatgtttaagagttttcgccacaaatagccctttaaagttattaatattatggctgtttc

SEQ ID NO: 19467 - DNA, 4856 bp, Cannabis sativa
attgtgggagggtcatcattgtgcggatgggctttttcggaaacgcctttggggtggtacctttggagaagtctataagaggtaaatttgagttgtccacaatttcttttcatcaattgatggaatttattgtttttgctttgtactgtcaatttcttctttgaggctttcagcttttatgcctttgtttctattagtagattggttaataatgatggtaatcggtttcatttgctaatctatagtacaataatctaacttcatttgtatagactattgaaagagacttgtttagtgtgaatttttcctctgtttgatgtacccaagtaaggagattaccagctgcacacctttacttccattatttgtcttttaatagaaagaaaaccgaccattccacttgttcaaaaccgtactcttttattgtttttttgtttttggttttaaaatatatctcttactaaggaattcataggaaattttagaatatactgtatcccatggcctaatctctgatgttggtatgtggcttacagacttcaattatggcatttttataattattctcatcactatacttgtatattgaaatttggaactcagcatatttatttatttattattttacacttgggcaagctgattgattggatatttcacagacctttttgttggatggaacatatgtcattggacaatgaaactgggttggatccctctggcataagggtcaggcctgtcactggacttgtggctgctgattactttgctccagggtattttgtgtgggcagttctgattgctaacttggctcgtgttggttatgaggagaagaacatgtatatggctgcatatgattggagaatctcatttcagaatactgaggtactctcttttaacatttctttttgtatgatattaatgtagttgagtggttcagtatttctcttcccatgtttcattcaatttactatattgcgaactgcttgtattggtaaagatattcttgtcaaactcgtttaattaggtaagagatcagacactaagccggataaagagtaacatagaattgatggtagctactaatggtgggaacaaggcagttatattaccacattcaatgggtgtcttatactttttgcacttcatgaaatgggttgaggctccagctccaatgggtggtgggggaggaccagactggtgtgctaaacatataaaggcagtgatgaacattggtggaccctttttgggtgttccaaaagctgttgctggtcttttttcttctgaagccaaggatgttgcagttgccaggtttgattcttgttttccttcatgtacctgaatagtcatgacttaagtagcagcattttgtttgcttgtggagaatgagatgccttcaatttgaaatagttttttaaagcgtgtagactgtatgtaggttcgtatacttgagtaactaaatgtcgtgtacactgcatgatttccttcattttgaagtaatttgtatgtgaaataattttttcatagagtctagactgtaagttagtatacttgagtaactaaatatctctactaactcatattatgaatcctgaacgttgtgcaggctgactgtctaggttagctcgattctatctcaaccattattatgacaccctttgggtcatttgtgaaaagaaaagaaattttcaatggttgtgtttctgcttttacattgctagatattactttctacatggtctgttcagatatctttattcataagttttggatagctttctatgctttcgtgtaatttttaactacataaaaggacgaaacatcagcttgatgttagatgtcactaactattgttagcaacatgacattctgatttcttctctagctattagagtaagcattaatggttttcaacaaataaattttttagttttatttaatctgtctcagtctgatggaaattcctgtaaagtctgagaatcaaagaattgatttgaagattttcttgtattgaatcaattgtgtaaaatgagtttatatacaagcacaggatagtaaagctgagctaaaagttagttatgagaaataacagaaagcttaaccaactaacagtgactaacattaatagccagctaagctaactcactatagctagtgtccttaacaattccaacaatataatatggctttcatagttgaagatatgtttgtcatggttcgaatgcagggctattgcacctggttttttggataatgatatatttcgccttcaaactttgcaacatgctatgaagatgactcgcacatgggattcaacaatgtcaatgataccaaaaggtggggacacgatatggggagctcataattggtcgcccgaggattgctataatcttaaagaaagtcaaagaaacaatgacacccagatttcaagtgaagagaggattgaaaaattgtcttctcaatcaaaatctgctcattatggaaaaatgatatcgtttggaaaagatgtagcagacgcacattcgtctgagatagagagaattgattttcgggtaaggttcatttcttattaaaattttctaattaagcagaaatattgggccttctgcaatacaggatcataaatagttaaaaaataacaatgcaggggtttgacaaatagaaacaaaaaagaaaaaagtaatgtgcacatgccctttgtgtgcactgtgctcaattaggtcttggcagttctttcatacaaagtcttattatgtcttgattattcccttgaaattcattatttatactaagttggcaaactggtatataggatgcaatcaaggggaacaatattgcaaatagtacttgtcgtgatgtgtggactgaatatcacgacatggggattgagggaatcagagctgttgcagattataaagtgtacactgctgaagaagttgtggacctacttcattttgttgccccaaaaatgatgaagcggggtagtgctcacttctcttttggaattgctgataatttggatgatccaatgtacaatcattacaaatattggtcaaaccctctggagactaagtgagaatccttgcattatttctctgtaattgattttgtctcccctttttttcaattcagaaaatacttcttttatgtaaggatctcgatcatttgcctcacagatcaccccaatatgtggtagtctaaacttcttattgatgagccaccccgaatcaaagatgtgtgaagatataaatggctcccattttttgtttaggcaattcctgatgctgcagcataattgtaaacctttgaaatggtcgtatggacaattttattaggattgattgcagcataaaaggattaaattcttaagaagacttttctttgataggctgaacatataggttgtctatctcaagagtactacatcgctaacatgcctcataatttagcaagtttacctcacttttcttgtgttgttaacattttctttttgcatatattattgcagatgcattgcacaccgcttctgtagttcgagctcattgttggtcattgtttttttttttcttatgaagactttttttttccttacagattaccaaatgctcctgatatggaaatcttttctctttatggagttggaataccaactgaaagagcctatgtttataagttatctcctgcagctgagtgctacattccatttcaaatagacactaaggctaatgatgaagagaactgtttgaaagatggggtgtattctgtagatggggatgaaacagtgcctgttttaagtgcaggtttcatgtgcgccaaaggttggcggggaaagaccagattcaacccttcagcgatcagaacatacataagagagtatgatcactcccctccgtccaatctacttgagggtagaggtactcagagtggtgctcatgttgacataatgggaaatttcgctttgatcgaggatgtcttaagagtggcaactggtgcttctggaaaggatttgggtggcgatcaagtccactccgacatttttaagtggtctgagaagatcaacttacgtctataatttaagtggtatgtattccttctattgttctaaccataaattttgatgaccattagcttagctcaaccaatttatgtgtggccatactacactaaaaaactgtctgttgcttgatattaccgattaatttatttgaaataagcttgttgtaaaattccttaggacccaaacttagaagaagataatccaagacaaccaataacagaaaaaataaaaaagctaaggttatactggatcacactaaaacagtgtccaccttccagattgagccccctagaacctctcctcttgcaaagagaattagaataagttacatacacagctatgctaatatattaatttgtccatggtaactgttattccaaacatctacacacaaacagcacctgttgacacacaacacctctagagacacccaattggaaaacttagatgaacaaggattcctttttcaacattctctcttgatctcaacgtagatgactctctttttcatacacaaaagactctttatacacaaaagactctcttgatctcttgttctctcttttgttcagaataaaattactcactattatagtcaactaacctaactaaaggaattaaacattgtaactaacattcaactaactacagttaatttacaatctccaacaaatatactttgaacttatcaccttattgtctatgcactttttctaacagagtgcagactttgcccccaaaagataaccacgttgtgttttgctaagaatatgagcttgtacacgaccatcaaagcaaa

SEQ ID NO: 19468 - DNA, 2199 bp, Cannabis sativa
aaaaaatattttgcaaattgactttcacggtcaatcattgttaaaacaagttattatactaatttcactttctcggcattatgacaaactcctctctaaaatcaaagacagaaaacttctcacctaataataatatgcaagctaagaagaaacattttaaaaaaataataggaaagaaatttaccactccatgatggctgccagtgctcaggatggtgatttgatatgcttaaacaaatttttgtctgtgtttcgaaacgaccgttcggctgaagcagaaaaacaaagaatgaactcttagcatgtatcagagaaaagaacaagcaaaagagtgaaatgaatgttatgcatgagtgttgacatgagaaagtaattgatgatcacaaatggtaccgttaacaacataaatgaaggaggcttgaatggatattctgcaggcaactggattcgtccatgatagattccgccctcaaactccgaatcacggggacccctgattgcaaattgccattcaaaaatattttcctgttgacaaaactttttatcttagaaactacacacaatctggggataaatgaaatcttacattcttcattaataccagaagaaactcaaatagcagtaatacaatgaacaaaaaaaatgagaagaacaaagaaacaaaggaagacaatcgtaatggtacatgatgatacagtgttgcccaaacatggagatttaagcatatcattaccattggaaatttccatatccacacaacaagtttactccaaaaaccaattataattttcctaacaattcttcgcatggaggataaataaaaaccatgaattcaacaaaatccgtagcatttcccgtaaaccctcaaatcaattttgagtttgagccctaaatgaccccaaatcaatttaattgaataccccaattctataaagtgcaatgtcttcatgccatcacccaaaaaaaactgtagaataacaaaatctaatcctttcaatccaaagaattggttaatttatatcattataattttcttctaaaataaataaaaatcttaaaccaaataaaaagcattttacgatatcaaaaccataactttctgacacaaatcagcataaaaccaatcagaaaaaggggggaaacaagaaagaaagtgaaaagggatcggagaaagagaacctcgatgggtaagctcatgaaatcatcagagggattggattgcatctccttaacctcttgtagaattctcttcactgctgggttcttgagattgtacttgtcttccgccatcgcgatctgatctcgccgaacgcaccaccaccaccgtccgatgaaaaatgtggccggagagagaagagaagagaagaagagagagaaggtgggtgtgagtttggtattttgttgatgaagttgtaattagactagagtcaaccatgttgccactcgtggtgacacgtcatctgacacgattttgcttacgtgttcggtttctattggctgttaaattcaattttgtgaaggtggatgaatggattatggaggtggtgtttgcttactcatcattagttactcatttatctcaccaacaaaattatcaatattcttcttcttttcttaaaaaaaaaaatgattatatcaataaaaatctaagttataattttgagcaagtgagttaaaacttaattattatacatattttttaaggtagagtaacaattttaaaagtggattttttatttttttaatcaaaattataaaaatatttttttgaaagtaatatttggtaactgattttttttttgttttttttgaagtaatgttcgaaatacaaattctatcatatttttcttcatcctgcaccaccaataatatagtttttttttaataattttttacgtagatcaataaaattgtaccatgtgtacactgtatttacatagatatacacatggacagtctaatatgacatttaacacctaaaatggatggaaattataaattgctaaccgtttgttagtttgacatttaacacctaaaatggatggaaattgtaaattgctaaccgtttgttagttttgggggattttactgccaaaatttaaattttggagattaagtgcaagtaaagtgaaagtattaagggttttgccgcaattaaccttttttaattttaaatatttcataacagtatttgtcata

SEQ ID NO: 19469 - DNA, 8588 bp, Cannabis sativa
aggaaaagaaaatgaaaaaggaaaacaaatggtcccctactatctttcttctagaagctctctcaatctcattccgaatctcgatcagacaaacacaaacctatagtgagtagataccctggctctatcatcacccggtgacttaaacaggtcaacatagtctttcttccaaattccaagaagcttagccttatagtacagatacataatattattttaataataaacaatcaaacagaatcaccaccaccgacagctacatcctttatcgttcttagccacacccttctcttgctctgtttttgctgtgttaataaggtttttgcaactttcagttcgctttttcttttatttcttttttcgttccataatctctctctgtttatttctcttttggtatctgttttgttattatgttgtttgttcttatctggcagtggtagcttagaattttcccaggtagcactaatcgtatatttactttttctggagttttgttaaagaaacatagtgttgtgtctggtttgggttacttatgattatggatccaagtttcagcgacttctcagatttcacaaacagtttcgaaatagaaaactggaccagtatacccaattcgaatgactactcggtaatttcagacgaatacacagtaaaccaatactcttcagagtttgatttcgttgatgattacccaaacctttttactccacctgatcctgatcccggtaatttcatgccctccattaacttgccctctttagaagatccatcttttccctccacaacactgagcccagatggaaactcttatactcctcccttaagtgtgaaccccggaagtgactcccccaatgatgaaagtgagttctcaatatatgtactcaagttcataaaccagatcctcatggaagaaaacatggagcaggagaccaacacgctcaatgatccattgggtcttcaagtcactgagaaatcattctatgatgttcttggtgagagttatccttatccagccaatcagtctcctacagataaaaaagctgagaccccagatagcaatttttcagtaagctctagcgactatggcagtaatagtcatgatgctaacagccctcaattgcttagtgatctaggagaccataactcttcattgcagtcctttgttcctggtgaaaacaattttcagtttgatttggctacagctcagaaattttttagggacagtgattcagtctcccagtttcagagaggttttgaggaagcaagtaagttcctccctaaaggtaatcagctcatcattgatctggaaagcaatggattttcatcccaattgaagacagatgatgcagttgtaaaaattgagagtgaaagcccgcctaacgggttgcgggggaggaaaaatcatgagagggaagatgatgattcagaagaagagagaagtaacaagcagtctgcgcattatattgatgacagtgagttatcagagatgtttgataaagtgttgcttcaagttgaacctgtggacaatgaagcacgcaaggccttgcagcctgtggattctaatgccagtagcggaaaaggtcgtggcaagaagcaaaacaagaagagtgaaactgtggatttgagattccttttaatttcgtgcgcacaagctgtgtccagtgatgatagaaggactgcatatgagcttctaaagaagattaggcagcattcatctcctaatggagatggatcccagaggttggcctattattttgccaatggccttgatgcgcgtttggctggaactggaaatggaactggaactggagccgtgttatttggttctttacttgccagggtgaaagcttctgaccttttgaaagcattccaccttaatctttcttcctgtcctttcaagaaatttggcatgttctttgcaaacaagatgttcctgcaggtggctgagaaagcaacaacacttcacatcgttgattttggcatcctatatggttttcagtggccaatcttcatccagcatctctcaagaagagacggtgggcctcctaatctgcgcattacagggatagagttccctcaaaatggttttcggccaaaagagagaattgaagagacagggcggcgcttagccaagtactgcgaacggtttggtgtgcctttcaggtacaatgccatagtagtaacgaaatgggagaccatccgcgttgaggacataaagattgaaagcaacgaagttgttgctgtgaattgtttgttgcggttaaaaaacgtactagaagaaactgttgaaaactgcccaagagatgctgttctgagactaatcaggaagttgaatccagccatttttgttcataacattgtcaatggatcgtacaatgctccattttttgtcactcgttttcgtgaagcgctcttccatttctctgccttgtttgacatgttggataccattatagcccgccaaaacgaagagaggttgctgtatgaaagaaaattatttggccaggagattttgaatgtgatagcatgtgaagaagaaaagagaatggagaggcctgagacgtacaagcagtggcaagttcggtgcttgagagccggttttcggtcactccctctcagcaaagagttaatgagtaaatttaaagagaagttgagaacatggtaccacaaggattttgaaattgatgaagatagcaactggatgcttcagggatggaaaggaaggattgtttttgctacttcatgttgggtctcggcggagggaccttactcaaattaacattttctgttcaaacactactcattactcattagtattgaatagatgtaatagattagacatgagagtttaacaattaagttttgatgtactcatttcttctgttttgaactactgatgcagtagttgtaatataagcttgatcttctcagccgacaattgagagtttaaaggtggttcgagtttaacaatttgtggaaaccaattctcgatttgttcacttttagactgtatttgtagtactgctactaaacattagaacgatccattggtgagtatctgttttagataaaggaaatattatattatatatattccaataaaatgtggtgttttctcagtgctggaaaaacaaataaatacagcaaattaattaaaactaattcacttttcaatttaactatttctttttaattaaaaaaagaggtgctggcaataaagttgaagctatctgcactaacatatctgaaactatataaatcatcataaaactatcagagttagttagttggttaggtaattcgtctgttagtattgtcggttgtgttcttttatttttcaactgtatttcagctatataaatagcttttctcttgtatcacacttatacaattcactcaatcaataaagattgttcttcatttctctctgttttgttttgttctcactaatatggtatcaaatgctataatccaagaaccataaccatctcaagatttctctaccttcaacaatagtgtgtacgagagccaattcttctgacctccactgtcaatcaagtggacaatgctcttcggaatcctgctcctccagcatctcaaaactctgcagaccttcctcctcgagtccccgttccagctgcttcaaatcaccatgttcatggagatcgaccggcctatgaggatgtacaaagcccctactacctcagcaccgcaaatcacccaggactagcacttgttactccggtcttgacatataggaactttcaaccatggactcgagatttcaagctttccataggtgcacgtaacaaatcatcttttcttgatggtacgcttcccaaaccttctctaaatgatcctctatacagttcttggattggttataatcaaattgtccaatcttggatccttcactcggtttcacctgagataaagagcagtatcatgtatcttgatactgctacagacatgtggactgaacttaacaataggttcaatcaaggtaatggtccacgaattttcgaacttaatgaaaatcttacctttcttcatcaaggtgatgattctgtcagtacatattttactaaactgacttctatttgggatgggatcactcaacttcgcccaaaaataccatgcacatgtgttgctactgccaaaaatcaagaataccataaccatgattaggtggtatagtttcttaaaggcctcaatgagtcttatcatgttgtaccagattaggtcttactccttgatccttgtccccttttaagaaaagtattttctatgattgttcatcaagaacgccaaagaactattggcaatagaaacactaattccattgcaactgctactttcacaccaaccctgcagcaacccctgattctgaccctgcagccaactttatctcaaaaaataagaaaatgagtcctacttgctccaagtgtcaaaaaccaaaccatcttatgagataaatgttactttctcactggctttccccttggttatggcaatagaagaaccgctgactctactgtcaaagacaaaagcaagtctgatactcgaacctttatcttatatgcctgcgacatgttttctaatatcctattaatcccctcagaccatccatccttcatagaatgaaaagttgtactatttttgctttagtatccatggttcataacaaccttctttaacccttaatatcattatcatagacatcaaatttaaaatttcataagattaaactattcattcaatataaaacttaatatacgtatttactgtataaattatctacactattaaataatataatggctcgctatatccaacatctattgctcggtcaaaatcatacaataccacaaccttacaaaatcttaatacataatccaatcgtagaattccttatttctagcaactaatatatactcatctcaataccttatcgatctttactcattcatacatttccctcttgataattcttagagcaacaactggtcgtacattctaatacgaatctttccagcgtaatttatccccacttacactctttttgagataacttcctagaagatttcttatcttgagattacttcaagttaagtacacttaactctaaataaaactcatggtgcatttgtgtcgttcctaattgtaattcctacttttatctctttcccaattggaatctgatttcaataattcctttcaatgaccctttacaattccttgtctgtattgtttacttaattttgaggagttcctatcttgatttcaacttgaaccttgtccatctcatcatatttcaacctgtatcaattcctcttaaactgacataacttttaaatttcccaatcattcacctataactaccagtataaaggtaactgactcaaagtatataatagggataatattactcatactaagtacccatagctaatttggaaatgtcattttcctgatttctcagctgataataattaaccaaagatcattccttgatcataaagtctctttctttcttttggtagtgatcatgataacttttcgaattcatcgaaaaaaatgtatttcatctacactctcggttgcattgataatcacttggtataaactaccatactaacttaaatgagtctctcattaccggtgctaatgaatcagaatatgagattcttatatttttctcctataattaccacttgaaattcattgtatgattcttacattacctctactctttcccagtcaacgccacctttatacttagccaactactctcaatctcaaaccacattcaattatacaatttattgtttaataaaaaaatcatctctctaatttaataagttaaccaacactcaccaaccacttgaataatgcctgataaattgaatctcaatttataagctcctccactttctgcgtgagcattacatttcttaggatttcagtggtcacttcgtatactagattgaccacccggtcaaatttaaaagtatttcccaccatcaccgtattactatgggtaatatagataatcttctctactttatcgacactactactctcctggacattctgttatacgttactaccctaattatatcctaaattctaaggtttgactcatgcccctcaatctctgccctccctggtagtagatagatcaactgacgtaattgtcatctttaatttacctaagattttggacaatactcacaagtcatcccaccttcactaacactagatcatctctaggaaagaagattctattctctgaatcaattagagatgtatgtctttaatagctactcatcaacaaccatcttattgttttgtcatttctctaatctatttgccatgtcaaataatctaccgtaaaataacatacattacacaaaccattcagattctcaatgactctacttgaacatacaatgtcttacatcaaaatcagttagtatagcaaaaataataccacccataaaaatctaacttaaaatgtttgaaagaacagtacccatatctactagattcagaacaaacacttgagtaggaaccatagacaataattcttctctgacatcaatcatccataattgcgggaaacttctttttggatgacccactaccccacaataaaaataggatttggttctacattggcccaaatggcatctttttcatctttgacactcatgatagactcgccattttttattctcactttgaccaataacatggtccacctagaaccttttgttctgcctcataactggtgttttttttttttttttgcttcctaaactgctcataagtcggcttcatatgttttactacatccagtgacacactagggaatgtcggtggtacagaattaggtgctaagcgagcctattattctctcaggtctcaaatttattccccttgttgtctaatcgtatcttgcatagtagccattacttgttccaaatattgatgtggtagaggattctcttccttaccatctacccaaagcctagatgactcattattcagtttgtttgattgccctagctgcataatttaacacacttatagtccacatcttgcatcattttagagcctcaatcaaataccaatactaataagaatttctcacatggaaacacgtcataattattacaatattaattttttatcatacttcacaacaagtagtcaagtaatcaaataataacaaaatacataacacttactataccataagtcgacttgtctttgcatcaaatgattcaacaagtcttcaagatctttaaaaccatggttgctctaataccaagatgtaatgtaacgccctaactcctagggatgccacgtgtgtgtgtgtgtgttttttttgaaacatagtttagtattaatagataaaatatttaatcaaattcgtgagaatagtaagaactttaccaatattaaaccataacaatgaacatgatgacatcactaaaaatttatttcggggatcccttgttacaaaagttttaaaaaaaggctatataaaaaagtaagtcaaaatacacatcaagtacaacccaaaaaaactcctaacaagtcgacgacaaaagttgtagaagtcagtaagtacatttgcccgagaagacagtcatctcatggcttccctagttattcccttgcccttacctgcaccacaaagcactagtgagtaacaagactcaacaagaaaagaaataacaataatcatataattgatcacacaaataccaacaagtaaactaactaattagaatcaaacaattgtacattactcatatacataaatctaggtcagtatggatatgcaaatacaatgaataataacataaaaaaaatacaactacacacaattaccagtctaatagtaataaccatagttgttacttcataaagtaattattctcaccattttcctagaaaaataattctaatgcctaacctagcatactaaagtctttgtcattgtttaataaaacaacccttatacctaaaaatggtatctgaatgtcactattgtcactgaaccaggcaataggaatacacaatccctagtatccaagtgttactgccgttgtcaaacaagacaacttgaataccattcacatgtattcatgtcactgccgctacctaaacatgatcaccgacaaggaagaaacctaaaaatggtttcatttcaaatgttgttgtcgttatctcatgatataatcgacaagtaggaaacctaacaacggtttcaatttaaatttcattgtggttatctcatgagataatcgacaagtaggaaacctaaaaatagtttcagttcaaatgtcattctcgttatcttatgagataaccgacaagtaggaaacctaacaatagttttagttcaaatttcattgtcattatctcatgagataaccgaaaagtaagaaaactaacaacggtttcaatttaaatttcacagttgctatctcatgagaacaacagttttagttcaaatgtcactatcattatctcatgagataaccgacaagtaagaaacctaacaacggttt

SEQ ID NO: 19470 - DNA, 3961 bp, Cannabis sativa
aaagtacatagtctattttgtcatttaacaaaacagaaggtctaatcgataccttttgcaaaatacagggtccaaaatagtatttactcaaaatataatggccttgaaattagagtattattaatgatatgatacttttggggaatgaccattacattaatcatagttaccatactacctactgaagactatcattgacttactccataatccattataattatgctctctctttaagagtttatgtacttactcctactatttgttatatatttactgaggatgagttgactatcatcatgacaccaattaattaagatttctcctcttataactaaaaaataataacactattattatctgcacctgcaatcaccacaattaatggatctggctttatgccattgcacacacaacaaaatagtcaactcatatcttagtcataacttttgacaaatggcaaaactctttcacacatagagagtgctcaatcaacatatcttaacacagaagtaccagatcaagaatatagctgatcatggctgaagcttttctcactgtgttgtttgacaagctatttgaaagtttagactctccagagtttgccaacttcttccaggaaaaaaaatcaatttgtgagcagctgaaggagttgaaccttaagctaaaggcagctagtctactggtaaatgatgccgaagagaggcaactcaaggagccgggtgtgaaggaatggttggatgatcttaatcatgtagtttacagagcacaagacatggtggaccatgttgactatcaaatcctatccaacaaccttggacatgaatctaatagtactgatacaactactgtgcttatgaaaatgaaattcttcttctcttctttgactgaattcgacagagctattcaaggtgatcaacactacaatatttttacaatttctcatcaattattatgatacaataaattaatttatcaaaaaaaaaaagggataatgtttgttcagcatgaaactcaccagtcaatttgttaatttagagataaagaccccattaagaaatggagcttctctcttcttgttgttagtgttaacacttagaatgttgcaacaggtggttcattgtatataatataaatatatatagttatatattcactggatattatggtcttgaaacatatgattaatgggaaaataattaacttatttttacatcaaaatataatgtgttaatcacaaaaatattattatgacaaaaaaagaagttgcaactaataatgtctttcatttccttgggcagcggagatagctaaaatcttggttgatataaaccttcttttacagaaaagaattctcctgggtttgaaagaagatattcaaagcactatctcttcacaaagatcagttgtttcactgagaaaacaacaccgagttcaggtacatggaagagatgatgataaagataagataatggagtggttgacaaaaaaggaaacattaggtagtcataagattggtgttcttccaatagttggcacaggtggacttggcaagactactcttgctcagctcgtttacagtaatacaaaactaaagaaacatggtttcgagcttaaactatgggctactttatcggctgagtttgatattaaaagaacaatgaagattattttgcaggctgctaccgattcccatatcactactgatgtttcagttaaggaacttcgacgtagactaaaagaagccttgagagccaagaaatttctcattgttcttgacaatgtgtgggatgaaaatgaagacaactgggatgccctgaagctcatcttcacatctggtgcccgtgaaagcaggattattgtgaccacacgcagccagcaagtggccaaaattgtaggcacggggaaaatttatgaactatcacaagtatctcctagtcattgctggaaaatatttatggatcatgccttcaatggagattgggaagcaaataaacatttggaagaaattggaagaaggattgtagttgagaaatgcaagggcctcccattagctgtgatatctgttggtggtcttctaaaattcgaaaacaatccaatcaaatgggaggagatcttaaggagtcatgtttgggaatggtgtgaaagccagaacaataatatagttccatggttatggttgagttatcgttatcttccttcatatttgaaacaatgttttgcttactgctctatgtttccaaggaatcatgaatttgagagggaaagaatggtcttattatggatggcagaagggtttttggaagataaccaattagagaagacaccagaaaaaattggagaagaatattttgacaatctagtttcgagatcattgtttcaaagattgagtagatatgactccaaattcatcctgcatgatttggttcatgacttagctatgtttgtctcaggagaattctgtatggcagcagaggacaataataatttaaggaatctttcaaataagactcgccatttatcgcacacaacagcacctgttactgactgtgactcggttagggaaggactatcaagagcacagaatttgcatacttggatagaactgagtacagcatgtgagaataagataactgtagaattttttgtagaaagaaaattcttaagagtactatctctgcatagtttttctgtgtcatttgtgttgccagattcaatcaataaacttaaacatcttaggtatctagacttatctcaaaatattataatagagataccttcttctatctgcatgctatacaatttgcagacactgctattgtcatgttgcagaaaccttagaagattgccaaaggacatgggaaggctaataaacttgcgccatcttgatactattggctcgccactagacgaaatgcctccacaaatgggaaatttgaagaagttgcatacattacctgaatttgttttaggtaaaggacatgacaatgcttcaaccattgaagagttgggagagcttcaacagttaagtggagagctttatattacaggtatgcaaaatgtagctaatgtaaatgatgctcttaaagctaatttgaggtataaggagaaacttacaggcctaacctttcaatggctgggtgagaccacaaacacaagactagaaacagaggtacttgaggcactgcaacctcacacaaacttgaagaaactcataatttattcgtatgccggttttagtttccctaattggattggagattcatcattttcaaatgtagtgtcaattcatctgagtcataataaacattgttggtccttgccatcattggggcagttaccttcacttcaaaagcttgagatccaaagctatcatggggtggagacaataggcgctgagttttattatggcaattatccgtccaataatattactccattccaatcactagaaactttgatattacatgacatgccaggatggaaggagtggtccactattgggagtgatgatagagatggtggtgtactcaaacttttcccttctctgaaagagcttagtttgaatggttgcccaaacctgagtgggagctttcctgatcttgacacattagaaattctccatatttcaggtatatatggttgttactttccagaacctcaatcatatacatgtcccaaccagttgttgtgcaagaaactggagttcccgaggagaaattgttgtgtttctattacagagttgataattcagttcagcgactcagttaagtcattccctttagactacttcccaagtctgaagaagctgatctttttcgattgttcaagcttagaatcgctcaccttttcaaaagaaaatggcatttcagaactccattcactcatggttttggaattccacaattgtagaaatgtcatggcattgcctcaacacatgcaaaagcttcttccatctctt

SEQ ID NO: 19471 - DNA, 2915 bp, Cannabis sativa
agcttcataacctacatccgtccgcagaggataacaccctcgaaactgtatcgggctttggaatgctgtaagtgagaatcttcttttcaagtccaactgtcactcccttacccttacccacttagcttaacttaactgatatttaaccttaaaacggccgttaaatcagtacgacccccatttcacagttcacactataacaacgtaacggttcttcgtactccgtcaaaaaaaagccccacgtgaaacgctacacccttagatgaataagagggtaatttcgtaaattgtacttagcaatccttttttactttctttttcttctgtcctagtatgccacgtcatggctcctacttgatgatgatgttaaaaagttattattatccatggcatacatacatgaatgcatggatgtatgtgtgggccatgatacatgtattatatttatagtatagaattttataggagtttgatttgtgacggcatgcttgtgtgtgtgtgttttttttatatctgagtttagggtttccttctttagttcacctctgtctttcgtcatttacgtcaagtttaggaaactctgtccaattacaaatatatccttttcttatttataggattttacaggatcagtgtaacatagtacactctttagatcagtagtttggtattctctactctgatttttggtataatttatagttatttagggttactttaaattttttttaaaaatttcaaaaaaatttacaatattataaataaaatttaaatattttattatacgtatgactgttaattcgttatatgcatagtaaaaaattatttcaaccttatttttaatactataaattacttaaaattttctaaaaatttatgagtaattctaagaaacttcaacatggacaactattagaaaaataaactaaaatattttttaaataccgaaataaagaggagttatactgaaatattctttcaaaaaaagtactacaatttttccctaaattacaaaataagggactggcaaaaaaaattatagtgagatataatgaaattgatttatttatttatttttaaatgaatgtgctcattatagttatagtaaagtgtttgaaaaatttaaattttttcgaaaatatataatatctaaattagtgtaaactttccacacaaatgaaaaaactaatcacacatataacttgttagagttccacattactaaggtatgaaaatataacattatatataagatgcatgaactactactctcatagccaattgattttaagatggaaccccatacaccttatcaaattctaacatggtattaaaaccaaactaaactctaatgaatatatgatccaaacccaataatcgtccaaaaagacgagccaaaagagcctcttgtgatctgttgtgagtctaaaatatcgttagtccaaaaagatgagtcaaaagagtcgcttgtgattaggggatagtgagtcaaaagtaccactggtcaaaaaagacgagccataaaagaggtgaacccaaagtgtcgtcagtctaaaaaaataagctaataaaagagtcgtttgtgatcacttatgagccaatattgccacttgtgatctagtcgtccaagattgatgagaaaaaattagccaccatcttgagggggatgttatagtcccacattactaaggtcaaggtgtagaaatataacaccatatgtaagatgcatgtgctactcctctcatagtcaactgatttttagatggaacctcatgcaccttatcaaattctaagataattatttaaacaatgatttaaacactataaattatctaaaatttattaaaaatttgtaaatagacttataatataaatacaatgaataattatatatataaaatattttacgtttttgaattaaactatatatatcttgtatctaggtagctataagaaaggctgaacatttgagtcgggtttaacctggatccaaccaacctgtttggactcgacacatattcacaaagaaaacctgtgtagaaaggggtgtttgggttgaacccggtcactatgaacgagcgggtctgggtgaccttttacatgtgactgtatctgggtctaacctgtattcgcccgcaaatccaatccacaatatatacataaattagacttaactaaaatttaaaaaccctaaaacacttaacatcacattcattcaacagccacacccccacattggattggagccccccatggcccatctcccaatctctctgaaggtcccaatcagccccccactcctcccttctctaaaacggttgacgcaacaccaccgatctagtccaccttggcactcgcagtttcttgttcctttggctcttcttctttctcctcactgaagaagtatattttatatatgcatttttttttaaatgatatgcatatacttatttgtatatttattaaatatatatcatatgattaaaataattttaaattggtttaaattaatagttatatcatatattaaatttgaattagagtagtgaaaaaaaaattgaatctatttgcataggttgtttttctttaaaaaaatacaagtcaacctgctaacttcatggacagtgtgagatctactaataattaaaatatggggttgtagtgttagggtttatattctgaaagcttgtaaatatatttttcattattaatatgaatattttgatatatgcataaatgttaaattattaatatttaatattgaataatctatatataaatatcaaataattctttatttatacatgaggatgtaacttgtattgtacggaaaattaagatcacttagccatgaacaaaacagtcagcaacatattaaagtttaggaatctttaatcaatagttgctagtgcagt

SEQ ID NO: 19472 - DNA, 6153 bp, Cannabis sativa
tctttagtctttagtgtgtagatgaaatttagatatgaattgtggctgtttgttagttttgtaaggtgtctatgtttattacatctttgttggtagttaagcaaatcaaatgaatggtggtcggctagcacctggattttcagaagtgtctctcacttgtgttggggtggggtcttttcacccagttgtggataagaattatttggatgtaagaggttgtgtcaaagatgcatataatcatataaacattgaattttgtaatatctgctggtgaccttgtttatgcagatattaaagtgaaatgggagagacaataaagacttctggattaataaagattaaagagagaaaggccctaaacgtagtgaaaggcaacttgcttgccttatgcatatcataatctcactctgaccagtgttacattgtacaccgtgcatggacttcatagtctttcttctttcggtttcacgatgatagctatcgttgaatgacctgacaaaatgattgacagtcacaaatcagctttatttgctattttttataagcatattaaagtaaattttgatagatagaatttataaaatttaatatatgttttgcatataccattcagttagtaaagaacatagagcttatagttggccaaagaatgatatcatcttcaaagatggaagctattcaaagtttttactggtagatgtttggtgacatttttcaaggaaaagataacaaagttttagaaagttggggcaaagaagctatgatgaaagatgctctgatccacctgtactgtacctcaatatagagcctaaactgtcattgtttggacagtgtcatatttttgtccagaaaccttgaaaaggttcaggtaaaagttgcattttaaatattagatgaggatgcaagtagaattgaaacaataatttggttttattctcaattttgtgccaaatttcattttcccatcgagcttttgtggttttccagatgtgaccataggtaggttttgcaaatggggatatgtttcaatttgtgcttaatatatttccgatcatcttgtcgtgcaatatgagctaattttgtaaggtatatattttcatttaattcaccttctatatgttgggaatgatctcagggctagggatgattatcgctctccagtgcgctctcgatcaatttcgtgctctcctccccgtgagactaagagctatagaaggtccccaagccattctcctttgcctaatgacagagattacaggcggtccccaagtccaagggcgaacggtcgaagtccatcttttgaaagggtgcccccaccaaacaggtcaaggagtccaaaggtcaagactcgtagtccttcaatgtctcgttcaagatcttataggtaaatgctgtttgttgcataacaatgcttctcaataggcacggatcatattgatgaaagaaacatctccgttagaacaatttggttattgtctggtagatgaattagtgaattcattcattaaaaaaatggcagaatcaactcgccctatagaaatttgattgaaccaatatttgcatctgtttaatcaattctggttatttgtattcatttgctcttcaaatcgattgagtgattttagtactgatgtcttacattttgggtttgtcattcacaaaaggctgaaagttctacctttagattaatagatactctttttcttttttcttctcgaagtcttacaatgtctggtttttcctctgtgcagtcctcgctgagacctggtggatgcactgctgttatttgggttgtttttgttatgtcacctatgatgtatgtgggtattctagtggcgcatgaatgctcttgtaactgttgcaggtagagttcctctatatttaatagactaagctttggatgtttgacagtgtaaattttggatcttaaaagtagctgtttgtgcagtctaatggtgttattgattgttggcataaaactgtgcttttattaaagtagcctaaaacgagttgatgagaatctagctttcaaaatgtgttattcagacatttataggcaatatttgagggtttatatatcacagcacatgaaagattccttgtttttggtttttggtaggagaggatagaaaaagtggacgggaaagaaaagaataatactttctctcctacttgtttggaagaaggagaggaaagaaaattactaatattttaatttttttgggagtaaataaatatattgacatttttttactcttatattatattatgttctttatatcaatctttttttttttaattactgcccaacctattattaaaatttagaattatttgggagaggatacaaagaattttctctctaattgagattttttatgtgggtgacacttttccttccctccccagtttatcgtttgactacaaccttctttttctcttctctccagttttattttcccctacttttctttcctaattaatagagggtaatactcttcattagccagatgaatgttaatcatttatcaccttttaggatcttgaaaaacaactactgtttaatagatttcacatataatgtatattacacaatggaatttgaaaacacacccaaccaactactgtattagttttcatggtggcatggcatctgcactttatggtttgaagaggtttaacattttcatttcagttgcattggatgatcattgagcttattccaaatctgatttctcaaatatgatccttcagctttgggctgatatgttttctaatttaaaagaataaaattttaaggttaattaggatttttacaattttgacatgtactaaattatacctttgaactttaaaccattaattttttttttttttttttttttcgaatgattgaaattgttatatttaaggatttctgttcaattttatttaattttactaatatggtgattgtctatatagtaaattttgttcctgaactttgatatttattaaatcacgctctctgaacttttaaaagtataaaattgtgctctctaaattttcatgtgcatcaaattttgtttagtaaaattagacaacaattcttaaatctaacaaattcaatagttcaagggaatttttaatattttgaaaagtttagggggcatgatttggtacaagggcaaaaatttaaattagtcaaattttgaatatgtgagatcaacatccgattttggaaaaaaaaaatgccttttaaaatcatcaaatgagtatccatttaattcatctaataattactcaattttttgaaaactacttttatcttttacaattattattatgatttgtaaatgttgatgtcgaaaattagttcaacaataaattgtattctgattttgaattctttatactagattaggtctaatcaaaatataatctctattaatttacacaaattttctctcaattctctcaatttgtttggttcgtttgcttcccaagctcgaagtgtttctgaggatgtatttcaacagagttttgactagtctgatgtgagcaagaattcgtctgtctttttgaatgagggggtcttttatttataagcgtgaatgatcgttagcttctctctttttacctattctgattggttcacatagattaattctattctgctacttctcgcgcgttcctcttcttaattttaaagctctttaagcgcctgtttttttctttcccgagttgtgctccgaattccttcctatctaggctatgcttctctttttcttccgcattatgcttgttcggtaaatttgatacacaagtatatacaatcaaaacaagtaatataatgataaataaagtatcgttcccttgataattgattattaattaccaattaatttaattttttagttctatttgatgaataataattgttggataaaagcaaataaaataatgcaataattaaaatttagaaaaataacaatgataaaaataagaattattatgatttccaactatcctttattttacttcataatataattacccaattactcttcttcctattcagttgataagttgagtaaagaagttcataatcttgctaagacttataaaccaatctatgtgaaaacttcctatatttttatggtaagtttaatcacaaagatagcattaagcataacaactaataaaatcatacaaacaacctaggtactttcgtcctaaatcaatttacatttatatcaatcaaagcaatgaggcatattcaaatctcacatttcaaaattttgatttgaattcataaataaaaattaaagttaatcaatcaataattgtaaaattaaaacagattgtgtggagttgaataaagagaagaataagaaattgaacaatcacatttatccataaaataaactcaagtagttcacataataatccttaaaagaacttaactattaaaatacattctaaataagagaaatttaactaaagacataaaaaataaagttggagagatagaacactcttggagtcctccactagtgctttctcctctttactctccttgtacactcaaatttcctcttaatttttgaatggtgtcaaatatttgtcatcaaccttccttttatcatgcaaaatccaagtttccctgaaaaaaaaaccaaggctgcggcttacaagcgatttcctcttttcttcgctaattttcacagtttctcgtttttagtttccaactataacaacagataatattatggccatagttttctcgatataactcggaattggatgattcaagatgttttagaaatataaaaaagagatctaatacttaggttgaattaagattatttatttcagtatatgctatcattagattcaataattaaggataaaatcaaaaactaagaaaattacataacactctcatctctctcttcttcctcttcgaaaccctaagaaccagcagaaaccagagcaatttcttcacaaatcaaccatttcttagctaaattaaccaagtctaggtgatgctcaagctttaaggtaagctttttcacttattcttcttgaattatagggttttaggttgagttttgttggggattttgtatgattttaggtttgtaggtttgattgagtttagagcatgttcttaggtttaattcaagtttatttgagtgtgaatttgatgttttcaaagctattaggctttgatttgagtgagttgagttcaagaactcaaaacctcactcaactgtggtgaatttgcaattttagtataattttgagttttgaatgtttggttttgttaattttatgttgttaaattgttctagaaggtttcaataggttaggaggagttttgggttggttttggtacaaaaaccaaattatctgtctctgtagtagaaatcggttaaccggttctacatggtactgtggaatcggttgacctagtggggaaccctattttctgaaaccggttagccatttggagtgtttttccagaacttagttttatgtgttttgtcgatgtttaggttatttctaagctagtatcgatatgggctcgttcggttttgagtttagggccttttataagtttaattaagttatttatcaagttaccgctgccgtgacatagggccccagatcatcgagcatcgttctattcaggtcggcctgcacacttggctctggacttgagataagaaaagtcaattgcattgcttagcatgtcaaaataagatactataattaccattgttaagaatgagttattactccattttgaaaccgttattaggtttcttacttatcgattgcttaattaagcaatgatagtggcattaaatactcattggtaatgagggttaaggatactttataaaatataaagtttgatttgtcttatcagataaacagttgtttattataatttgattacgctttataatgtcgtttttctaagtggttatatctgtttattgttttacatttgtttttgtgttgttttagtaatttttttgttctgatttttttaagattgagattgcaaatatagctgctattacatttggtattgaggttgtgtagaacattgttagttttttttaatccctttttcctttcttttgtttgatttgttttagt

SEQ ID NO: 19473 - DNA, 3103 bp, Cannabis sativa
aaaaaaaattgaaaaaatttaacacgataaaaacataattcaaatagtatattacacagataattattttatacgtatataaaatagattattaaaaaaattatattttatattataaattatttaaaattttatataatattttaaataactacacaatatatatatatatatatataaaaaaaaaaattataataccaaaataaataaagagtgtatcaatttatcctttatccttttagaagcacccttttgtttttacttctttgaaagactgaatttttatttttttaaatttgacaaagcatgagtctttgtgtcggataccatcgtttactcccacatataccaaacacaactctctctctgtttttctttttcattctctcatgcaatatatataaaatataatttaattttcctttttcttttatttccttcttcaatccaaatctcaagtttctaacctcatcttcgaactaatcaacttctcggtgggagagcagagaagaacgttaatggagttgagccaaaaaaagggtcacctaatacaatacccatttctttaaatcctttaatcgatcaactctttctttcttacaatcttttcgatagttttcaccttctgggtctacgaaatttagccttaaaaaaatgtcccacgttgatttagaacaaggaaaccaccgccgttcagttaccggaagcgacgacggcagccaatgcttttccgacgccgatgaagggtcttgctattcccagttctattccaccacgggtggttcctacgacgagtgtagcttcggtttcgtatgcgacagtggtactgatgtagaagacggtgtcgtttcggattctcggcgagtctcttcggtttcggattgttcggttctggttggggaatccgaagttgaaattaaagtgcatttgagtaaagtagagagagattgtcgaatttgccatctgggtttggagagtaatagccatgaatctggagctccgattgaattgggttgttcttgtaaaaatgatttagctgctgttcacaggaactgtgctgaggcttggttcaagattaagggggaaaaataagtaagtttttttttttttctgatttttgtaacattaattgtttatgttgatttgatcatgttagtttaataaatggtttcttattaagttattaaattgttattataattgcatgatagaacattcattctatacctagctttatatttatagttattgtagggtttcaaaaaaaaaaaaaaaatagaagaccaattttgctcaataaagtagagaagattacgttaaagatataattggaagaataaagatgtgttggtcttgtttataagatacattttccttttttttttttaaaaaaaaaaaaaaaatctataatgttgttaatctaatatgtttagcacaaaattatgcattatgttactttaatccctcacccatgtgcattttcattattttttatttcaatgattatgcttactgcctaaacggattaattgttgtgctgtgtcgtgttgcttttccaagaagatcatattatagatttggagtagttaccatcgcttaaaatcattgtcttccactatgttatcttgtagagcaatttttgagcttaagactttattattattgttgttgttattattattattcttatctcataagaatggagttctcccatgccaatatcattttagtatccaatctcaaaaatattatgtgcaatgttggtggcaagcacttctgaaaagcctactagaagaacccattttggtccatattttgtggagatttgtactatggaaattggagcttttttattttttatttttaatgaattttcatcacatggaagggttctcacaggacttcagatctctataatatgaaaacataatgaatgcttgtcaactatattttgtttttgatgaaatcttcattttcttattataagctcatacacatagatgccgtttttaaaactagtctttttcatgcctttgatatccactacattggttcaggacatgtgaaatttgtcaagcactagcgcgcaacattgctggagcgagtgagattgagttagccgaacaggctgccaacgaatccaataacgcttctgcagtaacaatgatgcctggaccagagcctcgaagcttctggcatggccatcgcttcttgaattttcttcttgcttgtatggtatttgcatttgttgtatcatggttgttccacttcaatgtgccttcttcataaattcctgaataaaagaagctctgctcggctaaagatctcaaaagaattccaaaaacaaaattgcataaaagaaaaattgtatgattagttaatgagttactctcaacttagatctttatatgctactccatacctgtagtttattgtatctataaggttactatcttcttatacctttatagctcattgaagcctttgcttttttatcaactggtttatcaaaaatgttatactatttaacgtataatttagttccaacatgttatttcatttagaactttcatggcttgatgggaatattgataactttctttataattagctaaaaattaaatcaattcctgagcaataacaattaacatcttgcttcgagaatatataatattttaagattcagagaaatattatataatattttaagattcagagaaatattatatattctacctcataaggataatagacaaccatgagtgtcttgccaaaaagtaaaaaaaaaaaaaaaaaaattgctcaacaacagtgtagttttttcaacattcatggaaacttatcctcaacagtgatggaagaaattattttatcaccattaaaaaaagatattattataacactagcgatggccaactcttacccataatttgataagacaaattacatatactttaggtgaagctgaatagttgatctattttgtttgcatagattttttttgtcatacaaaacagtgataccattttagtccaaagtccaaacaaccttataaactttggatttggtgagccaaatcttttacaacatgcacttttagtat

SEQ ID NO: 19474 - DNA, 7550 bp, Cannabis sativa
  modified_base (26)..(35): a, c, t, g, unknown or other
ataaaatggattacattgaaatggannnnnnnnnngggcataaaacccaacacgtgtcccatacacaagcggcaaacaaagccaaattgtcatccatcagaccacaccaccaatcaccacagtcctttaaagaattccaattaagaccatcactcctcaacccccagatacttctaaaccaaatactcctaatcgcatgacacttgaagaaaaggtgcagagtagtctcctcgcaagaatggcagaatcgacacaacaattggtctccattacataacccaagtcgccccttcgttggtaggctatccgaaaagattttccaacatagcagttgtaatcgaggatgtagacttgatttccaaagtttaccccacaaactgcaaggttctttgaacctatggcttttacttaaccaataggcacttttcacagagaacttacccgactttgtagctttccaaaataagacatcagccccttcatcaagaggtttaattcgtagaatcgagtctgcattacttggagaaaagcactctttgatcagttccaaacacgcattccacttacaaaaagatctttaatttgccaacaggattgattatgtctaatcttaaagccacatttcagctcctccgtgcttctatgagggacccaaggtctgtcccatatgtcaatgtttccatctgcaaccagtaatccagcacccttaatgcagatttggcgcgcctcgagaatactcttccaccccctcgaatccatctctttcttttctacattccaaggagtcaataaactgcaatatttatctcgaagaatccgaacccacatcttatcatcccctttcaacaccaaccaaaacaacttcgcaagtaaagccacgttcacatccgccattcttctaaaacccagccccccacacttcttaggctgacagagatcattccagctcttcaaagcacaatatctgctcttgtccgagttaccaagccaccaaaatctagcaagaatcctgtcaagttcattacaaaaagttttgggtagtaatgtagttgacataaaatagtttgggatagtctgtagaactgagctaatcaacacagacctccccgcttgagccaagtgtctcgctttccaaccttcaagtctattcaaaaaattttctttgaggaattggtaatcacgtcttttactggcagaaaaaaagaatggatttcccaaataattctcactggatttcaggcaacaaatacccaacctttgcttaatttcatctcggtatcttcttgcagtgttaggagaaaagatcagaccacttttctgcttgttaactctctgaccagaccattcttcataagtgcgaatgcacttcatcaagttctccgaatttgcaaccgtggcatgatagaagaaaatagaatcgtccgcatacagtaggtgcgttattgggatagtatttctagcaatacgcactcccaaaatctgtccataactttcggctttagcaataagcttggagaggacctcactacaaagaatgaaaataagaggggagagcggatcgccttgacgaatgccccttttaggaatgaagggagctaaaggtgccccattaagtaaaaccaaaaaactgacagttgtgatacattgcattatcatattacacaccattgcactgaatccgtttgcctcaagaacatgacgaatgaagtcccattcaagtcgatcgtaagccttgctcatgtccgtcttgatcgccatgaccccaacttttcatttcttacttttaattgcatgtagtactttttgggcaaggatagaggcttcagcaatccaatgccccggcataaaggcagattggcacggcgatatcactcgatcaatgaccactttcaaccgatccgttagaattcgataaataaccttatagctgaagttgcataagctaatggggcgaaaatgatcaaacttagatgcctgcgatgtcttacggatgagacaaataaaagagtgattaatctttttatcgagaaccccagttgcaaagaactccctaaccatatcgctgagttgaggaccgactgtatgccaatattttctgtaaaaaatccctgggaaaccatctagaccaggcgccttcaacagatgcaatttgaacaccacctcttttatctcttcgatatccggcttcctcccaatgaggtcattatccgcttctgaaattctatcctcaaacaacgaagtaaactcattgtcaataatgcaacccgatgactcgaataggcttttgaaatgatgattgaagtagcctccaatcgcatctctctcgctcaaccagatcccaggagagtcctcaatccagtttatggcatttcgtctgtgattgataatggtggaagaatgaaagaactttgaatttgcatcaccaaaccgaatccagtgttcacgagacttctgtctccaaatcttgtccattcttccctccacttccagaatttccaattgcacttcggcttccctctgtataatatcctgagagatagcaattctttgaatatctgccaattggcgtcttagagtcactagccttctgtcacaaaacccaaaaacatcctggttccatttcttcaaatcccacttagtactcgaaagtttccccatcaaatgctcccccctattccacgcatctttgatgacgctctcacaatccggacgcgatggccaaacttccaggaaatgaaaagggtagcggagtttgggtctctctcccgtagtttgaagacaaactggggcatgatctgaacccaagatagggaacttcaccaccttcgctttttgaaattcaatacaccaatccgcattcgcaacaaccctatccaaccgcttgcgtattcgaccaagagagtttcttgagttttgccaagttagaaagccaccttcgcaccccaaatcgactccccctatgtcaaacaggaagtctcgaagaagctccccttctttgtcatgaagacgtttacccccctccttctttgaggcttccataatcacattaagatctccaatgactacccagttagaggtgcatcccagaatcttagaggtcaaccactcccagtagtcatttttcattgacggatagggcgtgccatacacataatacagaaaccatggttcagaattcccaagcgagataattctaacacagaatcccgcctcaaaaatttcagctatcatacaccctctccccgatttctaagccacatagaaaccacctgctaagcctacagcaggaatactacaagaattatcaaaacccaacctgttcaacacttgcaccattgcattcttgtccacctttgtctccgatagaaaaatcagatcagcaacactatctctcaccaaccccgaagggttatttccgctgcgggtctacgaagtccgcggcaattccacgataaacacctcattgagacggtgggggcatgctttcggccgcctcctcgcctctcccaaaattccattcaaaagtaacagccacttcgatgcaattgcttaaaatttccagttgtaaccattccttgctcgtccaccacattacacttcttccttccacttcgtgtcttgactccggatgatctacgagtggggtaggccttattcctactcttatatttccttccacgagcattggacttagaacacgatccttcatcacccactccaatacagaaagcatcctttgaaatcacttcatttttgttcgttataaccaactttgtaggactcgcagatggggaaaagtaagagaccgcagggataggttgcaaccatgtatgggcctttctcttcctgttgttgcccaataaatggtttatcatctcagataaattaggaggaatggataaaggcttttgggcttctttatcgtcattgggccaggttatgggagtagcctcaggaaaggaatgtgggttttgagagagacatagccattcatgagggacatcaatacattgggctaaggtagggcccaagtcaggaatcagatcttctctttgttgattatttgtaaaattagggttaggcaaattcaaaaaattggatggggctttcaacatttcatggtcccctcctgatgccacgtgtgatgcaccaccacccttcttcgtactggaatcaattgcgacaatcctactactcgtaccagcaacgtacgattgtccttccttctcgttgttctcggctgacgtaagggctctgtcgtatctccacccctattctctcctttctccgatgagctaccagtctcaggcattcttctcgactccttcctattccagactccacggcgcctcctcccatacatatctgactccggtatctcctcagagtcaagctccaatttgagtacacccttacccttagaattcaaacagttactacttcccgtatcacttttaatccataacccgtataatggcacaaccttccctgatcttggcataaccatcgtcatcggagcgtgacaaaccttgtcccaatgagccaacttaccaaaattaaagcaaatcatgggtagtttttcatacttaaaccgcacccaagactccagtttaccatcagctttcaagcaaaaacccgccagaattggatgagcaacccaaacatcaatccataatctcaaataacctctccgaaccacttcagacttactacttccatcagtatcagctaactcaccaatcttctttgcaacaatcggagaattatcattaataaggcatcgtgtaggaagtccatggatctgcacccaaaaacgagccacagcaaactcccccgctctaacctctccctctacaggccatggtttaatattaagtaaaactccatttaccaaccatggtcttttctgcagaataaaagaacaatcctcctcattttgaaagaagaaaccgaggaccccctcttcacacttcttcattctccacggtcctagtctccgccacactccagtcaatatctttttaaccacagaagccggcatgtctttgcacccaacaacttttccaacgcatgccttgttcaccactacctcttctaaggtgatatcttcgaacaactccagaagttcaagttctatagcactatctctcaccaaagtgttattcatttcctcatccacagtttcaacttgaatatcctttatcaccatattctccatgctacgagtccacgaaaacactcagatagcagagaaaacactaaagcagaaataactcctggaaaggggcagaaaaaaacgaaaaataacacaagaactccccctaataaaaaccacactctgtaaaatgcagggtatacacaaaaaaccctaagctcagtacaccaagctagactctactcggagccatagtagtattcatttatattcttctatccttcactaggtatgtttgcaacagttacagcttgtttgtttgatttcggagtgaactcaacttgatcatcgatggacttaaataaataatttgagagttataggagatgttagaactgtgcaaaactttcacaaatcgttcaaaatacattctaaaattggacagattggtaactagtaaccaattactttatttttcagcattttgctaaataattcaaaacgattccaaacttctcacattcgctttatcatttatacactgtaaattagtgtccaaaaattatttttttaattactaccatttaatttcattcaaatacaattagtaacttaagttaccaatttaaaaaaaaaaacaataatgaagatgagttgcaactttttatgatcctcaatgtaaatcttcattataatttaataataatgaagatgatttataactctttttaaatcatcatttgcaatttcatgtttttatgtttccatttgacaaatatcacctttaattatttattgtttaattatttattctaaatattaaattatatagaataataaacaggtgcaagagtccaactattggctacgatttttcactaagaacaattatttgatttttattttgaataattattcgtttcttttttaactattaagatctaaccttcctcctgttaatggaattatttctttttttttaaaaaaaaaaaagatctaaccttcctgtatttataatagaccaagaaaaaaactttgctctgtaatgcgtataatgctataacgttttttaatataataaaatttaatattgaaagaacttaattattttttttttttatttatctacttggatttatcattattttagttttttcttacaaagtaactctagtgagccagacaaaattaattgcagaaaaagaataatggtttcaatcaataaaacttcaaaagggaattgcaattgttccaatgccacacaaagcattcaaaaatcaaaaatttaaaataaaaaattaaaagactgcaagaagagctgctccagcaaataaaagcccaccaattgagcctgatttgaggctcaaagcaccagaatcgtcatcatcatcggggcccttagacttggccggagcatcatcagaatcttggtcaacactcttaacaggcttagaatcagccacgggcgccggtgccggagctgtagccgttccaaaaatatctaaaggaagcaaaacttggtcgacttcgaatactgaaagctggccatcagtatagacggtattactgacggtagcattgaccacaccagtggtaatgttgacctggttactagtcgaggttgttacattaagtgggtactggccattttcgctattaccagcttgggtgtgaattgggttggagacagtttggaattgggagatggtataaaaggctgggaggacatggtactgaactaggtgaagttgttgttcactggtcaaggagttgagagtgcctgtcttgaggctagagaaggctgagtcggtgggtgcaaagactgtaatgccctgacttgaaccactaagttgggaattgatttggtcagatacttgggtaccctttagaagcttgatgaatgtggtgtattgccctgcttttttaagaacagctattatgtcaacagggcctcctggcgccggtgacttcgccggactttggcctgagataggtttgcaaaggaggaaaatggctgtggttattagtagagctaatcttgtgattttctccattttgttttggttattacactaccaacgaataggaaagctgaacaagtttagaggaaaaggggattaggagtttgagatggtatactatagtataaggtggtgtttttatatcttgagatttgaattgagaaggatattttgggtattatattttggaagttaggtaaaagggtttgtaatttaggtagaaagattggatcaaataaataccccacattatacatatataaaaacttatacaactatatatatattagagcaatttgcgtcgaaacccccttatgttttgatttttatacacttaacccccttatctttatttttggtggcaaaaccccctt

SEQ ID NO: 19475 - DNA, 5254 bp, Cannabis sativa
ataatcacttaataaaattaacaacagaaatctggtataaactattaacccattttcacacaaccccatttgattttgactttgaaaaaacccacccccatcatgaataggggtataacattaatcaatagcaaaacaagtgaaatgggtactaatcttaagcaattaagacaacaaaaagataatattttgagaaatgggtattattgctcactcactaacctcagggagtatagttccataaagtgttaaagtgaagtgaaagggttctccttgagctcccaaagcagagaaagaaaacaaaccctgaggctcacactttacattgatgtctttggcatcaggaagagccaccgtcaggtaaactttatccgatctctgagcccatagaacctccggatgccggctgttgaaaacccagaaaaaagaaaacaacttttttacttttaatcaaagaaagaaaacaagaacaggaatttatccaatatccatgattaccaaaccagaacaagaaatgaaagtaaagaaagataacctcatgtttgggtttgggagagagtggagttgttttgttaggttcagtttcagttccagcttacacccaaagaagggttttcttcaagtttcaactctcaaattcaagggttcaatatgtactactgtactttttagttccagaaatattaattaaaatgggaatttttgttttttctttaaattttcactttaaaaattataattttttttatttataaaaatactttttagtgaaaataataaattatttttatagttgttttattatttatttataattattttaagattgttttataatttatttataattgttataaagttaaatttttgttataaaaaaatataagtacttctataatacacctcattcaaatgaatgttgtaatataacctttatggttaattgatagtttcaccaacttgagttatttatgtaaatggtatatgaacccaacaatctcataaattgtcttgtttaacttggtgcattcgcttcagatgtatctttccataaaaaagttctacatatcgcatttatcttctttagaacagccttaggaagaattattatttgcgcccaatataaatgtgtcgttatcaaaattgcattaatcaaagtaattcgaccagcataagaaatattctgagaaccccatactctgattcgttgcactatcttttccactactatttcacaatctgaaaccgaaagtcttttagcacatatcgaaatctccagatatttgaaaggaagatcgttcctaacaaaccctgaagcatccaaaattatttgaatttcttcttcattcatgccacaacaatataatgttgatttcatttcattcagaaacaaattagaggactttgaaaacaatttaaggccttaaaggggataatagatagacttaaaattaccatgataaaagagtaatatattgttagcaaaacagagataattaagttttaaatccaaacacttgctgatatctaaaatttattttctctccacttttgcataattttatataataagaggataattggggcaattttttttatataattttatttgttgcagttacctatttataaaaaaaaaaaaaaattgatggtagacatatttgaattttgttgcagttaattatttatgtaaataaaattgacagtaaatataccccatgtacatttgttcttccaattaaatactaatttaaaaaaaatttaaattaatatgagtttttttagatttaataatataatattaatttaaatgtgacatatatatattattataagagtaatatatattatagtatttagtgaaaaattatataatttatagttcattataaactaaatattataacataaataatatatattatagtatttgagattaaatgtatttttttttttcttgtatttatagaatgtttgtggaccatatggagaataaatggaattaagaaaagagaaagagattattaagaagaaacaattaaaagaaacaaaagaaaaagataaggatagtaaaaaagaaaaaggtagctaatcaaagcaggaaaaattaaaataaaaaaattaaaaaaaaaaaaaaaagaatttggtttgataaaagatcaattcgacaatatattcaaaatacatgcatgtataagtatttaaataaataattaagtgcatctataaataatttgtttgaattttgattttattatattataaattatttgagaatttcttaaaaatttgtgggggattttaggtgactacaataaataattatacaaaaatgtaaataaaaataaaataaatttacaatttattcatataccaaaaaatagataaaatatcaccactacataaaaaatagaaaaaatatctataataagtgactaaaaataatcacctcaaaaaaaaaaaaaaattatcaccactacatatatcattcaaatattcaaatgattaaaaataaaatttcattgaaataagaagcccaaattaattttatatctatgggaactatggagcaattaaatatatcgaaatacctttatatatattaaatatgtgaaatttttatatataattactaaaataaacttatttattaattaatgctgtactcaaactcatacatacatgcatgcataagttgagaattattacataagaaaaaagacatgaaaaacaatacaaatattataatataataagatcaatttttagattgagatgctattgggaattcctttggcagaaaggccttcctcaccattaggcataagcaaagtatatggaaaactaataggtccaactctattcttcatattcctatctttatttctacttgtaattttgtcttcaatttcactaagtttctttccaaatctttcaaaagcttgcaaaggatccgattccgaagtccaatcaggattttctctttgccctagatagatttcatccgaagcatgccttgacaaaatctcaacaagggaaatcccaagaaggctttgaaattcgggtgtaattatcgataagaaacctttttcggggtcagatttaagttcctcgtactttggagtacccttttcgggcataaactctcgacttaatgtagggcgatttagaaggaacccttcgtaagcatattgtccaaagttaacagctgcatgaagagcagaagatatccatataattgtggtgcatgactccacaagttcctcaatggtttgcatttttggccaccaagtttcatctttcttatcgccatgaccgacttctctaatttctttccaccatgcttgaatttctgtatcgttttgaattgtatcatcagtcttgtagtagtacgagcaatattctttaacccatgaattaattgcaaaccaaatctctagcccatcaacagcataaggatagtcctctattagaagacgaagtccgtgtggagaattttcatcctttactgccactcctctgtatttataaagtcatgcatatacaatattatgttactaaagatacaaaagaaaaattagatattagaaaacagtttctaaactcttaaaaagtgtgtttagaaagtcatgcaacctctaattgaatcgaggtaattacgtaatttaatgtgtttgtcttactatataattacactataatcatataattagaggtaactgagagtcctaattactaaattctaatgataatcccatgagaattgagttactaaaatctttctatttattgtattaattacaaaaaaatatatatttttttaattactaattattttgtcaaacataatgatagtaattcatatataattactgccctaaacaactttacaacacaaccttaattttttataacaaattctaaaacatgattaatttttaagtattttctatgcctaatagagactacttgccttttaagaagatctgttggaagtgcttgctcagtaaaaacccaatctttataaatcaatgatgatgattccatagcatactttccttgaaaaaatgctaactcaacaagaccatctgcattgataagagtctgcctagcaagtgcatttatgttcatagtatcacgaaaatggggttgtaatagtttgtgaattggatgtagtacacttaattgcctatttgtggctatcacaaatggctcactcacacaatgtgtcttcaacctgttaattaaaccaaaatttaatacattaataaaagaaaaaaaaattaaactcaatcaaacctatatataattagggtttcgaccttatattttgtaaacattatcgtagactttcagttttgttatacaaaatagattattattttccaaaatggtacaaatatactactgtgagcacataaccaattttatcataacacatctaggttatgttatactgggtccaatttatcttttaataaaataaatggtccaattagtagtttttgcaaaacccaatatctaaaacaatatatactcatataattatgcaattaaaactctttgatatgtattagtttcataccaatgactatagacttgatggtagcaaacatcatttacagctacataagctttagccaattgccaaatggtgccttcaacaccttcttcagttggagtatatactttactaactgcaccatgttcatcaccatcttgatgtggtaggcttaattcaatggcaataggctttaatgtgccatccttagtcaaaaagaggattgttcgagttgcataagcctttgtaagagttgtgtttatcctcctcatgtatggtatgaatgaatcatggtgatccaatatgaatagtttgttttgattcagtgcctattaatgaagtcatgtaatatattgtccacattaatatataaaaaaaaataaataaacaaaaaaccttaatttctttaagcactttaaatactccaggcctgaatttgggcatagatggactaggcctgtgcctagagcccacttagtccaaggacccaaaaatatttgtttcccttttaaaaatataatttttttacttatttttaaaaataccacatttttttttctaaaaaaaggccaaaaatatttttttttcatatgacctacgaaatttcaagatcgaccctaggtatccctataactctgggcataggcaggttaggcctgtgcctagagtccacctagtccaagggcccaaaaa

SEQ ID NO: 19476 - DNA, 7027 bp, Cannabis sativa
tcattatttatcggataggggccggggccaacattgacattggccttggcctctcctctgtctctgtctccttttcaaaaaaaaaaaaaagatatgtttgtgattttatgcaataggcctatccttgaagagaggggtatagaatttagtcccctgccgtgggaaaatcaaccattgtatgagcgtattacagctgagattattagaagataatgagattaatttgtggacattcctgttaaggccaatattactatgacttaaaatttttttgctaactggcaagagagagaatgagtatgttaaggtaagggagaagtgaaaacttgtgactattgaagccatcaacggttgtattaattgcctagttttcctgtagaggaggaagtgcttgaaattttggaagcagatgacaatcttgattttgtggatatgtcggagactttgggtattcttggagttcggtttcatttgaatggtggggaaccatattgaatgtatcattgtgaacttcatcaggtggttagaccgtggatgtattcttgagtgcccggttgatacctaacaaccattatttggataactttgtttgattgtttgaaggtggcatatgttattttgaaaggtttcaatttgaatgatgggaaatacatttgggagagtgttgaacacatgatttaggcactactcttggaggattggaccttgctagtctcattactgatttatgtgttacatatggtgtgcaagagtacttgactggcactaaagtgccgtcacaaaggaagattggctatggtgaaccaccttagatctctacatacatatggagctttggaggtgcacattacattatcatctaaattatgttacttaactgatcatgtgtatatcacatagcaggatccatggggccaattagtacagcggacgcctcatcattatcatctaattgtgactgatgttggttttttcctctttgcacctctagggctctatatgtatgtagaggtttaaggtggtgaggtatcggactcctagctccacttgagaaaaccatttttttttctcgatctttttgtctttttttcttaaattttcttacaagagtcatagcccctatagtggagccgcaactcttgggtcatttttgttattttgtctctcctggagccatggctccagacttcggagccatggcctcgactgactaatttttccaatttttgtattttttttccattcttgcttccgaacatcgataaactcaccaagatgaaaaataactccatttaagcccgcttttctacaaatttagcttgtttttttttattattttattttttttttattttttaatatttttattatattttcctgaaaacaaaagaaaataagcataaaaccgaactaaattgacattaaagtctctaaaatatattctaaactaacttaataactgagtattgttgtggtaatttgcacaaaaaaattctgtataatctattttctaaaaggtttgattggtttaatttgtttctctatagcataaggtaaaaataagcagctatattttaaaatttccttatatatttatttagaaggggcaagcacctatttttgtctacataataaaattttattttaatttttttgtacacattaagaaaaaaaaaaaataagcatagataagaaccttactttgtccttctttgggtcctactgctactagctactagtaaggtattttatgtagctcatacaatagtcatccttatatgtaattatgtagctcatacgatagttatcccttatatgtaatattccacactaaatttaaattataatcatttaattaatttttcaaatcaaaaattatttttaatcatgtatactacttatatttatttatttatttttaaataaattagtgacgaaaacaataatattttttaaataaattatataattttattaatagcaattagttaaaataacagcatgcaatttaatcgagatatcttcctattaaaaatacgacaagattagaattagaataacgaggaaaataattaaatgactaatttctacatcgtttgacaaaaaaattaaaaataaaataagattaaaaagattgtaacattacagttaacttaaagaacacttatattcagtttcatctaccactcaaaagaaacaacagtagaaactgttgtaatagctcaattcaaattggtagtttaagcactcaattattgtataaagtaagtaattacattactaataattatttcaatcataaagaacttgtaattgctaactactagcatcgatttgatggcaaactattaaaaaacatagaagaaccaacaacgaaacaaaataaagaaaaaactatctcacacaaataagactaaaatacctataattatgtcataaagaaaagataaaataatcaaaatcatatcacaatgacaatactaattacagtagtgaaaattaaattgtaataataaacacaattaaattgtaataataaacacaatcccaaccaaaacatttcttttctatatttttaatggataaataaaaacttcttaaagtacgtattatgtgcacttttggtgagggacagcttccgactttactatttcagaaaagaaataattgcccactattagtattattggttacttttttccaatacacactgtgaacgacgtcgtcttgattaatccacagttatcccgtccctactcacctcggctttactcttcaataatttaagaccttgttgttgttaaaatttaaaattcaatatttgattcgcaagttgcaaattccacagagaaacaaaacccattctaaaaccctaaaaacaaaacctcttcttttcgtcttcaaaaaccccaaattatttttccaatgggtcgccgaaagagtaacaataccagctccagtaacaaccaggactcgcctttctctaacgacatggaacttcatcagcccaccaagattcgcttccctgacgaggacgacgtagctcttgacgccgccgccgagacctctaaccacgacgaatccatgtgcgacgttgatacctccgtttccgtctgcgataagcctgctgaagatcctcaatgccagcccaacgtatccatacccgactctgatgaaaagactagcgctgattattattttgattcctactctcatttcggtactaacactttttctgagtaatggggtttcttttgcttttcaaaatggtgtttatacaatgttcttttattttttattttagagatttattgattttttttttttgttatttatgcaggtattcatgaagtaagtttgctttgcttgcttcgttgttgaagctgtatcttgctttttgaagtttctattgagcctcttttaagttggaatgtgtattttgtgatctttgaatctgaaagttacttagcttgtttttgtttagtgttgttagctcaaagttatgtaaagttcattactttataactgatttcagagttatacttctttcttaatgaaaccaagtagaatatgcttgactttttatcatttgttgcaggaaatgttgaaggatgttgtgagaactaagacataccagaatgtcatttatcaaaacaagtttctcttcaaggacaagattgttcttgatgtgggtgctgggactggaattttgtccctgttttgtgcgaaagccggagccaagcatgtttatgcggtatgttatatgtaacaaggggaatttgttggccttcttaattccttaaatacagtttttttttgacctgttttgctttatcttattaaatgttcatattcttttaggttgagtgctcacatatggctaacaccgccaaagaaattgttgaagctaatggatattcaaatggtaatactaggcttaagtgaacttgtcaagtttcagtttattgcactgataaattagtctttttgttatgctgattggttatttttgtttgcagttgtaaccgttttgaagggaaagattgaagaacttgagctgccagtacctaaagttgatattattatctcagaatggatgggatactttctgttgttcgagaatatgttgaacacggtcttgtatgctcgtgataaatggctcgtaagttctattttctctttatttattttcagttgaatatcatgtgtcatctatagtttaccttattgtgggtgctgtttctgatcccatggaataaatttggtcaacacatccatgcacaattcaatcggaattaatacttagatagttcctctatgttttttcctctttttgtctttttaacttcaactcactgttaaagctacctcacatctatttttgctgcaaaaatgtgaattagagaatgttgattgctaacccctgtccaaattgtaggtcgatgatgggcttgttttgccagacaaagcctctctgtatttgactgccattgaggatgcagagtacaaagaagacaagatcgaatgtaagtttcttgatctcttaattgcgtataagttgatgactatttttgtaaatttttcgattcatttcttctgtatctgttttgggtatttgctttgttgctcatcaccttgtttttcctcttccaattatcatatgctactctagtttggaacaatgtctatggctttgacatgagctgcattaagcggcaagcaatgacggagcctcttgtcgacacagttgaccaaaatcaaattgttacaaactgccagctgctcaaggtaaacgcatccacagacatatgttgataatcattgacatcaaaaactttcaagtgtagctttccgtagaaaatcagaattttttgtctttgcaattgtgttcattttaggtatgacttgaatttttccttacttatttgttaaattttgctttgtttagactatggatatttcaaagatgggacctggagatgcttcctttacagctccctttaagcttgttgctgagcgtgatgattacattcatgctctagtagcctactttgatgtatcatttaccaagtgtcacaaattgcaaggcttctcaacaggttaatatctctgtcctttactcatcattggcttgttttgttttgttggtgatattgaagagaaaagatgaaatattcatggtgaggttatgcaacctgatttctgaatgttgaaatgttatgcagggccgagatcacgggcaacacattggaagcaaactgttctgtatctggaagatgtgcttacagtctgtgaaggagagacagtcaccggaaacatgaccgtatctcaaaacaaaaagaatcctcgagacgttgatataacacttaaatattcaattaacggccggcgcagtgtagtttcgagggttcaaaattacaagatgcgttgagtttgaatgctatttctcgttagcagtctatcgaagaaaatagcaacaaaggaatgttctgaaattgttgccttgttgcttaaaagctgccaatatatgaatgcaagtgaggcagcgtgattagtttcctaatataagtgtagtttttctgtaattttttattgcttagaattgagcaccatgaaaattttggaattgttttatttaattaacttgccccctataattcttgctgataattattattattgcaaattattgctcagtagcatttgattcaacattttagcattcatcttagtatacccttaggaatgcctgttagttcgaatagagattttggatatttacgattgaattattattattattaaaataatttgcagcaaaaatagcttaaatctttttaacagcaggttatacttttggaatttggtaggtaagcatatgataatttttgattggtttaggttatgaatttttatttttttaaaaaataaattaatttaaatatactaataaaaaaataacacgtgaatgcttacataacctttaaatacttagagtttagaaatataatttaaatattattatagtcaaaaattaaatttaaatatttatttgtaattagaattaaatttgatctatatctaaattaataagggcaatcagccaaagcaagtcaaaagagcatatatgcgttgttaaatgtagtgaccgattccaacctccttttgtactttgagcaaaaattttcaggtgggagattatttttatttttctttatgtgatgattaattttcttcttagcaatgattatttttaagatgaaatcttcttcgcattgatctgtttattttttgtgagatctattttacaatattagaagaaaaaaaaatgaaccgaaaacactcttcctatctcagattgccaaactatactttaataaccaattttagtttaactgataatgtcatttatcagtaaaactaattgatgcaccaggtgcaggttcagtgtcagcaattgtaatagctcacttttgcttccgattcattgttgcattgttacaagtagaaaaaggtaaatagttttctatgagaaaaattctattcaaaattcacaaaaacacttcgatttccttataaatttttactctctagcagctaatttgttatgttgtatctacagctcttgcttcgtagctttggagcttttctttggactaggctttttgaatcttctccaccactggcgtacgtggtttgagaccttgtttgcatgtttctttaaggtctcactagtcttagtgatctctttagtgatcttctgtttccaatcaccctttgagctttctttttctctcaaaacttttccctgtaaaatagaatttcttgactgttaatgaaaatagtattattaccatcatggtaaaactaatatgactattggaagtttcccattaccaattttgaggggaagtgtgtgttgtcatcctcgtcgtcatcatcgtcagcatcttcatcgccaaaattgttattcaacaaatcgtcctttgaatacattttcatgcctggagctcctggcataccctga

SEQ ID NO: 19477 - DNA, 3427 bp, Cannabis sativa
ccgcagctgccgccgcttatgtctcacccgcttctggtgggatttcgttgaaccccattgaccttgagtgttctcacaacttgttgaggttgacctccaatggttgtgggggaatgcaggttccggctgtgccagagcggttcaacggaggcgattggacatttttggacaagcttcttgccaattccaatcatcagcatcagcaacaacaacaacaacaacaacaacaacaacatcatcatcatctagctcatcaagccaagtgtcacccctcttcatcgtctgatcatcatcaagttactcatgatcatgatcatgtggcgggaaatactacaacccaaagattattcccatttcagtacctaggttgcgacaatgatatattgaaattttctaagtagtgaccacacataacattatatttattataacataaatataatgttatgtaaaaggttgggttagaaattaatgaaatttatgtgacaatctgttaaagttgtgagagttgtagtcatttcaattaatattgatcatgtaatgttataggaattaatttctaccttttttagttttatattatcatcaagtgctatattttatttgttcttttactcgatatcaaaatgtataaatacacatctatggctaaatactagattagattttttttaagtaaaaatttgcatgaaacgaaaatagagcccagagtttttgagcttgagacgtcaagaattgttgaactttaattctccatggaaacgagatggtgtcaaatttaatgtaaaagtaaagaagagagatcaaatacaaaataaattagtattttgttatgagtttagctttttattgttagttaactcctcttataatgctcttttgggataaactcaacaagtattaactaaacactccttgcacttgtggtgccttgcaaaaagttcaagattactatactacagaacagatccttcagttcttgattggtcttaatgaatcttactggagaatacaagctcagatcatcctcgttgatcctcttctaccactattcaaggttttctccatggttgttcagcaagagcgccaacattgtcttggcaacaccagtattgttgttgctgcccctgccaaaccgaaacaaaatcagccttctcggaacaaaaagcctcgccctacatattctaattgtattaaactaggtcacttggttgagaagtgctatttcctccatagttttccacctggatatagtgacaaaaagaaaaatacatctactactcgagcaaatcaagtttttgcgagtcttgaggccctcgttcctagctcctctcaactacaactcaaccagcaattgatttcattactcagtcagcaaatccaaagcgctccatccaccagtggaaatcttcctatggtctccaacgtctttggtaatgataaacttttttcccttttttatggattgtagatagtggagccactcatcatatatgtcattatcttcattgctttacatctctaaatactaagcctcttgctaatattgttactttacctaatggccatcacatacacattaacaaatctggcaccgtaaaaatatctgataaactaatactaactcatgcgttatatattctagaatttaagttcaatttattttctgttaatgcttatcttgaacattgtcataataaactcacattcacttctaatcaatgtttgattcagtatccctccctgacttctacgattgggacaactaagaataatcggccaactatttttctttgaacaagagcggcattttctcacatccaatatttttatttttgcaaacacctcttgtactttgaaggacccctagcacatccgctttggtcatccttctatgaacattactagtatactaaataaaaatttgcaattctgtgaaaaacctctagattatatgtgctctatatgtcattttgctaaacaaaagtggcatccgtttatttctaacaataatttttccactgctccttttgatgtaatacaccttgatatataaggacctttttatattattagcattgaaggttaccgatatttttttaactattattgatgattttttttcgctacacttgggtttacatgctaaaatctaaatctgatgtctcttttattattccacaatttttttcgcttattgcaacataatttttagtttccatcaaagcagtgcattgtgacaatgttaaataactgaatttggcgagtttctacagtagcaaaggaactacaaagtacaagtcttgcgttagtcgccctcaacaaaattctgttgttgagcgcaagcatcaacacatcttaaatgtcggtagagctttactgtttcaatctcatttatctttaccttattagagttatgtcataaatactattgtttatctcataaatcaaactctatctatgttacttaagaaaaagacttcctttgaaattctctatcagaaagctcctgcctatgaacaccttaaagtttttaagcgtcttgattttgcttccaccgtagaaaccaaacgacataaactatctccaagatctcgtcctttatgtctttattagttatccacctagtatgaaaacttatactctcttgaacatcgaaactcaagagattattcactctagagatgtttattttcatgaagatatattttcactttcggacactaactctcatacttcatgaataaatgaattattctcatattctttactgccctctacaggaccatctcaaaatccatctgaggagcatgaatctattcctgaccatgatgctaattcatctcataaaaaagggcattcctcgaagtgtgattgatatcaacacacaagtcccacctcctaatgaagtaccatccacacccagggattcaacaactaactctactgttacttcaaaaacaggaagaatattatccaaatcgaagcgtcttttaattagattacatttacaataccactgctactccggctactgcttaccgtattaataaatatttatcttataataggttaacacaacactttcgtacaacgatccttgctgcccattccattgttgaacccaccagctacaaaatggcaaccaaagaccccaaatggcaaaaagccatggacacagaaactgatgctcttgaagccaacgacacttggattgttgtcacacttcctggcggacatcataccatcggttgtaagtgggtatacagaatcaaatacaatgctgatggcactgttgaaagactcaaagcttgattagtagccaaatgttacaatcaaaaataaggtattgattacttccacacctttgctcttgttacaatgttcaataccttaaaattgttgcttgctattgcagccattaaca

SEQ ID NO: 19478 - DNA, 5073 bp, Cannabis sativa
  modified_base (190)..(200): a, c, t, g, unknown or other
  modified_base (669)..(672): a, c, t, g, unknown or other
  modified_base (5045)..(5048): a, c, t, g, unknown or other
tccgtgggtgtaaggacccaataaaggcttgaagcggggatgttacatatattttattaaaaagtacttacttttgtgagtgatttgcccaatatacttttactttctacctaagtgagtctattacataatttatgttaacgtaaagagtataacaaatatattatctataaaagtgagtatatcttannnnnnnnnnnaataaaaataaaaattaaaatagataaagtaaaatggatatgcaatgtaattttcttaagttttatttgcacacagccaaaattttataaataaaaattacacaatatataagataattataagagtttacttttctatgacataaataaataatactataagattatgtatttttttttttaatttatatgggcttttatgctatatttgtaaaataataaataaatttgataaaacttgtaataataagttttgttagaaaagtcaccggcaccgaaaaaatcaccgaaaagtcatcgtcaccagtaaagtcaccatcgctagaaaagtcaccagaaatgtatgtctcaaatataaataaaaatagaaccgttctataacataataaataaaaataaataacacaaaataactaattaaaccgattataattgaaatataatcagttctgtaacataatgaataaannnnaataacacaaaataactcaaaccaattataattaaaataaaatcggttctataacagtgttataataaataaaaataaataacacgaaataactcaaatcgattataactaaaataaaactgattatataacatatatatgttaaatgttaattacgtacacacttgaaattaacataattgaatcgaattgaaatattaccgtcaattttctattataatttcttaatcaacttctatatatatatataaatatatatatatttgaaaatacatgttggaattaacactttatttatgaaaatattttaataaaatatggacagcattataatatttaattttatgttgtcacttataataattttactgataaactatttatctataataaaaaaatgtatgataataaaatatattgtcatagtatttttatacgtatatatacacctatagtagtatgaaaatgactgataattgtttcggttacaagttttcattgttaatcacaaaatttgtttatgagtaagacacaaagagtaaaaaaaaaaaaattaatggtgtgttcagtaatactttttaattttcagtaatacttattaattaaaaatttaaaaatattttctataactatgttttataaaattgttttactttttcagattttttaattgagaataaaaattttgaaaaaaaaaaaatcacttttaatttttattaaacggtttttttttaagcaatattttggactccgccccaacctggatcttagtacccggagtcgaacctcggacccgaaactcggaccaaaactcagaccccgaccctagacctaaatccaaagtcgaacttggccttgaacacagacacattcttcaaacctggccccgatcccgacatcgaaccccgattaggatcccggacccgaacctggacccagccccgaacccgtatcccaacccgaactactgaacccacaccctagaccaagaccagtacaaagatccagacccaaaccccggaccctagaccaggaccccggacccagaatcctagaccctagaccccagaccccagactctagacccagatcctgaactctggatccagactctgaccccatacttgaactcgaacctttacccatactgggacttatactcgtacacgtacccatactcatatctagacccggactcggaccccaaattgggacctagatccagacccaaactcggagctggactcggaccccagtcccggacccgacttaaataaaatcaacaaatgaaaataaaatttacagaatacatttttgtattctgctttaaaattaaaaaacaaaagtggttataaaacacaattttgtttttcaaaaacaaaaaaaattatttttatttctgtgattgaaaaatttaaaaatagaagtggttataacacaacaaaagaaaattgtatatatagtagtgtagttaaataagatcaaatttgtacatgtagtcattctattatgtatgtttcaagcacaaataattgaaaaacaatatccctcccttctatatatatcctcatttttcttcctttaaacaccaaatttgggaaggacactagattttatgattagtcccctttaagaagaaaaagccttggaattgccataattttaggttaaaattaaaataaattgaattaatttcttgtaaattattgaaatggctagctatagttcatttggtgatgaaacaaactatatattttcatctcttgaaaagatgtttggtctaaggttttcaaaagctatacattaattgactgtacaaactgattgatttatgaatagagagctctaataagaataaaatcatacaagaatgatatgaaatagaaaaagaaaaagaaaaaataaaagcatataataaagtgtagtagctaggtatagagttagatatgaaaaagttatctataggtaagtaattactgtccaaaaagaattaaggaagtagtactctacaattttgtggatgagatatgaagaagaagtaaaacaaaaaattattaaaaggagagagatgtgaaagttggggaacactttgggccaccaatgacttgcacgccaagggaatatatcatcttatcttaatatataaatacatgtgaattgattggtattaaccatagtaatttctagcacgagattagttagtaatatttttttaaacttcattctcgattcttacatatccaggacccttaacacaaattgatgcctaattcatctttactgattattaacttaagttatcaaacaagatagtaaattagtttgaacataatttaaactgaaacgataatcaatagcgactctaacaaaattatgaaccaccatattagctgaccattttacaaaaactacaaaaatatttctcaataaagcaagcaaatgcttacaatcatcaattacatgttcaaataaaaaaatcataaaaaaagtgccttacagaacttgcacaactaatagacaatcggtttcaagagaaaccgactgctattgatggtctttgattcgagaaagtgcttctcgaaccccggcccattgcctcaataacctctgatcctacttgaccatccaaaaaagttgtatgagcctctattaaaaagccatttgaatctcgagccaccatgccaagtagtgggttctagaattcctcatatatagtccatcactaatttgaaattatacattggcgtgtactagtgttagtgtataatagtgtcacttattaataagtggtttatatatttttggttgaatttatggtatagaattaaatgagagacaaaataaagagaaggcggtttgttggggtcatcaccaatcatttggattggattctctataaatctaataatttctggaattatgtgatacaagtcatcggtcccatagcgtgccattaaccacatttttcttctttacgtacctatagctatatctatacacaataattgttaaggaatcactataactatcttttgtcataatttttttgggattacatataattttaatttttgtaaataatatttagttataataaattataatttttataaataatatttttggctatatagatcttttagtcacaataaaaataataatttataattagttacaattttttacttttagttataaattttattatgactaaaagtaaaaattttgtagtgaatactaaatatatagagataaaaattagacaggtaattggcaagtagtgcctctcccgccctcatccgttatatgatttaacatctgcctcagccccattgtcaagtattcgtaattggggtggcgcaaggaatttctgttgtcagggacggaaccactctttaaagggtggtcgtgccctccaaatattaaaaaaaaaaccctttgtttttattcttctttgttgtatttttctatgtttttttttttcataatttatattttggcccccattaattttttacataactctatagtattcttttttaggagttggatgattttttttctcgggttggatgaaattgattatgcttaaaagagcaaataaatattattaagattatatttgtaattacgtaaaaaaatatataatgattttttgatgaattaatttaagtgaatgcactttattaatttgctctaggttttttgtgatttattattatcattattatttttatatatagatataaaaaaagaacgtggctaattaatttgatcatataaatatatatatcatgattatctactttttaattgtctaattatatcgtcccttctttaaaacctagggattcgagggttaataacatacaaatattatatgtattatatcttatatatgcacaattaataaagtgacatatatactttattattgttagaaagaaaaaaaaatgtgagtgttacattgtggtgtgtaatttcagctatagtgagatggaaattataatagatttaagtattcagtttttaacaatatatatccaagtgggtccaatttataattaataattaccaaagacaaaagcaatattcaacagttgaaatttctttatcttcaaaaacgatatatatatttgaaaattctgttatataattttcctttcaatcctggcacgcataatcttatccaaaaattttcataacacaaaagaaaaaagttacataattttgtagcctaacacatacgaaatagaaatcattttgatcataataattaatgattacatatgtgagaattaaagttattatatttatatatctattctatataaagtttgtctatataactaaattcttggtttatgagaaannnntgggtgactttttatttatatttaa

SEQ ID NO: 19479 - DNA, 4172 bp, Cannabis sativa
ggggctaagaacaaattgcatttattattggtactcttccacaaccacctctagatagcccttttctcaattcttggctaagatctaaccagatggttatcttagatcatacataatgttttctgatactacttgaatcatcaattcgatcaatgaaatgacccttaaatctttaaactgagcaaaacccttgatgctcttcgtcaaggggatgattacgtaaacaaattatttttcaaagcttcgagctacatgggatgtgagtcatgggctccgcccttgcctaccttgcacatgtgtcgtttccgctgataatcttgcttttcataatcttcaaaaagttatgtagtttcttactagactcaatggaatagattatgttgtgagagcccaaatcttgctcattaactattttggtccctttccaaagtcttttccacaatcattcaccaagaacgtcaatgaaagctccaaccagctctaattattcttcttctaactcaacattggggagcagattgagaagatagaagataaagtcctggacttggagatgattaaaacaacacaattgaaaagcctagtgacatgggaactaaggttctcactttcagtaagctaatgcattgtctaagctccctaacttactgaacagtggaagttgctgaagctctaagagtatatcatcatcaaagatcaatcatgcgacagttaatctttagaggatcaaggtggactttatgaaagttaaacctcttagagatcaactaatctaactaacttattctttactcaagttagttgaaacagttaggcagttatgttagcttgttatgttgctatgttctataaatagcaacagtcccatttctttcatttgtaacttaactgtttaatcaagagtaagagagagtaagagaattcgagagctagaaagacaaattctttgagattacgaacttggttgtacacgggtaaagggaagtgagctgagtgattgttctttttattttgagtgttgtgagcttgagattttctttcatggaggattctgtacaagttcagattgatcatagtggattttgatgatcagctggatgcagggtcaaaatttggttctgaaccaagataaaaatctggtgttcttattctttttctctgcttcgtttattgttttcctttatgttcattttgattaactttctggtttagcttgttgatcactaatcattgttgttagatgaattaacatttcaacaatcaataatacgagagcactatttctcagatatgctaggtgggaatcgtaaatttacaataaacatattgagaaaatagtaggagtatcgaaagtacaaatattttttaatgttggaaatggaatgtagacttctgtggaaatctagtttgttcaaaactagaagaaacaaatattaatgatattttataaccagaagtcaattcttatcgcttaatgcacttatttgggaaataagtattgtagatgacattttaaaaggcaacttgaacattaatcaagagctaaaaaagagaaagaaaactgcaaagcaaaattttaaacacaaactcaccacttccatccaaaatgccccaaaatttattgttactcctatgagcatgtttggccaaagcacgggctccatgggtcaatgtactacctttaacctataattacaagagattaactttataatcagaaatatccaatttacctaaagtagtttgttatagattcccaatttagggatgctaaaccatcaaccatcactttaaagatataatgaaagtttatcaacacaaaatcagtggtgctgccttcatgctaaatgcactattgtgttgttttctcctaatagcaatgtagtaacttacagaggaaaggtgatgtgcaggcatataacgtgtctcgtttacagtgtaaaaaaattgttttaatccgttcaaaaactatttgatatagtggagcatctaaaatctatgtaaagattcttctttatgcaagacattccataattatctcacatttttattgtaaggcatcgtaaatgatgatagaagagcagatcgtggtggtggtagtgcatgttcagttgtcccttttgtatttgtaaggcctaaaattcctcgaataccactataactcagttcctggtgaacaaagaaaaccctgtcagaaaaggaggggaaaacacattatcttctccttggttatcaaggatgataaaccattccacaaaacagtatagatatctacagtgcggtaacaatgataacataaaaataccagtccacaaaaatgcacaagttgagctatggtgcttcgtcaaatttcttattggtctatatataattgaagaagctcaaataacataaaacagatgaacttataattttaacaagtcataatgactaaatttcttcacaattaatactaggtgagtggtacaaatttctattttaaatggccaaataaggtgagctttaaatcatttgaaacaaattaagcattcctcctgtcattttgccacctgccaccaaagttgttatcatttatgactgaaacctaatatcatagaatcaagaccagcagaacatgcttgttatctagccataacacaaaagatttataataatcactgaatataagtgttacattgttcactttacattaatggcatctaaattattcacgtatatcctaagaaattttggtttaataatatcacaaattacaatcatattcataagaattttcattaccattcctatttgaaataaaaaatccacaaagcatcagcaagaggaggaagaacatcaatttctgagattcttaatcctcaggcttgtgttaccagcaaactaacagtactagacagaaaatcatgtttatcatagtcaatttcttcatgctattgtatgcataatcgtaagaactaagaagcagctaataagtaaactaaccgagagtatacttgctaaataaaaataaggctgtagagcaactcttgaaatgcaaatcgcaaggacaccactagaatattcttcctcttctgagtaaaactttctgtagatttgcacacctgaataatggtcattaggtacaaactacttgcaaaaatcagatacttcattaaaagtcacgataaatggctattattttatttaatggaactttgtaagcaaacaaatgcttaatataaactccaagagatatagaaacatttcatcgtaggcccatctattattttaagacagagctaagcaaaaagattacgttacgtccctcccttttctacttacacaaacacgacacgcacacgcacacacatacacgtgcataaattagtgtatttaaccatcttcttctgggtcctagaaagttagttaagtaattcgttggtagtacactcattggtctactaggtcacagagaatcagagactaataaattaccttctttaatggacttaactccaggtaacacttcagcaaggctctctgcctccaacatgtcagagaatgaagcataccagcggacatcctgcaaattcattaatatcttactcaccaaaataagttcaaatgatacaaaggtgtacaaatcaacacaaaaaattggtacctgaactttaaatagaagacattcattgaaaagaatcaaatttcctgatccaatgctgccaacaaaataaaaaggggagggcatgaaatgacttcgaaggaaaacagatggatatggcttcttttatggaaaaagaaaataaagaaaggcagcttctttttgggctttggtgacataagctttctttaatcactcttggcaggaaatacaatttgctaactaatgtttgtacttttacttctcttgaggatactttctctttctataccttgtaatttttgtacttttaataattggccaaatggccttttttttaaaataaaaaaaaaatcaaaaaatcaatttacattttaatctttcgataattctttgcaagataaataagaaagataaagataacctcaatttgctgaaaattctaccggctctctataagaaagataaagattcaaataaaacaactcattttctatcaagatcacaaatgggctccttatatcaaaggatatactcggggatgataaaaata

SEQ ID NO: 19480 - DNA, 6383 bp, Cannabis sativa
aaaggagcagattgtaaaggatgttgccacggcatcgaatcctcctcctagtggtaatttcagtaaggggaccgatggtggtaaccctgatcacaaacggaaggctgatgctttccgaactttagggagtaacagaaagtttcggggaaacagaggtggccgtcaaggtcgctgatcttcattctaatcaaatctagaatgttcaaaaatacaagaaacatcattagggtgaacatcgagcctaggctacgttctgtacttggtatggatctcatgaatcaggtattcaaggaatacctagacagtagtgtgattgtgtttagtgatgacatcctggtttattttaaatcagaagaagaacatgaattgcatctcagatcgatgttgcaacgattacgagatcacaagctggttttgttatgattttgtatgaattcacaagttttgttatggtttcacaaattttgttatgatttttcatagggtcgaaaccgatttcacatgatttataggttcgaaacttgtttcacaagttcaaaattggtttcatagttctcaagggttctgtaatggagttgctccattttatgatattaatgtatattttttattttaaatttctttttttattattgtttctaggttcgaaactagttttcacagttatattttttttaaaattattatcatgcattgtgttgttttgattatatttgtgattagtattttttttttttacatttttgtgtgtgtatgtttttctattttcatttggttgcttgatgaaactggtttcagttaactttattgtttagtatttatattttgttatgattacataatgtctaaactggtttcacaggattcgaactggtttcacttgttttaagtgttctataatggggtttctccatttaatgatgttattgtatattttttatttttagtttctttttatttttatttttgtttctaagtttgaaacaggttttcacagttatattttgttcttagattactgctacgcattgtgtgttgttttgattatatttgttagtatttttttgtactttttttttttcatttaattgaatgataaaactggtttaagttatttttattgtatatcatttatgttttgttttcataatctttattgttgttgtgtgacgaaactagtttttgtttagtttcataatgttcattgttattgtattatgaaactggtttcgatttattttctgtatttttgtttagatgaaatataattcctctaataaaaatgcaatggaagatattagtaaagattttaagtgctcacaccgagaagaaacttcctccatatcaaaaaagaaaaaaaaaaaagtaaattgatccatagagaaaagacaggtttaatttagcatctctatgggattttgaataagggtgttcattaaaattaaatttttctcatacataaaagaaaggtttaatttagatatctatgaggcatcaaggtgtctagcaccatcatgaggtgacctcttataatttatttaacaattttttttttataatttttaataaaacaaaataagtgggacttaatattgaattgtaccaataataatattacacctacgatcagtcctaaaatatatagagtctaagacaaaattaaattttggtttaattatactactacactaaacactatttgttatattatcttattattttaggttttatctatatattgatttaattttttttcacaatttaagggttatgagcgttcagggattcgaggtgcatgtctgatttacttataccctcaaagttgatcatgattatacctcacaagaatgctaaatacattaaagatgcctttagaatccacctatacaaagggactaactttggtagatattatttggaatttgcaatataaatcttttcttttcaataatattaatatagcataaaatgtcatgaatttatgtaccatagaaattgtgtattggccacattatttaggtactttgtgaatattggttatacattaataaaataaaaccgatagagttactttgtacaaaaaaaaaaaaaaaaagtctgctttttatataatggtatcttataaaaaaaataatagttagtattaataaaggaaactgattgacctgaattcatcttccctagataaggttttttttttttttttataattttatttgggttggtttaaaatttaaaatggaattagcacaagagttttgttccaaaaatgaaagacaaaaatgaatgtcccaatcaaaggtgaaattcgttatgagaaaaatccttatatactaatttcaaaatatcaggagaggagaaattgagatgtggtacttacgtggtagcgggataatataaagagagccccttcataccatttagtctcatctttgtgcattgcctacctaagtttctttctcatcaattctcagagtatagccatcgattgctgctgactgtgtctgaactcatcaaacaaactcacactcattcacctctcaatatacacaaacactctctttctctctctctcttcttcttcttcttcttctctctgtttccatatataattttcaacatggaaaataaaggagaccttttccaacaatgtcatcaacttcccatgacatcaagattcacaagagtctgtgttttttgtggcagcagtcctggaaagaatccaaactatcaacttgcagctactcaactcggcaaagaactggtaataattaatttaattcattcattcattttgattggtcacttcttcattatgtttaaccaattgggtactttttctttttgttatgtgattatctattctttgggtttcaatactgttttcttgcttaattaattggttttcgagttcatttacattaacaaattaattgatgatgaatgatcaagaaacagaggatttgttgatcaattaaactaaataatatgtatgtaaaccaaacagaggagttgtttttttttttaaaaaaaaaaagaaaaaaatcataattttatattagtgttctttattgagttttatttaagcacgtctagtgtatttattattataaaaatggtttcatcaggtcgaaaggaacattgacttggtttatggtggaggaagcattggtttgatgggtctggtttcacaagctgtctatgaaggtggtcgccacgtgttggggtatctcttaatttattcttctaaatttcactatggttatttctatactttttttttttcttaatttggtatatttatattaaccctttttgttattggaattatgcagagtaattcccaagactctgatgccaagagaggtgaattttctttcataattataaatgataaattaattagcataattatttatataaaaatatacttaaaaagtggtgtggtttaaattaaatattttcagattacaggagagactgtgggagaagtaagagctgtctcaggcatgcatcaacgcaaagctgaaatggctaaacaagccgatgcctttattgctctgccaggtattatataaatatatatatatatttgtatactattcacgtaaaatagttaactcgaaatatactgttattagttacaaggaaataggtaaactaatagtaattgtaattattgttttagatcactaatgacaaagcagtggttattaatatgttaaataatattgggggtgtttttgttgcaggtggctatggaactttggaagagcttttggaagttatcacttgggctcagttgggaatccatgaaaagccagtaagaatttacaaatcataaatattttttttttgggggtgaatacaaaaacaaacaaaaataaaaataaaaaataaattaaaaatgggtggtgtttggacgcaggttggattgttgaacgtagatgggtactacaactcattgctgtcgtttatagacaaagctgtagatgaaggtttcattgccccagctgcccgtcacattattgtgtctgcccaaactgcccaagatctcatgtgcaaacttgaggtacatttttaagagctctctatctatctctaccactaattttatacattgtaacggagctttcagtaccttgttttgctgggccaattgtacgttgccacatatctgttgagatacttgttgtctagttacggccgtaccgaatctcactcgttttggtttaggggactatgatttcatctgagccgttcaatttttgttgtcttgaacaggattatgttcctaagcattctggtgtggcccctaagctaagttgggagatggagcagcaactgggatacacagcaaaggttgacatttctcgttgacttgatccagtttgatgaaaaactaatgatcaatcatgaccgtagatattattagtaaaagcaaaaaaaaaaaaaaaagatgtagatgtgaggtccattagaaataggccacagtttattttagttgactgtgggttaattatggttattaatttgggatttttatattaatatttggccattagaatatagatcaacaaggccagtgctttgcttattagttttgtatgtcggtgaatcaccgcttctgtatattatttttaaattttaataatatatatatttatatttgcgtgaattggtgagttgttataagttgctttcaaaaaaaaaaaggaaaataaacaataaaaagaaaaaatcaagaagatttgatgatgattcagagaaaggcacacttacgaaaaagataatactattatttttcttctgagttactgcatcatcaaggtttcccaatttacatacttttgcggatgattcacgggatttttcaagatgaagaaggttaatctgcagttttaagtatcaagtatattataggtgggatatacaaattgagtattgttactggatacttcttatgcttagcatattatatagttagtgctttatgattgtttagcgatatttctttaaaattattttcttaaattatataatatctgatacttaattacatcaatagcggtaagtgctagacaccatcttttaacatttctctattctacacattttaatttaatataatataaaaatcgttaaccaattataatatgacatatcaatatatagtgttaagcactttaatagtaatgttctttcaaaataaattaatgtttatgaatatgatacccaactgcaaactaaggagaaaattcaaatatgtatctttgtgagtattggctaggaggattggaacctaggggtattttagcagtttttttactttatttttcaaactatatcatcaaaatactatttttatttttttattttacatctttagagtaccacttctatcaacttctttaaattttctttacataatatttaaatacttttatattaattaaagtactaaaagaaagtaaaatgtttgggatgttctacatgatgaaaccgtgttattactttccgtaatgttaggatggacaatcactgcctatagtttccactctttgttggacaatttggggagcaaagaatgataaaatttggaaaaataaagccaccaaaccaatgtctcttttatttttgcatttgctgttagctaccttgaacaatgaaaatctgttcaactttagatttggagtcatcacggactggtttaatggccggggatagagatgagcgatggtgcgtgcctaaggctaatgaaatcaaggtaaatgtagatgcatcaatttttgagaacaatcaaggctttggttttggattgataactagaaattaatgagcatggatttttgttggaaggagtaactaaactctgtaatggggttgtctgtcttaaggtagcagaagcgattggcgttagggaggctttgagctggataaaatagaaacgatagcgatccgtgactctcgagaccgattgtttagttgttgtttaagcaatttgaagttctattgatatgatctctttatttagtcaaattattaaagagtgtcaaaactagtttgtggacatgaaatatttcttttattcgtttgctagagcttttaatttatatcctgataatagttttagtataaaagatgttccaactgatttgcttttatgtttggtatcggaatttgaaggttaataaagattgattatttttttttagaaaaaaaaaaaaagaaagaaagtaaagaattgtaaaaagaaaactaattaaataagaaaaaaaagggagaaatgaataaaaaacgaatgaaaaagctttgatggttctttaaaataagaaagaattcaaatgagctgatggaagacatattagacatgatttttaaaa

SEQ ID NO: 19481 - DNA, 6121 bp, Cannabis sativa
cgtttgtaaatgtaattttcccttaataatatggatatgtacaagtacaaaagttaaggtgtgatgatatgggtttaatggcctggtcaggggtgatcctacttagtaaaatttggaaataagtcactttttcacattcttttaacataattatattaatcagctcgagtatatatgaaggatagctttcatatttgtgtatagttagttttaatttttaaacaaaatttaattaaagaggtaagtggttttcaagaagatgaacaagtgaccgatgttgagtttttataagagccacacactctcttaattgaaacatacatgccacaatcttttggtcattttcttttatgtctatttatgtagaaagttatatctttatctttataaagtggcctatcttttctttattttataaatctttttccttttccagaattaatcatattcaatttgttaatatatcaataatataatatagattaaattggcgtgatttaagagtttagatagaaaaataaatataaaaatagcagtttaataacagattttgagaatatgtattactgttcagagaactaatatttatgtatttagtattagattttgactatcttaaattagtattgaaattttgggtaagttttataaatatactgccgcacggtattttttataaatatactaccctagactttttttatttctttatactgtgtgtacttcaaaacgcatacaaagtttccatcttcaatatctatagactgaactaccagagtaatatcataatagctagaaaacaactatttttctagtcagaatcctggaacaataacataaaaaattactaggacaattgtaaaacaagagtaaaactacaaaacaaaataattaaataaaatcacaaaaaaaaaaaactatacctcaataactctttggccagtggggactaccataacatcacgaaagggaacctttaccttataaaattaccccttaccctaaatacattaaaaaaacaattcagaacaacaaaaaacaactgttaaaaaaatataaaaatcaagtatataatactaaacaccgaataacacatacagaactacaaactgtatatttaacaaaatcgaggagtgatgaacaaaattccaaattgatatctgagactaaacatgcacaaacaaaaaaaaaaataataaaaaataaaaactgaaaaagaagcttaaaaaactgaagaaaattttgaagatgatggagatgagaagagcaagaactaatggaaacaacaattgaaaaaacatggatcaatcttctcaacattgatatccattattttgtattactgttatgcttttacagaatcattatatataggattttcattctataattacaacccattattctcatttacagctaatttcattcactcacttacagctattcattcctaaaataggaaagaatcacctaagaaattaatcctagaattactgcaaatatcacagctaatatcacagctaatatcatggtaattcaacactcccccttaagttggtgcatagatgtcacatatgcccaacttgttcaaaaactttaagaaaactcggtttgatacagctttggtaaggatgtcagccaattggtcttctgatcggatcaccggtagttccaaaatcttgtcttccagtttttctttgatgaagaatctgtcaacctcaacatgttttgttcgatcatggtgaactggattataagccatgtcacgagctgacttattatcacaatataactggattggtttctttggtgggtaccccaaatcttctagtagaaactttagccataacccttcacaaattccaagtgccattccccttagttcagcttctccacttgaccgagcaacaacattttgcttcttgctcctccatgtaaccaggttacctcctacaaaagtgaagtaccctgacgtagatcgcctatcattcttgtccccagcccaatcagcatcagtatatacatctatggtttgttcctctgtatttttagagaacataattccttttcctggagcagactttaaatatctcaaaatgcgcataactgccttcatgtgttgttccccaggattatgcatgaactgactgacaatgctcaatgcatatgcaagatctggtcttgtatgagctaagtacatcagcttgccaacaagtttctggtatcttcccttgtcaactggaacctgatcactcttaatgcataatttcaagccttcttcaacaggtgtatcaattggttggcatgctgacatgcctgtttcttgcagcaagtctaggacatacttcctttgggataagtaaatgcctttatttgatcgtgacacttctatcccaagaaaatatttcaaagtacctagatctttcatttcaaattccttagccaagtattcttgtaaagcttttctttcctctagatcatttcctgtgaccaccatgtcatctacataaatgataaggacagtgatcttcccttgttgcttcttcataaaaaaagtatggtctgagttgctttgctgatatccaaaggctttcatggcctttgtaaatcgtccaaaccacgctcttggagattgtttcagcccatacaatgattttttcaatctgcaaaccttctgattatgtttttctggcattttgcatcccggtggtagatccatataaacttcttcatacaattctccatgcaaaaatgcattttttacatcaaattgttgtagaggccaatcaagatttgttgcaagagataaaaggactcgaactgtgttgatcttggccacaggtgcaaatgtctctgtatagtcgactccataggtttgagtgtacccttttgccaccaaccttgctttaaagcgttcaattgtgccatcaacattgtatttgatagtgtagatccatcgacaaccaactggtttcttccccggtggaaggtcaacaagatcccatgtctcatttttttgtagagatttcatctcctcattcatagctgttttccatttgggatcagctaaggcttcctgcacactgttaggaatagatacaacagataattgattcataaaagacatatttgagtctgacaagcgatggttggaaacataatggctcataggatatttgactttactagataaatcaggttcatatgtgagtttagggatacctctagtgtgacgtgggggtagttgtctcttgtgtgtctcaggaacatcttcagtaagagattggtgtggtatgtcggatggagttgggactgtatcctcaatttcttgctgagatgaagatatgcttatttcttcaggtattgggtgctcatcaacactttgatccaatgttatcccacttgcatccaagtttacaacatcaccactttgatccaatatcataccacttgaatccaagttgacaacatcttggttgtcattttcatcatagttgagagtttgaatttcctttcggtactcctcctgaaattcagactcggggaagtacataatgttttcatggaaaacgacatccattgtgacaaataatcgatgagttggaggatggtaacacctgtagcctttctgatgtgtggcataccctataaaaatacaccgtaatgcttgaggagttaattttgtacgttgatggttatggagatgtacaaaaactacacatccaaagacacgggggggtaaattgggaactggtggggcaatcatcgcttcggttagtgtgtggagtggtgttttgaaatcaagggtacttgagggtactcgattaatcaaataagctgtagatgtgactgcttctccccaataagataagggcatatgagcgctaattaataatgctcagacaacctcaagcaagtgtcgatttttccgttctgctactccattttgttggggtgtgttgggacaagtagtatgatggatcatcccttggtcttccaaatatttctgcaaatcagtactttgatattctccaccattatcactacgaagaacttgaatctgagttttgtattgagtttggattaacttatgaaatttttggaatagcgaattcacttcacttttggatttcatcatgcacacccatgtcatcctggtacaatcatcaataaatgttacaaaccatcgtgatccacccaacgtagtcactttagatggaccccaaacatcagaatggataatcatgaaaggaataagacttttattcaattgtaatggaaatgaagcgcgatgactcttcgcaagttcacaaacatcacactggaaacaagacacatcaaattgtagaaataaactaggaaataatttttttagatatccaaatgaagcatgccccaagcgatgatgccataaccagatttctgcttccctttttttcttctcaacacctactgtcaaagcttgttggaggctttcaatgctccgtgactccatgtccaagtaatatagcttccccctcctaataccacaaccaatcgtcttcctggttttgatgtccttaaacacacaaaaatcaggccaaaaaattacaacacaagataaggtagttgttatttgagaaacagacaaaaggttatagtctaaagatggaacaactaaaacagaatccaaatttaaggtatcagttagggtcaaagatccttccccaatgactggggttgaatcaccattagcagtggagacaaatttttggttggaagatttaagtgatgaaacctgtctagaatcaaatgtcatgtgatctgtagcaccagaatcaattatccatgtactatgcaaaacaggtgtagaaatatttaaaaccttaccaccattgtttgaagaaattaccaatgccgaggcttgtttagtaatgacattttcaagttttgttgcagcaactgttgctgcactggaagggcctttttgattcttctttgagcgattatgatcccaccactctggataacccactagctcaaaacatctattcttcgtatgaccagttttctggcagtgggtgcacttgagagatgacttatctacatgattttcataccttgaagagttgggtcgattcttcgtgactaatgcggaagcgtcgtgatttgctgagttgaaggtggtttgacgcactgcctcccgacgaacaatagagtaacattcttctatatcaagaatagaatctcttcgtagaatttctctacaaatttgttcgaaatcgccatctagtccagcaagaaaaatgtgtactcgaagccgatcaatcgactttttatatgcaagaacatcatcgggatgcttcatgatgattttatcacgatgatcaagttctcggaatatttccgttaactctccataatatacagagagttgtctgccattttgttttgcagcaaaagctttttgattcaaagaaaaaacctgtaattcatcactgtcatcagataaagctttggctagagcactccaaatctcacgagcagtggataaacgcagatagcgtttcatgatgtctggagacattgacattagcaaccatctcttgactttttgattctcagcttgccatttgtcataaccatcatctgattctgcaggaagttctttcttcccacgaatgtagaataatttttctctttcagtgatgtgcatctccataatctgtgaccacacatcatagtttgattctgtaagagtgattcctgcattgaacatgctttcagactaaacaaatacgggaacatattttattgccgaaggttcactaattgtttcattgttcttgtcagacatttttatgttattgaagattcaaagaatattgtccaggaaagaaacaaaaaataataataataagatctgacaaattgtgccaaataacaagtttgatgaaagaaatatatatatatatatatgatgacagaaatatatatatatatatatatatattagtgataatagaaagatatcaccactttggatgtgattttagtggctgaagcttgataacagaggaccatgaccacggcatgtgtaatttggaaaaactttctgatgaagcccttttttttttttttt

SEQ ID NO: 19482 - DNA, 8268 bp, Cannabis sativa
gtactaaatgaatatattccctaatttttaaaaattattacataaaattatataaaatcattaatattaatgcgtaaaaaaatactagacacggatacattttaaagccggccttcagatttggtgggtcttaacaaaataaaaaattattaggttttttatttaaaaaaaatatatatttttaaagaaaaaatattttttttttatctctaagataagtgaatcataggtgttagttcatccccgctttaatccatgcccgacccgaccctattttcagctattctcttatacattgtaatactaaattgtagagagtacttggagagtgtgaactcttctaaattattattattattattatttatgaaaaagaaaacacaaatatagtatgaggtgtatataagaacatgccttgagttgagacctgtaataaacaaaaaggaatgtcccccataaaaaaccaagccatacatgtccagccaaatcactaataaaatataccaaacaaaatacaataatggcctcttttttcttttttaaaataataaaaataataattagcagtattgaattgagcacttttaaaaataaaaaaataaaaaatataataatgggcaatgatacatctattctagactcagtggaagggtggccacgtgggttattaacaatttgacattaaaaaaaaaaaaagaattacatttattcaagtcccagtattatcttcccaaaataacattgctgtctttaataaaaataaataaataaaaaattgctgtttttttttactatagattctaataatatttacaaaggaaaaagataatgacattttgaagaaaaaaataaaacatatttaattcgagttaataaaaaaagaatttttttttttatatttgactttaaatggtggaaaaatttcaacaaaaaattatagttcaatttttttaaaattatttattatatttatttaaaattattgtaaatttttacaaaatttaatttacttgccaaaaataaaatttaaactattatttttacacgtataaaaaaaataattacatacaaaatatcaaaataaatggaaaatataaaagatataatataaaattatatttaaaaaatatgttaaattatttatatttgtcatctcaaaaataagagcatcaaatggtattatttattttatagttaaaatagctaaaaattaaaataaaaattatttttattattatcactctaattaatttatatttaattatttgtataacattatataatattttttaaatataaaataattttataaaaataatagtaattttgataaaaatactattaaataatattaacaaaaatgaataaggaaagctccttattcattgtttattatagagagttattgttatggttgaagttacttttttaagtctcactctctattttgtaaaaaattatatttagagagcatagctagaggtagatgctctaagagcatctccaaggatacatcatttttagtgttacactatcactaaatttaacgtcaaaaagtatttctactccaaccacaacactaaaaattacactaaaaaatcttttttattattatattaattttttaataaaataaaaaaataaattaatatcatcttaattaacaaaaattaccacaatgtgtactcttgatcaataagaatatgatgtctagtgtgtttaattttaatatgtttaaatttgtattatttttattatttaattttctaataaaaaaaatataataaaacatcactttttaaaaatgtgcatggtaaaatttctcaaaatacaattcttaattttataaatgcaatagtataaatatatatataaatattcttaaattaaaaaaaaaaaagagagagagaaagatatgcagtgactacagtgcaccgcatatatgctgtgcactgtagacaaaacctcaaaatgctgcaagaaatgcagtatcgttagagcaaatatgcacggtatgtatatatgatatataccggctccttggtgttgctctaggacccttataattgtaatatggttttcaaaagagaattgctaaaaagtataaatgttaggcaccactagtataactctaaggaaaaatattattaaataatgttagaaaaaatgtaaaaagctcgaaactccttatctattttttattataaagaactgttttcttatgattgaaacttacttttttaaatttcactctctattttaataaaatattatatttagaaagcataactaggataaatgctctaagacctttataactaaaacatggtttctaaaagagaattgttaaaaagcactattagtttctagcaaccaccttagtgtaattaaatatcgagtctcgtataatttaaaaaaataatttttaagtaatattgctaattaattgtaaaatactacttgtaaaaggtactagacaccaataatatttaatatttttttttacataaatatatagatactgaaccgtaaatttgagtaattcttttttttccattttctctaaatttgataactttgagtacgacaatcaatcacatgttagaagaggcatgcggacaacagtggcagcagcgccaatagttcccaaaattagttggccaaccacacacacatacataatgccctttccaatctcaccttgacttaatcatcatccttaccacaaacccaaaaaacactctctctctttctctttctctttctctttcaccaaaaaataaaaaacaaaagctttttttttttttttctgtgtttatttctttccaaactcaaaaactcagcttcctcttcctcaaaaaccaaccataaacatagtagaagaaagaagagaaaagggtatatatatatatatatatatatgagatggccggcactataataaatccattcaaagatcaataccattcatctcaatctttcttaaccaaaaagctcttaccttggaccatatattgtattcttcccatagctgtgtttcgcttatacttttaccctcttaaccttcctctttcctcaatagatcaattccctaattcaaccccaattactataaaaccttccttatctcatcctcctccttctcaaggtattttgattttgatttttgggctatttttagttctttcttttatatctaaacaaaagttgttttttttttggtaggaaatgaagaaactttaaatgcaacttcttcttgtgattacacaagtggcaaatgggttcctgataaacagggtcctctgtacaatggcacaagttgtggaacaatcaaacaaggtcagaattgtatctcccatggcagacctgatctgggttttctccaatggagatggaaacccaatcagtgttcaattccaaggtttaaccccaacacttttcttcaactcattcaaaacaaacacatagcttttgtaggtgactccatggccagaaatcaattagagtctcttctttgcatgttgtcaacagtctcaactcctaatttaatctacaaaaatggtgaagataacaaatttcgtagatggaatttcccttctcataatgccaacctctcaatttactggtcaccatttcttgttcaaggagttgaaaaatcaaacaatggtccaaaccataataagctttatttgaatagagttgatgagaaatggggttctgaattaggtactatagaccaagttgttctctcaattgggcattggtttcttcatccagctgtttattacgatcaagattctgttattggttgccattattgtcctggtttgaaccatactgagattggtttctatgatgttttaagaaaggccttaaagaccactcttaatgcaataatgaagaaaagtgaagaagctaaaggtaaacgaatcgacgtcgttttgactactttctctccttcccattttgaaggtgaatgggataaagctggggcttgtcctaaaacagagcctgaattagaggaaaagttggttgaaggaatgaatggtgagatgagaaatattgaggttgaagaagttggttttgctaaagagaaatctgataaagggtttagagttgaagctttggatgttactaagctatcattgatgagaccagatggtcatcctggtccttatatgtatccatttccatttgctaatggtgtcactgaaagggttcaaaatgactgtgttcattggtgtcttcctgggcctattgatacttggaatgagattttgttagaggtcatgaagaaatggaatctgggtcaatcttgaaaacaagagttcagttacgattttcttctgaacttttacatgtaccaaattatgtttcgaaattattctgaattatagaaattgttggatttagagatttctttctgtcaaattcttttagtacatggacaataaaattagacagaagtctttgagttcagaagaaaattattcatagtggcaagaatgagctcttcttatgtgatgaagatgaatttaggaaacaattgggggagtttttggaatttgaaatgattttttttgtgaagagatacttctgacaatggaatttaatggtggtgccaaagtggttttggacctttatgattgattgatctgtgaagcttattacaatggtctttcaaaaattatatgaagtacagaattttgtaattgctgtcattggcacttctgctgttttttttgtttgaatcaagagtttatatacacatgtatattatctatatatgaatatataatgtgtgattttttttgggctgatttcgtactcgattcctgcaatttgacagccttcatatttttgtctcttgaggaatttgtttggatgtgttgagaataaaaaggtatttttcactttatctttctttcatgtactttttaactgttttttttgtgtattgtttctctcccatttttgagcaaaatgtagttttaatgataaatttgttgatttgtatgattagtgacataaaatatttgaaaaatctatattacacactctaaaaggttattttagatttttttagtactcaaattacgggttatttataaatttttaaatttttttgaataatttatattgttaaaaataaagtttaaacattttgtacaaataattatttaaatttttatttttggtattgtacactacttaaatttttttaaaaaatttactaatactattaaataactataatgtacaaaaaaaaattaaactaaaaaactttttcttaaatacgaaaataaataacaaaacacctataggattgtactacaaatttttcatatttttagcaggaatgaattgttcaaatcataatgtaaaatgtagcaaacatagacctctttagaacctagatattctagatgattattattatttgagtcattcaaataagttttcattagtcatgatattggtttgttttttatagtacaagagcattaattttctctttgaaagtttacatttcaccaacccaagaaaatttatatcatgcctttttttgtgtggccccatttttaatgcaaatgtgcaaaatagaaaagtcaccctcttttgctacttttgtggggttaacccaataatatttgggtactcttctctatatgtttgttccattagttggaaaattttaagtatcctaagttacttttgagctagcttgtgcttgaagaaacataaagaagagaggtaataataagaggataagaggaatctttgttgtagttgttttaaaagagagctatatttagtttcaaaactatgtgaaatgtaaaattgtgttggtaaaatttacttaaatggcttaattgttagttttataatagtttggaaagtaaatgaaagtttgaactatgtataaataaatgaaaaaaaaagctaattagtgctattatacacacactattgagaattgtcaaaagattatttgtaattttaagttagactatagtatataatacttattttgtaagacatattttaaaagataaattgttattatatatttaatattaaaaaataaaataaaaacaaacaaaaatgatcacgataacacgtttactaaactgtatctgaaattagaataatcaataagagaaataaaatggttaaaaatataaaataatctgaaataatattttattatgatgtttattaaactatttgaaaaaaaaaatagaattattttattttgtttaataactaagaagataatcgaaatgataaaatttgactaaattgtcattgttaaaaaatttaagtatttttatttataactttttgaagtgcatatttggttttttagttttttattaataatattaaaataaaaataaagtagttacggaggagggctattacttggaggagaaccttttttttctccttagtttaaggacatgtttacttaaaggaatggaaatcaatgacatggtattgattctcgtacaattgtatactaaatttttgaaagaaaaaaagtagtagagcccacacaaattaggaagaaaataagaagaaatgttctctccccatttttatagagaatatcttttccatcctcacttattttattttgattttaattttattaactaaaaaaaaaaaagaccaatatgctttttaaaaatctataaaaaaaaataattacatgttctaataatgataattttgtcaaattaaattattctggttatctttcctaattatgtaaacaaaataatatgattttgattttgttactggataatttagtaaacaacataataattgagagtcttgcaaggagatggacattcaacagaaaatactgtattgtagtgatatcttacaagtttggggaaaggcttacactgataattctaaagataggattaaagattgtaaaacaaagattaatattttgaaaagctcagtgtccaagtttaaggaagctaagaagaaactttttgaagttttcactcaaagagatatgttttagagacaacgctctaaataattatagcttcaagaaggtgattagaatattaaattttttcacgctgctgttaatgctagaatgagaaataatgcgattgtgaagcttcaagggcctaatggagcttggtttgattgagaaaatggtttgtatgatgtggtggtcaattattttcaagatatcttcttggcttcaggggtggacaactctgaggtcataaattgtattagaccttatatcacttaggaacaaaattgctttctactttagccgatttcaaatgaggaggttaagaaagctttgtttcataggcatctaaataaatctcctggtcctgatggtatgacaccagctttttaccagaggggagtggttgggacagatgtgattaatcaagttcgaaaattctatgccgaaggattttgcctatgggattgaatgatactaatgttattctcattcccaaaaagaagcatcctacaactatgggcgatttaagacctattactctatgcaatgttctctataaggtgatttctaaagtaattgctaataggcttaaatgtgttttgtctaacgctatttcagatactcaaagtgtgtttctgccaggaaaattgatttctgacaatgttatggtctcctttgagattatgcattatttgaagcgaaaacggactggcttggctttaaagctagacatgagcaaaggttatgaccgtctagagtagtttttttttttaaaagaagttttacaaaggatgggctttagtgatacatggattaaacttctaatgacttgtgtgtcatcagtctcttacaagtttgtacatggtggatgggagatgggtcctttgatatcttcttggggcatttgccaatgtgatcttttgtctccatacttgttcattatttgtgcagaggggttttctttccttctacataggtatgagatgaatggttctatttggggttgcaaggtggctaggagagctccaatagtttctcacatgttatttgtcgacgataattatgtgtattgcaaagttattgaacaagaagcctctactgctcttaatctccttcgggtgtttgaaggtgcctctagccaacaaattaattttgtaaagtcttctgttttttcagttttaatacggaggttagtgtccgaactaggatctgtggtttattagggattcaggaggctggtgagaatagtacttatt

SEQ ID NO: 19483 - DNA, 5327 bp, Cannabis sativa
  modified_base (35)..(44): a, c, t, g, unknown or other
taaaaatatttaaaattccatgaaactgtattttnnnnnnnnnnttgttgtttttgtgtatttttgaaataatctcatttatttataattcagagttaaacttaagtatttatgccacaaattattctaaaaaataagttttgttgcaaggtctttttttttaaaaaaaaaagtatgctatttatatatatttgatattatttttaacgtacgatttaataattaatttttttatataaaaattaatattactatatgataatacattataaatttaatatacttttaattaattaaattaatatatcaaaattaattatattaaaaaaaagatcttgttttaaattttactctaggcgcctcactaacttgagacccctatcgaccttgcaaaaacatagagcctcttttcatttttttatatgtttccttgtttgattaggaatgaagaataaaaattaataattatttaaagctatattgtatttaatccttatcctacaacagaaatcattgcataaggcgcaccacatggtgagatgaatttaggtgtgcaagtctaacttgatgagttccttacaaaaatgtcctgaccttttttaaataaatcatgaaattttattaatgaaaatcaactaaaataatagcatacacaatttaatcggaacatcttcactgttaaaacacaactaaaatttgaattaaaaaaagagccaaataactagccgcctaattttcagatcgtttgacaaaaattgaaataaaattagacgaaaaagattttaccatcacaattaaccttaagaatacttacattctgtttcatccatcactcagaagttacaatagtacaagttgttgcagcaggtttattgatcaacctcatagcttgagcactcaactattatgtaaggtacgtaactgcattactaacaacccttttagccgtagagaacttgttattaccaatcactaataatgatttgatggcaaactatcgaaaaataaaaaagaactaacgatgaaacaaaacaaaactatgttacaaagataatactaaaacactcaaaattatgtcacaaatataagcctaagtagtaacaagatacaatcctgaccaagccatacttaaacccaaagaaagtcaacgtgcttggccagaaaaaaaataacctccgatagctatagatttaaaaactaaaaatcctaattttttaccctactgttaatcttgggaaaatttcaaaaaaggttaagagtggcacgtacgagcacgtacgtactgatcgtccttcccaggaaccgagtcacacgtcgtccgctccaaggagtcgccattgcacgtcgtctgatccaggagtcatcgtcgcacgtcatccgatcccaggagtcgtcgtcacaggtcgttcttcatagcagtcaccgtcgcacgtctttcttctcagcaatcaccgtcgccgtcgtaggttccggtatgtccctggtcttctgactgtccgagagctactccggtgggccctgcacatttcggccataactccatggtcgtccctgcacatcaacaaacttagggattgaataggattttttcagcagacgtaagctttacaaaaaataaataaataaataaaggtcttgtcgtatgacatggtttctttatttctctattaatggtcaagtgttaaggtcatattgtgatagtcaggagatttcttagttgtcgggtttctttgtcttctacgatcgtggcgggttgtattttgtggttggcaggctttgtgggggttgtgggttttcgagttgcaactgggtgataatgatggcttcgagtagttggaacaatggagatacagaggaagaaatattgcggttttaaattgaggaggaggatcttgaagaagttgcagtgatcatagggggcggagatgatggaattgatgataggtggtgtttggttggacggttcttgtctaatcgggtgattgattttgagaagatgcagaatattttggcttcattatggcagccaggtatgggtatgtttgtcaaacaattggataataatatatttcttttctaattttatcatgatgtagatattcaaagggtcatcaatggaagtccctggacctatgaccgaatgcagctgattatagagaggctaaaggttagtggggatccgaaggcattaccgttgaacactcttgacatatgggtccaactccatgatatggagcctggatgtatgtctgaggttgttgttgctaaggttggtaatactatggggaagtatatagagtttgatccgaaaaattttataggagtatggagggattttctttgcatcagagtaactttgaatattgataaaccatgacgccgaagaatgaagctcactaaggatgatgggaactggttttggatcaatttttaagtacgaaagggccccgacttcctgtttcatttgtggtataattggtcactcggaaaggttttgtcataagttgtttcatcagccaattgagcaagtagtgaagccatatggtgagttcatgagagcccttccccaacgatctcacaagaatattggttctcgatggctcagaacttgggggtggtggtggttggtggtggcggacctgaggggatggaattgtcgacaggcaatgggggaggatcttcggtcgttggggatgtcgtgaatcacgttaatggtggaggtgtggttatggctccttccttatctcatggtccacgtgtcaatcaaggaggagtccctaaaagtatggggaaggatatcgtgaatgtttcagataatagcatggttgttcttaataataaaaaaaggaaagtaagtgtgggcggtaacgataatgctgaggtgatacagcatgttactgatgtttcaaaaaactcatctttggcgggccttggcaatggggctcgccaatcatcatgaaaatactgtcttggaactaccgtgggcttgggccgccacggaatgttcagttcctaaaagaacttgtggttcaaaaaaggcctagtgttgtttttttgtgtgagacgttaagtaaccaattgaagatggatcaggtttgtatgagtttgggctttgagggtttttttgttgttgtggcccaaggaaggagtgggggtttagctttgctatggaagaatcaagaggaggtcaaggtggagccgttttccacaaaccatatagatagtcttacaacgctcgatgggcagagggaatttcggttcactggaatttatggggaacctaatagaagtttaaggaagaacacctgggatctattacggactttacatgggcgttctaccgctccttggtgtttaatgggggatttcaacaatgtgctttgtcagggtgagaagctcggagggttgccttacccatcgtggcttattgatggctttcaggaggtggttcagcaatgtgagttgattgatttggatctgtgtggccatccttttacgtgggagaagagtagagacactgctcattggatagaagcccggtgggacagagctatggtaagtaattcttggttaaatcttttctcttcatctaaattgtttaatcttgagatttcttcgtcggatcatagtccccttctactggatgttctctttcgggagactattgctcaggcgagatctttcaagtttgaaaatttttggactagtcatcaagattgtgaagatgtggttagacgtaattggtcttcgatagcggggcaaaatattgttcgaaaaatacaggaatgtggtactgctcttcagcattggggaaaggatgtgtttggcaagttctcgtctcgcattaaacaatgcaatcgcttgttaaagcaatataagaagcgacgagatgaggacggtaagagattattttatgaggctaaaaaagagctctttgctgttcttaatcaaagggaggttttttggagacaaagatctaaacagttatggcttcaagcgggagatcaaaatagcaagttatttcactctaaagcttctgcgagaaaacgaaataatcacattactaggttgaaagactcaaagggtaatttgagacaatgggatagtggactggagaatgtcatggttgagtactataaggaactctttactgctgaacctactagctgggatgatgtgttggactgtgttgtgcctattgtctgagatgaacataatgcggctttactacggcctatattagatcaagaagttaaagatgcagtctttcaaatacatccgaagttttttcagaaatattggtccattgttggcagtgatgtgatccatacagttaaatatttttttgcaactgagcagatgctggtagaaatgaataatacgaatattgtgctaattccaaaaaaagaagaaccctgatcaaatgagtgagttgcgccccatttatctttgcaatgttattgccaaagttattactaaggtccttgctaatagaatgaaaggattgttacctgaggtaatctccaaacatcaaagcgcttttatccctgagagattaattacagataatattatggtctcttttgaaattctacattatcttaagcggaagcaaatgggcaaggatgggtttatggcgttgaaattggacttaagtaaagcttatgatagagtggattggcatttcttgtgtgctatgtttggtcggatgggatttgctgataaatgggttcgtcttatctttggatgcttatcctcggtacagtaccaaattatgagtagtggctgtactatgggtcctattgtgcctagtagaggcctccgacagggagaccctatatcaccatatctttttttggtttgcgttgaagtattttctgctcttattcgtaaatttgaagagaggaagtggttgcatggttgtaaagtagctaatggagcacctagtgtctctcatatgctctttgcggatgacagttttctgtattgtaaggcgactaatggagagatgaatcgggtacttcaattacttaggatgtttgcttctgcaacgggagaacgtgttaattttgggaagtcttctgtcttttttagcactaatacttcatctgatatacgacagaccatctgtgctactctgagaattcaagaagcgactgagcacaataagtacttagggctaccgagtactgttggtaggaataagaatgtcattttcggatatttaaaagacaaagtgcagaagcggatccagtcttgggacaataaattcctatctcgcactacaacaaaagaaggcattagaggcggactttttagccgcggac

SEQ ID NO: 19484 - DNA, 3172 bp, Cannabis sativa
tagagaatcaggttgaccagtttttttttaacgtttctttaattagataacataaataaatggcacctatccaaaaattaaaaactttataatgtggcttcggtcattaattatacattgtttattactaagtcaccattattcatgcatgcatgcatttgttcgtgcatcagtggttgtatgcaaaatactgttgtgtaggtaaaattcagctgacaaaaaccagaccttctatccaagtacacatacctgtgacagctcgttcgctataagacttggactacaccatgccctggtgaaatattcaattgaagatgatgtagatcgatcacgcaaacaactaaaccattctctaacataagcaggaagaacacagatcattaaaccatataatgctccagcaagtgatgccaatttcactggttcaacaggccaaagagactctatggaaaacaataatgagccagttttgatggcatgggttgctgcaattgcagcttctgatagccctgcaggaagctctacatctttcttcttagtattttgtgaaatggaaagatctacaggtatatgctggaagatgcaatctaatataactggagtagcaaaactttgtatatactgaactagtctttctcttgcaggtgatgatgatggtaatgaccataaatacgaaagcaacaaagaccatgcaaggaatacatttacctgaaagttaaaagagcacatcacattattattaaaattgtcctagctagaaagtgcataaaagaaagagctgtaagggaatatataaatgtgaatattacaacaggccacaaacaaagtggctacataaatgcagcatattacccgttgttgtgccatcaagtccatttcaaggacctcgtaaggatacttttcaatcatgcaagctatttcctttttcaaatggacgcttgtttccactgacagatcaatagggcgtgaatcctcttcactgttaatattaccatctaagtgagtgatgtcttccaaaatagccaggtttgaaacaggttcagttgaaagaataacgtaagcagcaaactgcaatgaaggaactggtttggaagaaaaaaggatggcaaataaagagctgatcggccctttgctcaagccccaacattctaccgacttcactgctctatctctagcatttactgaagagttaactacactcgaggccactaactcccagaaatagaggtgctcagatcgagatgaagatatgacagatgcagcttcatggcagtaggaactagtaatagcttctgcaatgcctgtgcagaagaacaaacgtagaataccttctagaatccgatccttgatggggtcccatctttctgttccaagaggatttatattttctgcatcatttaattgcttaattccaaaaggcccgcaacatagagaaaaagataaaagggcatttttagcaatatcaaaaggaaaagagtcgggaattaaagcaatttgctcaagctttttaagatcgtcatccatgttctctaaagtaaagttgttagtaatattttcatccacattctcagcaagttcttccataagaaccacagatgattgaatccaacgccttaattgaaataaagcatactcccagtcttcgtcattaaaatctttccaacagtaaccaactgaaactactattagttttgatagcagcagctgtaccaccggtggcatattagatatacttgatgtgccaacaccttgtctctgtttgcgaaacaattcaagtaaaagagtcctctccaattgactgataactctccccagactcaattcttgtatgcccccaattgcaacaaaaggataactgcttataaccaactgaaaccaatcttccacaccttaaaaaagaaaaacatcaataagattagaaaaaaatgagaaaaaattaataaaagaactacagggaaaactataaccatgactctttgccaatagtggaataataggagcagaggccattgccatcaaacatttctttgacaggccaaacctacaattcaaatgctagtgaatcaattccttactgacttgatgtgaacatttaccttgccctgtttccaacatgaccagaggtgggagcagaatagttttttggacccaaccagcaacgatgccttggatgtgattattccatgaagaatcatgttcagcatctctatcagcttcaccagatctgctatcacacagtggctgaagtaaaacgttaacaagccaaggaagaatcctcagacagttcatatttattgcttcacccatataaagcttattaacaaccagttcaaacagcttgatagcgttgcatgtttcccatatattttccttaaacaaagttgaaaggaaagatacaagagctctcagaaaaggttcttcaatatgctctacttcatcatttaaagcaggccatggaatgacaaaattcagtccgccacagcctccatgaacaagagcaccatcaagtaaaatgatgaaaatggagtctaacaaggtctcctttgaaggagaagtgttattcttggcatatgcacagagtaaaggtaagaaagagtctcgagcactgcctccaggccatttccacgtgcacaatatttcagcagcaagccaggatcgaacagtaacgtcttcatgtattgtctcttctgaagaagagagtgttgtccctcctggcgacaagagtgcaagctttctatagccagtaagaaccttatcaatcccaagtttcaatgaaagcttgtcaataaaggaaacaaacttgcaatgacctgagtcctgcatttccacaaagtcaaactttataagtaaggaaccttatacacttttatgaagattctaacagactatttatttgcggaaagaacaaaataccacataagatgaagcagagtatgttttattccctctcatagaatgtttataaccataccatgtacaacaaagttttaaagtgtttaaagttaactattggattggctgagtcaatacaaactctgaaagtttcccagcttggaaaaccatacacagacaaaatataaattgcatctcaagtgctgggtaatttactctatacctaaaattcaagtcaacatgttgacataagtgtcattggcactaaagaagaacaaga

SEQ ID NO: 19485 - DNA, 3129 bp, Cannabis sativa
aactataaagttgaatagattcttctaaattgaaagtgcagcaacagagattcaccacatacacgacaatttttttttttaaaaaaaaaaaaagtcacaaatttgttactaaaaaaaactttattatgactaaatgttatgaaaaatctgtataatttgttataaaaacagaaaagaaaacactataccgagtgtttgttatatgagtttgaattagaggaatagagttggagagaatataaagtgttagaaagtattaacaagtgagacctacttaaaaacacaaatcccgccaaaagtaatattaaaaaaaaaaaagaaaacatatgcatacacattttaaattccttcaatctattatagaataaacacaaaaaactttgtaaaatcttgaaataaaaattgaagtggttaccttattaactaaaacggtaaagcggttcaagcactcaaggataacatgataccctctctcattcttgactagagtcacaaagtttactgttagcgcaaccattagggaagaaacttgagtccttgtttcaagagtctgtaccaactttttcacaacaaaacttctgaaatgaggaaaaaaaaacgttagaatatggccaaaaatccaaatcacaaaagataaacagtttaattctattcttatgtaccctgtagtgctacaagctatttcaacaaagttccatagatttgcagttatgtgggccaaaatatgtgttctctgctcctcattgcacacatccaggaatttttgtatcacatcttttccatactgatccattgtgagctcaatcacatggtatctaatctcattgaaaattttttcaacattttcatgagtggaattcttctctaaaatttcaagtaggaattgagagccgcgccaatcttttgctagcaagcttatgaggccttttgcttgagccaaagagatacgcctaagtggcaatacagagtttacaccactcgatcccaaaatataagtatcattatcatgatgactatttcgaccactttgataatttggacttgagggactgtataagtcacttcttggtacgaacgtaggcacctgtgtattcaaattactacgaggaaattctctacttgggttagttgatgttagtggggtattatgagatgaagtagagaaaatttcatgtgatgatggctcagaatgttgatgattattatggttattgttattgtgagatgatgatgtgccttgattaccattaagattccaattaagaaaggtttgaaggagctcttccatcttaattaaggagaagagacgagttgagtgaagaaagtacaagtaggttgggtctcccaccctttaaatagtactctcttttttttcaacaaaatctatttctattaggattagaaataaaatgtttcttttttcttttttttttttttgagaaaaagataatctttttaattagagttgggagagtagaatttgtgagccccactaaaataaaatctttcggaaaaaaatataaaaagattacattttttgaaaaaatatagaaatccttaaacgagtaaaaaagattagtcttcttctttttttaataatagaaaaactcttgaaaagtcatttggatttaggggctttttcaataatataaaaaatactttaaaccttcgtcttattgaacaaaaaaacacttctatttctatttatattttttttaatataagttcattattattagtttatgatttatttgatgaaataactagttttaaaatatgattttttattattaaataattgaaagatatctttatgtataaagtttatatcgatcgattaattattttaattaaaatatctagattgaatcttttattttattatttattaaaatttaattatgtatatatatcttatataattctttaagaaattattttttcttttacaagaaaaataggttagatatttctaaaatttaaatttgaattaaagtttatatattttttataaaagatatgataaaattgaattaaatttaaacttttattattattatttgaattaataattggagaagcctccacatttattaacttatattattttttattgttttttttttattttttttttattgttaatatcgtgaagaattgttatatatttactaaaggatttaattagcaaatacgaacaaattttatttaattttaataaaaaaaatattatatatacttctattatatattatattgtttattcaattaaatagggattttcatttataaatttataattgatttttcatttatttataaaaattgaaacaacttaatctcaaaacaacataacttcaaaatgaaaataatttttataaaataaagagaacataatttcaaaatagaaacaacataactttaaaataaaaagatacatgataatagttctattttttttcttttgtcttgtagatagaaggattttttttttttttttttttttgtgaaaattacatggctttttatataatttgtacaaaaatattgggttttttaaaaatatatattttttatgggaaaaatagaaaagccagaataaaaatataaaaaaaaatatagtagaaggtaattagttaccttaatgaggtaataagatacagctattgttaatgttactctagatttttttttttcacatttgttaacttttattttttgttttttaagttttccataaaatgttttttttcaaaaaaaaaaaaaaaacatataatcaaaaatacctccttcttttctaaaattttagttttcatttatcaaaatatctttccaaacaaaacaatcagagcttctttgttaaacactccaaaaggactcttgagaaaaatatttagctttaaaagcttgataccaaggtctttaaatcttacttgccaaaagccaagaaattttagatagacaaagaaagcccaattcacctctttgctttggttaacaaagagcgttctaagattttgtagcagaaaattgattaaaatcagtagttccattctaccagaatcacttaataacatctaaaagaggaaagaggaagttcaaatgtggacattgagtaagtaggagtag

SEQ ID NO: 19486 - DNA, 1485 bp, Cannabis sativa
attttggaaaatacaaagtctattttgtcatttaacaaaacagagggtccaattggtaacttttgtaaaacatagggttcaaaatggtatttaaccttatagtaaaatattagaactataattaaactatatatactgtcccaaaattttattttatcttaagtctcgtatacgttagaatcgattatgtaacttaagtattatcactattaaagtatttatttgtaaactaaagttaaacttaaataatttacagtgtaaattgcttaaaataaacaataataataaatcgttaattttcaaaaaaaaaaaaacaataataataaattaacaactaacaaaaataataaataaaaatttaagctagattgtctttttccaatagatctaaaaagcacaccgcatattttttcacagctatttttaatagctctgccattcttttttaataaatcttgaagcaagaaataccgatccagtgtgtcgcggtcccatgtactttattggaccccactttcagacagtacaacacatcacgccagtctctgaacttaacgtaacaatgaataaccaatcggagactgacacgtcatctcaggtccacggagttaccctcgggattcgtgcagggtagaacacactgagttggattttggcagggcgttgccgggtgggttatacagctagattgagcttagatttattaattttaattaattagtttaattattatctttagttaaacctaattttgttcactatattacataaataataatatttaaatcaatatgatatattcaattgagttaattagttaatgtcatattcagtatgaccaatttgtgaaaaattattttatttttttattaatttttagtttataagatagtatttcaaatatagctgaaatatttcaataatatatcgaatgagtcattatgtaaattaattaaaagataaattttgtggagcgcaattgtatttagtaccaaatatttttcgaagggctaaagattatatttctttaatttttttttttattttacatttcaaaatatttttttatatttttacagaaatctacataagaaccaacagagcaacttaaatcataatttaaatttacatagcaattcacatagaaaccaccatagcaattattggagtaactctaacagtaaaaataaaaaagataaaaaaattaaaaaataatatatgaagtgattccctatttctttttgtattaatgttttgtttctaacttaattttttttaaaaaaataaaaaaatcaagagaagataaaaagatttttttttttgttttaatttttaaaattattttttcaaaaaaagatatatctatacatattctaaaatctatgaagttacattatcttaaattaaagctatcattttcttttttttttttttttgaaaataagcgtgttcatatcattaaaaataaactagacctgttggtca

SEQ ID NO: 19487 - DNA, 5214 bp, Cannabis sativa
ggtcgccggcaaagctatgccggcgagtttagtcgccgacaaaacttgtttttcttgtggtgcatggatcttcaaccaaagaatgttggcccgggatacaccttaaacccgtggaaactccgcccaggcgggacaggctatgggacccaatggcagagccctttttggtacgatgtcagaagttgtcccccacaccatgctaccatgcagcgcatgcgtgtccttgtgtactgtgcaatacgatccaacagctagggaccaaggtaatccaatgagaatgaccctagagtgacacgcgtccaaagcactgccagcacagccagtatcatatgacatcggtaaaggccacatggaaaatatgccacctactaatccaacgatgggggttcatccttgtgaagatccacccaagatggcccatgcgaagggatcgacctataaatacacttgaaggcacacatggcgggggattcagattctaatatatccttgacttcttctcttttccttcggcttttcatctcaaaaccgaagtggtattctttgaaaacccattactgtaaccacactttcaaccccaaaatattcctactaagcttcttcttcttcttcaagaggaacacggtacgatggagtcaagtccatctcttttgtatttgtatgcacaatcaccgacccaagagcctagctaataaaatggactcgtggagtaaggataattaacacctgaaccacgtaaaaacttcttgtttattaatttactatttatatcttcattactttcttgagctctaatattatttagttactgaaacactcggtaaacaatatcgatcaagtcatacataatctaattatacatagtatctttactacatgtccatctgcatatgtgatccaaatcaaaatcacacacactagaagtatagtgtatagtaaaccgtacttagcagttccatattaaagattctcataacataattaatacactaccgacttattttattcatattgtataatcttaactctcttgtatatccttagaagattatactttctccatatgaataatttttttttaaaatatttaataattatatttttataattaatatatcatttattttataatcatatttcacatattttctaatatattatccattaattacatatttttagagtataaattcttacaatatagtgttctacaaaaaggccacgcgtacaacataaaaatttgaataacactcacttgttgagatcaatataagagtattctttcaccattattattttcatcagaactctcataattaaccattgttaatcatcattatttcaatctttttaattttccagccttaacataatttgacgagttttaattatcaacaattacattattttaaaatttttaatattagattattattgtaaaattgtgaaaattaactaaaaatattaacaagttatgtgatattaagctgattttattttacttagtaatatattttgttttcttataaaaaataattataattataattagtaatgaatttttgtaaaatatttagctaaaacataatttatttaatgtatatgattaattgtaattaattaaattctaaaaataaatatttttaataacatgttgggcaacttgttatagcatgctatgaaaatgtaacctagcttgtattagcatgttaatatgttataggaactagctacgtactaactcttcttatagtacctaactaaaaatgtaacacaagaatatacatacgaaaaagaagatacaacatcaatacaatcaagggcaatatggggaaaagacaggaacatataataaggttatttaaaaagaaatcatcttgaaatgaaattagtcaccgtttgaagaactccatgatagttttttgttacgagacatgatccttgttaacaactactctatacgtacgagagtaggaggatttgatcaaatcgtgataagaaaattcaacaaggcagaaattactaatgactacagatcaaatgcttcaaaagtttggcataaacaacaacagtactaatctcgatttgatgatacagtttccaatcatcaaataagtacaaacatttcctcgaatgagcactactagtactatacgtaccttggaagattatatatattttcatacaatacgctagtggcaaagggttgacagaagagagagagcatagaatcaatggggataggatcaccacatacgatcttttatatcgatcattggtcagaagtgaacgactttagtagtttgaaagagtcaataactatgggaaagatagctaattactccattatcttggttctgctctcatatatatagtaataataatgatgatagtatattataatcaatcggttttgttctcaattggacccttctctatgaaggtcagatgagcttttcctacgcctctcattatgaccagccaagcgccttcgacaactccttttagtttcatcaaactctggcagcccatggaacctgttattgtgtatatcatatcaacacaaatcaaaaagagaaaattcgcagaccttgatctcttgtgtttctttatatatctttccccattttgttctttcataataagaaggccaaataaacttcacccttcttttataaagtttatgaaatcaagtatacactattatacatctacttatagatgtcatcaagtgtatgttatataatgacgtaatctatatccataattgaaaaagaaagaaagaattaattttttttgtgtataataatcatatgtggaaacttaatttttttgatgtgatttgttgccgcgcctatattgtcactgttatacaagcatgattaggaaacatatgaatagtaataatataaccaatatctttcttttcttctatatatgatcaagtggggttgttgttgtagtgtctttcccaataggctataaataatcccttttcagtgattcacgacttcatattgattatgaagactctcactacacaatcttagaccctcttcttacaaaatccaattggcgttcatggccactcttaacatttataacatcaccttttagatgattactactagtagaaaccactatttactactagggttcagtggattggagagtgcattaggaactatacatatgtagtctggtttccattttgtggaaaaaggggaaaaaagtgacagtttgaatgctgatttttctttttaatttaataataatactagaagatttaacaaccaaggtcattcgtttaatttgactagtatatgttatatttagttagagagccgtatataatatatgtatgacaaaacaaaaatatatatggtcccttgtttcttcattaatagtatgtaaaaatggttgaaaatgttcaaacacaaaacaaacatttatgtattcaagtttcaaccttaaaattatgggaaatgagtaaacgaaggtcaacagaaattagggtttttctattttatttatttttattattataataaattaaattacctactacattgctggcaaaagcgttgttggaggccggcgacactgacaacggaagccttggcgtgaaactcacagatcttgtgccgacggtggtagtgtttggcctcagttaagtcagcgttacagttgtcagcttgacaagaaggaggtctcgtggaccctcccgcactggatcccgatctcctaacaacagcaccacaagatgaggttgaagaagaagagttaatactatactgggctggtcttttcttcctcatgatatcttcactactgctacttccaaaccctaaacccgaaacgtcgtcgtcttcgtcttcgtcttcgtcttcctcctcttctatctcatcctctatcttgcatttgtggctcctcttcccctgagctctgttgggttccattttctcagacctaagaataagaaaaagaaaaggtataaacagaaagagagaaaaggaaagagaaaagaagacacaattatttttttttttttagaggaatgaagaaatatatttaagctacacataaatatatataggtagcgaggaataatagacccttgtggaaaaggagaagaggagaagaattatgtatgtgtgtgtgaggaccacaaactccatttcctctctactaaatcaactctctccctttccaaggttaacagtgaagtgttaaaaagctcattacattttaatacgtttttctacattaacaaaaatcagagttaaaagtgtttgataaattttgtctttgttgtaataacagaattttctgcaccactagttttaattcctttttcttttttttttacacaaaaatttaccgtcttgatttcatttatatatttagtaacctttcgttggattgtattttttttttttttacccttttgacaagtcataacagttttcctcatactatacactaggaagcccctatagttgtataatttattataataattacgaaaagaaaaagagactactctagtctagagctaattttgttataacttatcataataagctctcctataattgtagaaaaatacaaattaaaaaaaatttagacagttttgtttctaacaactctaataataagcgtaattatcttaattatttctactgttgtacaattggctatagtttatctccaatgttttctgttgcaccatcattttcattgtggggtttctcacctcgagacgtactcaaatctaatccaataatatgcagtgagaattagtaaaagtaaaaaaaaaaaaaaataataacatttgtttaacgaataaaagtcgttatcaatttattgacaccagcaaaattataaattttcgtgctaacaaagtttttaactataaatgcatttataagtatataaacatatatcagctcaaaaaatgtatatataaacataaaacttaaattatgcctcaaaatattatatatgggttactattggttatatttttttttatgtggtacaataacaaagattactaacatgtaaaaacactacaaaaagttgttactttttagtcacaatataaattttttgtataaattttttgtgattaaatgtgacttttagtcactacaaaaaattatttgtgactaaaaatagcatttagacacaatttgtcactaatttagtttt

SEQ ID NO: 19488 - DNA, 5847 bp, Cannabis sativa
  modified_base (5778)..(5813): a, c, t, g, unknown or other
gatctaagatccttgtaaaataacatccaacataaggaacctagtcaactctctagtaatcaacaagaaaatcacgacctcaagaaataacaatctctagagcaatcaatttatcatcgttaaaatttttattactcctaaatcagattattcacatgataaccaaaatcaactctagagaagccacaggaaagggatcaagaaacttgtgaatgaaatcacaaaaatcatgattgtttacccagatttttagaaattaataaaatatatattaaatctaaaaaaaatggcttaaaaatagagatataacaatgtaattttaacgtggttgggatgttaactagctttagtccaagagtcaatattattacgataaaaattgaaaggccttaagatctacacaagtgtttgaaccctaaaatttgcttcagtaattgaggaatgagatttgaaccctttgcttgaatgaattttcttatatttgtagtgctagggttcttattcattagacattgcccactgatagggtaaatacaagtaatatattgacttttaggcccatctagtggagcccagcccatgaggtgctaattctaggttgatgtggatgccacattaggttgatagttgtccaattcatgtcatataatcatggataataaagatatattaaattcttgatactcaattactatttttctatattgggaagatacgatgtgggacgtgatcttgggagttaaatcctgatatcattagatctgataattaatgagtatgacacagagctagatgtccaaatgttattaaactacttgtctcaactctttggctaaagtcttctggatacaagttgggatggaggactaattcgcctggatgagtcgtttgtctgccatgtagaagagctcacttcgctagtggatatagcccattatcttggttgggcctgctattgggccttaagggattaagctataaccactttgaaaattacacatgtcctcatcgtaaaacatggataacatttatccccaagcttccgtaactctaaatgttgtggaagcttatacccttcctttcagatgatgtgaggataggtggaggctaacggtgaaatcttttagaattccaaaccaaattttttgtggttgacaacatctaattttttgaaatgaagcgacacattgtattatatctttggtttgtggggattacttctcttggtggagtgcgtgtagcaatgctttttgaaataatagctgattacactagcatagttctcgaggaaaatatcatcattttagatatcttggttctaggcatcgcatcaaatgcgtgactagcaactttcctagaccgtttgatttatcttgtctttccttggacatgatcttagttgttgatctgggatcacatggattactctaaatcttaaccgaatgaagaaaatagtaaataaagtgaaaaaatatattactgtgtatacagctagggcatcgttgtttctatctaaaaaaaaaatacaaacaaaaacaaatagagcatcattgttcttgtgacttgttgcagtatagctcatgactttatgtttgtaccatataacagtactactattttctatctacatatgcacatatatatattttgttgcctctcctctggccctccctccttttccatcttttttctcgagaagagaaagaaaagttaggggaaatggaggaagaggaacttgatcacttagtaagagaaatggtcatgtcatgtaagggaaaagtagatgcaattgaaatggggagggaaagtgatttgttcgagagtaaatggatgacagtccaaaccacgaattaattgaattgatgacactcactcactatacaaacttttctttcttttctttacctctacttttccttattcttcctctgctttttactttcgctctttttttttttttattattattttattattaaaacaatctgtgttgtgctgcacaaactcgaagagttaaaattttgactgcaatcgaagtaagcctttttatatacgttattattattcttttttttttttttcactgaaaacgtttttattattcttattgaagggttcaaattatgtcaatggggcgagtatattatgccgcttttcttttagcgcgtggaaggtgtatattcactaaacatagtgaaaagccatgtgttatgggtgaaccaaatccaatgtgaaaacctgtcccatttatccaactgtaataatagaaggacaaaagttttaggcaaagaagtagcctaacgctattaatacatcattaaataattttattgttaatgccatgtcttttaacgagaacctgactgttaaacattattcacaaatagaaatttgataaagtcacaagaacaatgatgctctattttctattgttgtccaaaatgcctctcctataagaaaaactcattttcttttcccttcctcttttttctcttcctcattctcacttcaccaccaattttctctcttcctctctaaataaattactaattgtagaaaatttttgcactaaaatcttgtaacaaagatatttattcagatgaagaaaacaaaactggagttagattgtataaaatttgaggataaacaccaagtattggttcattttgaagaaaataaatgggtatgattttttttttattcttgttgttaatggttgttttgatgattaagaatattgtttagatgtttgatctgtgatttgatactattttttggtgtttttttttttgttggaaatttagtttaggtaaaaatttgcattcttttgtgctttttggctttttttcgagtttgtccaatagtagatggtggtggtatgatggggtccgataggtatgttacttcaaggttagggataatgtccagataggttcccgatactttgtctgatagtcatataaaaccctaatacattttgcctattctcatgaagaagaaaatattcatgtatcgtgaaaatggattttttttatttaaaaaataaaaaataaaaatcatttcttttgttttttatatttattaaggtttattaaatggttttttttttttaaattttgagtaaacagaaaataacatcaaagatggtattttgttcttttcaaaaatcatatttgattaaagggacttatttttacctttatacttaatagagggtagcttatttaatttataaaaacttggggttctttgttgtattcagaaatcatcatcaacgttcttagaggaagtttatcaagatgggagattgatagctatattagtaggtggatttctttttctaaattgttggtgggaggtaattttgttaagattctttagtattgtaattttgtagcccatcacgtggctaattggacgtatgccaacaaagtatctggtttgatcgaggtgtcaacaattctagaaaatttgttatataatgactatgagatttaatttttgtaatttataaaaggttaatttcaaaaaaaaaaaaaaaaaattaagggacgatatttgtataaaggctttataaaatctaacaattttaaaaattgcaatcagccaattgaaattaaatgttgcctttgcccaatagtactatgacaatgctaagccgaatgtgataaaagcttgcaatgcctttccatttgtttgtgagaaaaagaagacaaaacataaagccaaaaataataagatattgtcagaggaatttagacaacactaaatcatacgagtattcaagcaaaataataaaaaaaaaaaacctcattaacagtcatgtaagtactcacctaaaataacgaatactcaaagtataaactacgaaatagtcaaaacgaaagaagaattatagaaaagacaagagaattatagtggttcaatcagggcttgatcttcttagtctactgtaagtaatagtttcagcttagtttatttgatttaaatcacccatttatataaaaagcaagtgtcctttaggattacataatcggtcagatcagaccgtttttacaataaatgaaaaaattaaatcaaaataaacgtttaaagaataaatgaagaacagtttcgtctgtccttgacttaattacaacaatatatgtgacttaataagtctcagcttgtccattcgtattgcaatcatacaagctcgcaagctctacgctgttgtacttgcaagattggcctttgggcctttttcgttgaatgtctatgttcagtcttgatcgcatagttggacattttatgattgacaacttggaacatgcaagtctctgatgagacgtcaaatacattagtcatttggaccaaacctatgtaaagaaacgatctttactcgtgccaggaaagatatacttggtcatcacatataatcggtatatgcgcgatcagtattaacttctctcgttcttgcttatcttttcactatgcaggccatggtatgcgactagaccctatctcggtcgtatcttctcataagttcacatcatgcgatgtgatgcaattattttctctaatcacattagttgatgtgtccacacttcttttttctacagttaacatcacaacactttctgcggttaacaacactttttgcagtcaacaacacagcaatggagacaaacgtactcttgcgacaaatcattttttcttgtgaagactggctccacgtgacaacttttcatgagactgtctcgtatttctaggtaaaaaaattgcactataacataagtaatgcatcgttagatcatataaacaataataacttaataagtacaagagaacgtttggaacagaagagatatgtagatcatttgaggctccttttgtaggtcgtataaagatcgtattgtattaaataacaaataacactatgttttgaataaaatattatattgtattaattattacgataataaattttaatacaatgtgagtcttattatttaatacataacaaattactcatattagatcgtattataatatttacaaaggctctagagtcaaacttcgccctcatcccgaccccaaaccaggacttagacctagacacttgaaccaggacctaaacctcgggtccaagatctgggtccaggtcctagttcgggtccgaggtcgggtcatagtttggatccaggattctgggtctaggtcataatttggatttagggtccgggttcaagtttggggtccgggtctgggttcgatccgagtttagggtccaaatctgggctgaggtcagggtctaggttcgggttcgagtctaagtatagggtttgggttcaagtttattaccaagtttggggtatgggttcgggttcggggctaggtccgtgattcggggtccgagctaggttcgaagtctagggtttgaggtccaggtccaggtctgggttcgactcaggggtctaggtcccaatttgggtcaaagtttgagcttttggtctgagtttagggtccaagccccgattcgggtccagggtttatgtccgagtctggggcatgttccgattccaaggtctaagtctagttccgagcccgtgtccaggccgtagtcggggttagggtggagtttattgtaaataatttataattttatatagcctattggtacaagtcaatatcagacatagtattgtattaaataatactaatataatacaatataatccgatacaatacaatacatcatggtgtaccaaaagagtgttggaattaattttaccaggnnnnnnnnnnnnnnnnnnnnnnnnnnnnnnnnnnnncctaaatatgaacttctaaaagatcggaagagcg

SEQ ID NO: 19489 - DNA, 3614 bp, Cannabis sativa
  modified_base (3556)..(3580): a, c, t, g, unknown or other
aacacagggtccaattggtaacttttgtaaaacatagggtccaaaatagtatttaccctaaaaataatcatatatattaaaaaaaacaaataaataaaaatatataccttggcagccattgataaggtaaggattgccttgataaccgtgtgagcaattacatctatacccaactccattagtagaattcaagcaaaaactattactatctctacaaccatattcattattatcatctttttgtaattgagcttcttcacaactcaaattcccaatagcccaatcaagaatcaaaggaacactttctctcttctgaagatcctttaaatcaagagaagagaattcataagcatcatcttcaaccacaaaagaataatcacaagggttaaaatcaaacacttccttgtgatcattcaaacttcctaatgaaacagcaaaatctatcacatcttctggtatgctcatttggcaacaccccacacccgaacacgacccgtttactacgtcgtttatttgattacacatggatatgcatcccgccgagtagtttcgcccctccaaacccccgataaccgccagcgaatcgcaccccaccactgccaatttatttcgtctataggtaacaaaataaaataaaataaatatggccagcaatattatttagttaataatttattaatttaattaatactaaaataatttattttttttacctggcagagagtggaaaattggagtttgtagtcatagtacgagtaatttcgctactattactcgtattattcccgaaactgtcgtaacagtttcgggcaattgggccttcaactcggagttcaccatttattattgaaatatcaagaatagaaacgttactttttgaaaagtagagtttgggagaatcaattttgctattagtgtcgttacaagcgacgagaaacgactcgtcgtggtaacaacccggtcctgtcccgaaagggaagggaattttcaccgagccacaacggtctaggcaggtggagccattagtagtagtagtagtactgggctgagaatatgttggttttgtggctaaaattagaagaagaattgaaatcagacaaggcagtaaatggctggctttcatggtttattgattatctctttgctatattcctgtttggagtacgtagatatgatcaaatggtatgtatatatatgtgtgtccaaatttgaggactgtagattgagtctagtattctatgctagtttaaaataatattattggacgtgctctaattagttgacctttgaccttgatggcaattactagagaaagtacgtaagaagaatatataaatatatatatatatgtaacaaaagctaacaataattataaattcggtataataattaaccacgttttgtaattattcgactcatgcattcaggtctgtacaatatattaattaattaaattaaaagctaatatttgaaagagtgagtggggacttggtcagtggaggctagccgtggcctgtgggctaattgtcattatcaccacaaacaaaaaaatatagtgcaaaaaataaaataatattgtgagaagctctttctcagaactttagttaaggagtaatattgagactaagggagcaccttcctacaaccaagtatagcaattgatcaaacaaacaaggtgtcattttcaaaagttaccagttagctagaattttcttttgttacaaattagacccgaatttaattggattttttttttttgttttttttttaatgtgaaaagagtaatattcacagtaagctatatttataaccaatttaactatagaacaaactaatatatattcgaaaatatcttacagaagaggacaattaaacgccatcatgataagttctggtacgtagaagtagtattgttgcaacccgcttcccaatcggtctcaccagtaggactcttaatgtcacttcagctacagctggatcgactcaacaggtagctatggctttcaacggagaataaatcacatcggttgctttctatagtaggttatttgtctgtgattgttcgaaataggcagtcacgggctgattcgaaaattgtaaattttatattgcttatacacgaacccagttgatattacataatttgattttagaagtctttcttgtgcctttatttttgtcaaagaaactcattgatgtgaagttatatgaattatttggtgaaagaattgtagaagatgatgaaggtttctaagaagaagaaagaaagaaaaaaaaaaatactaaaacagagatttaataattcattatacatgtttgtactttcctgagctcccgttttaaactttatttgttactctctttctatacacatgtttgggagaaatatattatccattttttttttctcaactagaggaaaactttaagatgtgcaacttccatttcagactggactgatcaatgtcaagaaaacttgacattattttacaaatttgcagtctctctgtttccatctatttggatgattaaaatttaattgactaacattttggaaatacattattgatgatatggtttttctatttcacatcaatgttagtttctactacccttgttctttgggataatacttattgtataacatccatgtaatcatcaattaattaactttgatttttctctcaatttcacacgtctttctagccatagaacaattattgcctcctttaatgtatttgtaatgatcttatgtgcacttattttttggcgcatcagacttatatttatgcacttatcatgcataaaaagtaattatatatgtttgtttatttagcaatgtctgagattagccttggtgttggatttagattgttgggagaaaatctctgcgtactgaagtaccagggagaacaagccaattaatatttttattttgcaattagttccagagtttaaatgaaatatgcttaatatataagtgatttttttgttcacaactttatgtttattttttaagtaatttgtgtcttgcttattactctttgtatgtgttaaaaattttcttttttactctcacattgcatttacagatgatgcatctattagcaaaggaattaagaactaaagcctacaaaacatgacaaaaattggtattatccggatcaaagaacgcaactatgtcatctaagctcatcaatctaatatggtggtcaagatgtctattgtaatccccaaagcacaccaagctcgaggcttagcattttctatctattcggttaattaaatacgatagattataaaatattaggaagagtcgtcaaagctacacaaaagaattcaaagataatttattttcataatttatattatatatcaattaatattactttactatcaattaatcttgttgctcttctttctttcctcgcgggcaggaagcacctctaactgcaattaatgaatgattttactgtgtatataaataaatgacaatccaactacttgcagatttagaaaaaacaaagaatgtgaaatattagtgcatgtttggcannnnnnnnnnnnnnnnnnnnnnnnnttttaaaaacagaaaattgtttttaaaaacaatt

SEQ ID NO: 19490 - DNA, 6044 bp, Cannabis sativa
  modified_base (5825)..(5834): a, c, t, g, unknown or other
  modified_base (5905)..(5906): a, c, t, g, unknown or other
acatatattccgctgcacccaatggaagatttctccaacttttatgtgtttaattttccgatcctggtaaaataattccaacagtattatcctcttaagctatcacgacttgtgtcaataccacagaggcaatgagaccattctttacagttgtagaagatgattgaacacttttggatttaaatcaaatagactctactactttggtacatggttttgagttatagttctatagtcatcttctagaaagaatagtatttgtaataataaacactttcttgtcttgatgctatggatagcccacacctaatctctttagaattgccaacaaatatgcaaaccttagttagcaactgtaacttttcttaaggaattagggatagttgaatagctaaccataaacctaataattttcatcaatatatgattcttatattgtgagaaggtatgttggaatacaattcaaagaaaaactaaaagatctttgaacgacatatctaaatatttctccaccccaagatctttagagatttacctaactagttttagccatttctagaaactcatgaaatttctcaaaaattacaaatttcttgcataaggtaaatatctagagtaattgtctaagaatttaatgaaatacttgtaaccacccttggattacacatctatatgtccaaagacatataaatatacttctaagtcgttatttcgcacgtattctctttgccacaaaggatcttgtcaaaaacactttaagaaagataaagtgccatagataatgcttaatctttattggtcttttgatgtatatgattcttaggtctagttacagcaaacagttcgttgaatagtgtaaatggattcttagtctcagaatataaaacttgttttccttacattcaactaagtttggatgccttcatagaaatggatattaaaaattgtgaaaattagacttagtgttaaagtaaatgtaaatgagttactattctagtttggacccccactaaaatgttattacaagtcaatgtttaacttgcccttatatatctcatcgtcgctaaaagcattggtcaagaaatacatatgtgtttctaaaacaaaagagttggtcttaatatctgctatttttcctgctagataataaataaatctagtttctaatgccattgtcttttctacaacatacattcatttgtttttcaaagtacttctataatacttgtatttcattttagaaatttagcttactagcatacgcttaatggattttcagtagcattttaaatagaagattcaaattttatttactaaaaatagaggattgttatcatttctagatagattatctagactatgttcatatgtgccattcattttcttataccaagctaaggatagaattgccatctatttttatcatcttcattcatcaaaaaattaagaacatgtgaataataatctgatgacaatttatcaagtaatagatcagcttggacaaagttgtctagaacttattcttttcataagaaagtagagcaatagtatttgttcataaaccttctaatccaatcatgtataattttagcaaattcttaatgaaaaaaaaatctaaagaggaaaagatcagagttttaaatatttttagttaaatgatatacattgtcccgatagatgagagttaaagatatcaccaaccaaatagagtagtaaactcttctaaaatttaaaccatttttgcaaccttttgtttgattaaaataagaatccaacaatgtcctcgtaagtgagagtcaaagttattctcattttatgagcttctaccattgtttcatatttgtaaacccaattctaagtattcaccataggggtgaactaccagaatatgaatctacaagatgtttaattgtctaatggatgaccatctattagggggatgtctagcaccttgaggtcccattaaaaaccatactcttgtttgatgtacaatggagatggaatttgatactacactataaatttattctatataaattcatacacattttttgcaaaaaaataaatatttaacaaataatggagacatgaaaaatataaaacaaacatatgtcaattattatccaaggttttgaactaagtgatatgtaatgtccaggtaggcgagagtaaaagatatcaccagttaaatagagttgtcagctcatctgaattggaaactattttatccaacctttcatttgaatcaaaatatgaatccaacaatgtctcggtaggcaagagtcacaattattcttattttatgagtgttatccttattttttcccacattatgtggcatgtccacaatccaaataggtaagattaatgccatgtcgagtacagcttgtcagcaagaaggccaagtcaccatgcacaacgtaccacttgatgagaactataaatacttaagcaggacaaaaagacagtgaactagccaaccaaggggatttggctagaccacccctggctgaccctatttccaacataggctggccaacctccaacaaaggggaggttagccagcctctcttctagcaagcactttttgttcctttgcagctttcatcctggacaacacttccaattacgaaatgggcttcaacaacccacaaaaatatgtgataaacttcagttacttacctatgctttgggactaattatcatgtttcttacttattaatttagtgagtaacaaataggtgatatatcctcattttaagggctatcaacctataatctcttgtaagctcttctacataaagagcactacactaagcctaaagtcgttatgctttgatgttctgaagtcttaagttctgagttctaagtgctatgttcaaacactaaaagccctagctcaccctctcttctacacaccattagcaatgtagaagagactaagtgtccctcatcttatacacttgagatttccctcttgattcttacaattgtaatcttaagagagccactccagaatcgacaacacttgtaatttgagttgtattctctctaatataaatacaaacaaaaggaaagtaggtcattatccgctatcaaatgggggcgaacctctataaaaatattgtatcccttatatttgcttgatctagttatttacacaggttgatttcaatcataaatacgattccactgtcggtttgccaaatttgaggtaaacaattttgtgctttcactgagaacattgtctattgatctgatctatcaccatggctattacaaggggaacttcagttaaaacctctacctcatcgggtcttcctcaagacactatgactgctaatcatgatgttcgtgttccacccacaactacaatttccacgaccccaatggatatcgccaactctgccaactaagcaggcccaagaaactcgaccaacataactagtcatgttaaccttaccaaccctactgaccataatgaccagcctctgatgcccagggtagatccaccatcagaacctcgtactgagggttaagctaatgtgaagcagcccccacacaccacaactaactcttgtccccgctattatgctggggaaatggggcaaggaattggcaaactagccattggtgagcctcatgtgtatttgggagaagactttgaattggccatacatagagaggatgtatgccaatttggcaaaattgaagaaccacgtgttgttggatgcgatgcattcacacaatagagacgtgaatttttgagatggattgatgactaggagtacatcctctgatatcatcaggtagggctagactgtcgtaatagagaagctaatgacctgataaggcaattcaatgaaagaactgccaagggaggtcaagatctgatcagaaatactctccaagggagactagtcgaaagaacgggcaagatctacaagtaaatagtccaactaggctcttcaagaacaagggcagacttcctccttcctgaaggtggacaggtgctgccacataaatattgtgatgggagttgctagtctttggaaacaaatgtcatggggggtcggcaagggacctctgcctcaacaacaccccccaattggccaacctttggccgagcagcccctaagtggtgcacctttggacgataaacaaaaagagattcctgtccaaaacattttggagtaagtcattctaaggcctatctttaatgcctaggtctcgaaattggtggaaacacctaagacaacatcaactagagaaatgagaacaatcactttagatagttagatctagtaaaccccaacaattggtgtgatctacccctgttaacatacaggctgcatgagctaatgaggggagaacgagtggtaagacattcccaacatagagctgaccggccatgaacaactgcccagggtagagctcgccgaccattgtcagtggcctaacccaaggctggctagcaagagccaaatgctaagcctagggctgactggccttgaacataccctttcctagggtatggttggccagatccttaccaatccaaggttgtagcccaaacatgaaagtccactcaaataggctcctattgcatcaaatcctcatgtgcaagcacacttggatcaaataagagatatgataaagggcttagctgccaaaaatcatcagacctggaactaggtaggtcaagaggctctccattcttggcatgaatcaatgccttccccttgctgaagttgaagatggtggtatggaaattgtatactaaatgagaagataatctagcacacatcaagtactttgagatgtagaaagatctctagaaagttattgggctttgtgatgctggtgacatctaagtcaaggcattgtatataatagagagtatatatgaaaatcacatgtttaacgagatttttggaaaaataattataaataattaaaattgaataaataaacaattaaaagagaagagcaagaaagacacaaatagtttttaggtgattggggcgttaacaagccttagtccacgagttagtgttattatgtacctttgagcccgaaaataccttgagaatagaatgtgcataagttctcgagttttcttgagaaagtgttgctagggaattcaatcctaaatctgtaggattcattggatatttatattatttagagaattaaacctagtttcccttttccctctattagggagtttaaattgaattacataatttgggttttctcgtgaagtctatcccgcgaaggagaagatatgttgactaggcaaattggatacggctaaaatagtcaaaaccatgtcctataattgtgggcaattcattgtaaattaattgcttgatctctattttaggaatttttcctttttagcttgatgcaatcttctcttaagatttgggaagtagttatttccttatctatgtaaaggaataaaaagagaaactagactggtcttataggaacatgttgtctaactattccagcatcgcagtactgggcctacttccgaatacgagctgtcactggtagaaggtcatctgatcacgtagctaaggtacgttcctggaaggtcttatctaaatagggtgttgcccactttgtcttctttggggacccattggtgggcgtttggtcatgacttggattctacgtgtcccttcttggaaacacaaataatatttattcccgaatctttcaaaatgttgtgtatggttgaaccttgcattattccattagtgaggacatgtggaggataagaagtaatgtgattgttggggattattttaccaggnnnnnnnnnnactaacaagtatgttgtttaacaccctaaatatgaattctctaaaacaatggaatttaaacacatataaanntaagaaaaccttacattgattacgtggaataatatgtctcgttcaactcagataactaacccttgtttctttctgttgcagagtattatcaagatctaagcccgattctccttcaagtgttggattcttcatagtctt

SEQ ID NO: 19491 - DNA, 3319 bp, Cannabis sativa
aaccaagaatgttaaaccaagaactgccgttagataggcacttttaatgtataaagatatatcaagttaataaatatttaccttataagagtaatctggcaaccaattacaacaaaaatccaaccattatgcacacataacaacataacgataaaaaaatggaaaaatccaaaaaaaaatttacaaaaacaaaaataaaacaatgtaaattaatgaaatgaataaaaattatatttataccttaatggacgttgagattcaacgttttctgcaccataatcggtggtcggagttataccaccacccttttttaataggttcgtttacagtgatagagggaaaaaaataaactttttttgtgtatagatttaggcattaaaaataaaagattttaaaagaaaaaaggagtaaattgtacaataatgagtgaaatatgagagttttagaaggtggcttgcgagggtttcgtgtgtttttagcttctgctatggggggtggctgattatcgtggtgaagaagaagacgaagtgaggaagatgaagtctgagggttgtatttatataccttatggcatcggttattaggaaataaccgacgacataggtgtacacgtttcaataaaatgtgcacctatagcatcagttatttcctaataactgatgccataagtgtaataaataatgttgaatagttttcaatccccaatcaactttaaatggtatagttaatttctatacctacatttttttactaaaaatactgtctctaaatgtcaatttcgaaccaggcgggtattatacatttagcttcccttattataaaatgagttgaaaaaaaatagtttctaaaggcctatattgtagtagtgaagccgtcgagaattcttttcttcgacctttctctaccgttacatattctccttagtattcacgatacttgtataggcgacgattttatagtccatcgggaagtctttatccgacgatgtaaaatcgtcaaaaattctatatagtgcaaattaatagaaatgataattgataagaaaatgcaaacctaattgtctcaaaaaaaaataacttaccgaaaatggagattaataaaaataattttcaataaataaagttaaattagaaataagaaaaaaaagtaaaaagaatagaaaatctagtccggattggaatttttgtgtcgaaaacttatagattaatgaatatatattatgatgtaagtagtgaaaagtatatatttttaaataaatatatataattgggtacattagatatgtatagatataataaatgtggagagatgtttttttaataacccaacgaccagtctgtctaacgtagctgcatctactcatcatctcaagtcactaactagtcaaaacgagtacattgttattgatactacaattaaccatttacaaaagacaaaaaagaaaaaagaaaaagaaacgatcttagttatttcattaattctccaccaaaaccaaaactacttttaaatataactacaatttaaaccttcggtcgtttgtacatacaaatatggcaaaaaaaaaagtgtagatacatgtctttagagaaagtttaatcaaagtatagagagagattcatcattcatatcaagtgttttgcaaaataattagtgtgaatagttaatattattgctaatggtgtcctccccgcagactattggagtaggagaagagagagagctttgttcatagtaaagttagtaaggaaatgtgttgtttgtgctttgtgggatcagatttctgggcttttagacatcttttattaattagtttctaactgctatgaaaattcagtattagaagttagcacttacattaatcaatttttatgtatttttctgttattatgtttatgttaacaacaacacctgaaaatgatgccacaaccattatgtatttaatttttttagtaacgtttttttaaggtgaaactttcaaacttcatttttttttacctttttataaattttcacaattaagtgtcaacgtgaatatttaacctgaatatttatcggcacacaattttatacatggcagatttcaattcgttaacattatttttattattcaaatattgtaaatataatttaaaataaaaataagtaattaaaaaattaaataaaattatgtaaaaaaatttcttttttttttttcttattcttttcttctttcgtttttgttcgttccttcttcctctattatcaccactgacactaccaccactactacaacacccaccactctaccaaatatatatatgtcagaccagtaaaaattaaatacacaataaccttaaaccacatccattaaaaatcttgatctgagaaatcaaatcaccaccacctccaccaccagtccactacacccaccactgcaccaaaattaaaaaaataataataaattagatatagacatcaaatacaccatatgtcaaatccttgatctaaaaaaatcaaataccaacataaaatttccaaaaaaaaaaaaaaaaccaaaataaaaaacaccatagtgcatcagggagggagcccgagagagatctgaaagtaaaagagagagagagaagagagagagagagagattgagagcacgaaggagagagaatgcgagagagagattaggagcacattggagaaagagtgaaaccaagaagcaaatttgagatcgaataatcagtgaaagtttacgatgttcgaaattattttattaagatcttgatttactaacaagtatgttgattataattttataatctaacaccctaaataagaatatcctaatacgatgaaataaacagtttagaaagccttacattgatggcaatggaatgataatgactcattccgttcatagcccttgattcttttctgtagcagagcataatcaagatctgaacctggtcttctctcattcagtttggttaaccacaatcctccacattatgactgagtacttgacttgctatgagtgggcaatgtactctatcactaaaggcacgaaatcaatgaagaacaaaaggagatgattcgaaatcattatggaaggaggctctcaattgttttagttgtctgacaaagaatgaaaattagataattaagttggatgagaatgagagcatcttattccttttatagtatttttttttctagggtttagaatttaattatacggattaaaaaaagataaaagaaatggctgaaatccactttagtggctggccacacatgtgggcctcactagttacaactttgccactttatttcataattcattttttct

SEQ ID NO: 19492 - DNA, 2713 bp, Cannabis sativa
  modified_base (1123)..(1133): a, c, t, g, unknown or other
atggtagacatatctactataccttttgtaatgaccatgaggtctaacttcaattttattcatttttcaaaaaaaaaaaaagacttaatgatgatccaatgcgaatcctagaaaagctatcgagtttgagagtcctttcctttcgttataacagctttgtcgggaatgagatgatgtgctcaaaaggaggtttccctcaacttgaatctctgattattagacatctaccaaacttagaagagtggaaggggggggaaggggccttatctagtcttctctttttaagcgttcagtattgtttaaaattgagaaaattgactgatggattgagatacattactatgcttgaggaaatgaagattgtctatatgtcaagagaattcaaagaaagggtggaggaaggaggagaggatttctacaaagtccgccacatcccatctcgtctatttctcaaatgtgaccattaaattcaggtaacatatttatgtggtttacaagtttagaactaatctattccattccattttgatggtaattttgtttctcattctcattttcacaagggtaatataatagatcgatgaactcgagcaagagaaggtgaggagttagagcaatttcggagaacagagagttagtagtgtacaagtaataactcaaattctcttctcttttaaatatattgcaatacccaaattggcaaatatcatattgaaccatatatgcagcaattattgttgtttttatttcttgtttacaacttttcatttccattccattttatttttcttagaaactctctgttttatactctcttgatttaagggattggcagaattattgtcaaaacttggtcaactatattaaacattattacctagaatttactgttattggcaatgtggttataagtgatttatgtaccagtaacactaacagaaataactaacaatcctaatctgaaccgaccaactaaaactaatccaacttactcatataattttcagcctcattttattttcaatgagaggcttaataacataactaaggtggcgtttggttaggaggaatgaaaacatagaaatgagaatgagaatgggaatggaatggaataaaatttaannnnnnnnnnnaaaattgataaaaaaattattaaatattttctcatcatgcattggaatggtatttccttccattttaaaatgcaattgttattccaccaaaatggtggaaaaaccattctattagaatgatattccaacactttaatatgcaaccaaacaaaagaatggaatagagattgtttcctttcttttctattccatttcattacctccaaccaaatgccacctaagtctctaggtgagaaaacctatatatttttagttctaagaccagtatggtctaggagtggactcgcttcaattaaattgtttctcattattaaaaaaaaaaataacaaacataaagtacgagcttgcaatagtaattaaactttttgatacttaatgagaggcagagacggacacactaatagtagtgtgggagctatagtcccagtaaaacaaaaattagtgttaaaaaaattaaatatcttttctttaattaaataattatacaataaaaattcttacaaaataattataatttttatgtaaaataaatataaatatttttataacaattaagcccagacatatcaaaaatcttaagtcctgccactgaaatcaaatgtgatataatatgatatttgtatgtaagggtggtaatgctgataatacaagttggattagtcatatctaatgccaaaattttggcttaattaatgttatgtgccctcttttctgagtggaaaagaaagttctttagaaatttattcatcccattctcctttttaataatactatgaagacatgttgtagttcttgagggcctctttcgatatcaagagctataacttcaaactctggccctcctttgttttctggttttcaatccagagatccttaggcctaggccaaactctcttcaacaactaacttattcctcttctcttctttgctttataatttatgcctcttgggcattggaattatttactgcattatgatatgatatgatattgtatgtatgggtggtgttaatactattaacacaagttggatttttttttttttttgaagaaagtaatcgaactttattaaacttcaaattctgcaaccaaaaaaggaagcatatacgatcagggtaagaaatagcaactttagcaattgcatgagctactaaatttgttgaccgtttaacaaaagaaatagtaacacctcttaacctcataagcaagttttgacactctttaattacatcaccaaagaaagagatcatatgaattggactacgtattgcttgtaccaccaccaaacaatcagtttctaaaatcacattcagccattgcttatctttaatccagctaagagcctctcgaactccaattgcttcagctaactccggtcgaatgttgccatggcacagccgagacactccttctagcatatagccatgttcatcccttgccacgatcccataaccataatcttgactgcttccaaaaattgatgcatccacattaaccttgatttcattgacattaggtgcacaccatcggtctaaaccatccccagccagcaaacctgtctgtgatgtctccaaataagga

SEQ ID NO: 19493 - DNA, 3099 bp, Cannabis sativa
cctaaatccactttcacataatcacataattagcattcaaatacagataaacatgtagagctcagaacgagctttccaacgatatatggaacacccaaaacggagtctggaataaaaaattatgcacgaaataagatttaacacacaaactgcccaaaaacctcaaggtgggtcgcgtcacaccccaagtgagccgcgacaccttagttgaaaaacccaggatttcgaagggctcgtcacggcacctgggttccaaatccagaaaaccccatttcagccatcgaattataggtccaaaatacaccaaaactcctaaaaagcatatacaaactcaaactcataattccctgattacaactatcacaccaaagaattaacaacacataattcaagctcttttcaacaccaatatatgcatttaaggtcaaaacaccaacaatcaaaaataagctccaaacttgagctaaaattaacataattcccccaaccaaaagcttgaacaccaaaaccaaaaaactcaagcttgaagtctctaaaatctcctccaaatatatcaaaagcaattcacactaatttaccaacacaatcatgcatagaacaccaacattaaaccaattctcacacatatgcattcatgagtataatcaaatagcaaaacatgcattttcaacttcaaataacagaaataaaattcagctaagaaatcttaggagcttatcacaaactccaagctcctaacgccaaaaattaactccaaattcacctccaacttcaagtaaaactcataaaatcaagaactttgagtgagatgagtaaaagagagaaagggggagtcggttaggggctgaagatcagaataatgaattttacattttacaaaatcctttttgttgaaaataaatcaaatggtcaaatgaccaaaatgcctctagggccaaatacactacatatgcatgcaatcatgggcaaaattgtcatttcatcacataccacacttaaaataaatttcagattattcaattatttataaaatgccaaaataaaatcccaaaaatgtatttcgggccccgaacccagtttgacccaaaatacccaattgtgactataccacgcgcgacttgtcagaaaatacctgcagaagaaaaacacaaatatactatataataatacagtccataatcacgctataacattgaaattacagttttacccttctcggtcaaaattacggaaatacccctagctcaccaatggggtcttaacatatcatttatcagtataattcatatatactaaattatataataatataattccacattaatacacattaaactagttaggatttgctaattcgatttgttaatctttggatattacacaacatgaagaccacatgagcataacatgcagttgagctaacgacgttaagcaaagcaaacgtacatgattttttcttacattttgaaattctgtattttaatattactaactaggaaactaagccgcgcttcgcgcggtgttgccaaacttttataatttttatgtatatatatcgtatctatataaaggggtgatccgaactgaataagggaccgaaaaacactctttcaaaagtggactaagtagaccaagcactgactgaaccaatataattcgttgtctcatttatatttatactgttttatttgcatactcgtacatatgtctttgagcattcaccactttaggtgaatactcacaattctataaaaaggtattcaatagcctttgaatacttaatttttgatgttgtctaaattcttccgacaacattaccaagagaagattatttttttctccaacgctattttctttgacattctcggtacggacatgactgcgtatgacaactaacatcttcaaatggtcttgcttgtacgaacaatcattgcctcatgaattggtcctcactcaaatgacttaaaatcaatattattatattttaccttattagagtgcttagttgatcttagaaaatcaactaagttcgggtatgcccatacctagttctgtcttataaatagaatattatctcttcatgcaaaaagttagaaattaaattcttgagaaaagaactaagaatagagttcttgaactaggacataatacttgtaagaaatactttaaagcttttctaatttaataatatggacttgtggactaatatttattcacactcaaactacgtaaaaaatttagtttcttcttcttaatttgcttttttttttaagcttatttattttataatcagtttttgaaaatcttgataaatgtgattgaaaatatggttagttcaatacttgtaaactatttttagattttttttttcaaataaaatttgcgattagtagagaattttaaagttaacttgttttaatttgaaaactagtgtatctatcttaattattatttcggtttgaattgatgacatatctacctaataatatttccttgcataacatgcatgaaaatcaagagaattttatgaattagaattgatgataaacttcttatgaacaccaaaattctttcatattataatatgaaaaaggaaagagttagagtctacatcacaaaacactaggtatgatagggtccaccatccaaaacgagctcatcgcaatctgataaagttgttacgaatgaatctccaccgttcatctaaatcaacggctcacgttccgcgtgtctacttatgtcatccggaatccacaagacaccgcgttctttctctctcgctcctctctttctctctcttctcccactctgctcggcgctgatgatggtcatggtggagcaaccctgataagccacccactcaacgacgttgcctcggtcctactctgcaggttaccactttcttcttcttcttccagatttccaattgtgattgcttaaaaaccctagaattgtcaaatcaaaccttagctgcttatgctgttctgatagagagtaaaaaattctacgttgactgttcaaacttaatatgaattccctgttgagcttttgtactagaaagtttagtgtatgtaggtttatttcttttttttttttttt

SEQ ID NO: 19494 - DNA, 1656 bp, Cannabis sativa
tatataaatattaattagaccaataataataatagtattaagtggtgcctaacaccttttaacatttttattattaattataaattacaagagcattgctattaggcatcagtggtgtctaacttttcgacatgtcacgttgcgattggctagcggtacttcctaaaagctattatattagattatatgagacccgatatttaattgaaccaatagcgatactgacacatagaagggtgctaggcaccacttgtgccctttagcatttctcaaattataatggatgcccctggagaaagtctcggcaggtaaacatcacatttattaattaaggaacttgtgttccatgcaacgcgcgaagaagaagatgcgcaacgcgaacagtatctatcatatcccaaaaagagatgagattattaattaacgtgaaatgtcatcatatgccaaaaatgggtgagtattaattaacgtgaaatgttaatatcatactatataggccatctcagtaaatggtccttatctacattattgtccattgccgaaccatgtagattacagagagcatgataaattaaataatagtacaacacccacataataaaagattgtagagttcgatattatgcttccatacctacctgtactgtacgatacccagcctgtaatcatatagtttttttttttgtttgaaatgagtttcattcataaaagagaaacttacataggagagggtaagtcagctaaaacagctgaactaaccacagagggagttatcctcttccaaatagcagaagctttagactctaaagcttttttagctaataaatgagcaacaacattggtttcacggacagagaaagtaaaaacattacatccagaagaaagagacaacagattaatatcctttagagtggaatcaaaatctgagcagccaatgttgtaatcattaaccaacttgattgcctgaatgcaatctgactcaagcaaactttcggggcagccttcctcctgaaccaaactaagacccctgctaatggccagcaactcggcaccgagcggggaggaaaggatagggaggtaagtctgagacgcaggtatgatagttccggaggagtcacggatcgctacacctaaaccaactccaaataagtttggggaggtgctagcatcaacattgattttcaaacaattccttggaggaggggaccaactcacctttctatcgtgtctacatggtttagagctttgggcagcggtgttgaagtcagttaagtaatctctgcaccaattaacaagaggaattggactcggggtgggctctccgtgcagtgaagcaaataattaaggtgtcgttaagttggaagtaataaactgaaatgaaataaaatagaaaggaaacaatctttttgagagagaaaatacttcttttttttttttgaataactcagaaattttattaattaataaatttgttcaaaacaatagaacgcaatttagaggaacaatcctccaattgaagcatacaacctgtagagaaacaagagtcccttgcccagtgtcacaggctcacgttttcaagcagcggaataccggtgcagcaccttgacttctctaggccaacgtcagccttccaaccatccgagtaacaatgggctc

SEQ ID NO: 19495 - DNA, 6029 bp, Cannabis sativa
aaattttaaattttccaatccacaaaataaaaaaaaaaaaaacaaacaaaataattaaacttttgagaggatatatgttgagactttcacctcacaatatttatgtgaataaaatgtacaatttagtaactatgaagtatgatatgttatgataagtttactagaaactcaatgctcatctatcttcaaacatattaacataatttgagagctgaggcatgaggcatgaggcatgaggcatgaaaaataaattaaaatatacttgagtttgagttgtttcaaaaaagaagaaattgttatttcaaaaaaaaaaaaaattgtttatgataaaattattatttattctgtacagagcatttatatattctcatttaatgaagcacatataaataacttagtatattatatactatatctatctatgtcaactgaaaatgagatgtatatttattgtgaatcactcacttgaaaatgaggtcagttatatttgagttgttaccaaatactaactggtctgtttgtggttttttgtggatggaccagttttgaagtttgcaacacatgttatctctcctaactaagtctcattattgtttgttcttttgttagtactttgaccccacaccttcattcatttcacatttccatttttggatgagaatatcaattataataaatatatcactacacatatactaagagccaataagtctttttaaggaaattgtatcatcttctcatgaaattcttaatgaatcctttttgtttaataatattaagactatctaaaattaatattatattattatttttgagttattagcttgttcaccaaagtttttacaaaaaaatatcttgtttaattattgtgcattattttttttttctttagccatctttatatagtgaaatttcaaaacaaaacaaattttatgtacttattatcttcattaattacaataattaaataatattttttttacttttgtttttgaatgaatatttttaaattcctaatgaatcctttttttttaataatattaagactatctaaaattagttttatataattatttttgggttattgactagttgacaaaagtttttacaaaagatatcttgtctaattactgtgcattatttttttttgccatccttgcatagtgaaatttcgaaacaaaacaaattttatatacttattatcctcattaattacaatattaaataatatatatatttttttacttttatttttgaatgaacattttttcttacttctaattctttctcatcaattgttacatttaaagtttagttatctataatatttaagtgaattacttcatatattattttttaatattttttttaaatttacagtttgagttgtttcggtagtttctccgataatttctatgtgagttgctatatagattttggttgcgatttaggttgctccgttatttactataggagtttttgtgtagaattccgtaaaaataccaaaaaaaactgttttgaattgtaaaaatagaaaaaaaaaaataccactaatatttattataacaatttattattctcatcctttttttttttgaaaaagaaaaaaaataatatgttaaataatgctcatacattaatcttaaaaagtaattaatataaaattaatttttgcttaactaaattctatgtatcatgacaaaaaaaaaaagcaaaactaatttttcatattttatatttaattaggtgttcattaatatagtgagaattaatattacaaagaatcaaattataattaatgatctaatttattaataaaaaatatcctttaaattctatttatttatttatttttttaaggaaattggttttatttttaattaaagaaaagagtttatgttataaattgaatagacagaaaaaaaaaatggaaacaaaaacaattactggtgtacttactcgttttaagcaaactttaaattttaataacggtttagaagtttctcgtgtgggtatgaaaggggactgatgttgttatggcatgataatattttgatgtaactctcttgtctatgaatacaaattattttgacagttatatatcttttgataatggtccgcgatggtattttctactctttatggtttcccggaagcttcaaataaaaaacatacttgggaattaattaaaagattggatgatgtaactccacttgatccatggctgatcataggtgattttaatgagattttttcataagaacgcaaaagttatggccctcttcgaagtgataaccaaatgcaaggctttcgaactatcatcgatcgatgcttcttgactgaaatgactcatgatggacctgattttacttggacaaaaaataggaaaaatccaaatgcattatgtgaacgacttgactgatgctttactaacaatatttttaatgatactttggctctccctaaagtttcacacttggattactacggtttagaccacagagccattcttgcggatataatttttgactcaaactctaatcctgaacaccgacaatctcgatttcgtttagaaaagttatggctgaaggaacaagactgtgctgacattatttcaagttgctggacttatgattcattggacgatccttcaaatgctcttatcacttgtttgaatcgatgtgcaactgatcttcaatcttggcataatgggaagttcggtaattttaaaagaaacattattgctgctcaaaataatgtcaaaactctccatgctactgctacaccatgaattgatcattcacaaaaagttcaaacaacagaaactttattggatgaactccttgcgaatgaagaataatattggcaacaacgctctaaaactgattggttacaatcgagagatcagaacacaaaattctttcatgctaaagcttcaacttgtaatgccacaattaaaattcgttctcttcaagatgaaaatggttatacagtgacatcaaaggatggaatctcaaatattgtgtcttcatattttcaagatctattcactgcatcagaggaggattattgggctctttcccatgttttatcaaccatacctaccaccattactgctgaacataactcctttttactcaaggaattttcttcagtcgacgttcttgaagctttaaagagtatgggaggtgatagaagtcctggacccgatagaatgtccgctatgttatatcaacaaaactgggatattgtgggttctctagtaactaaggttgtgcttcatgtgttaaatgatggagaaatccaactgcatttaaaaaaatcttgataactttgattccaaaaatgaagaagcccaagacattgaaggatttttggccaataaatttgtgtaatgtcatttacaagatcattgttaagatgttggtacttcgattcaaggttattctaccacctgtcatttccgaaactcaaagtgctttcttaccaaaccggtttatcacggataatgttcttgtggggtttgagcttatctactctttgaagcataaacgaggtcggaaaggatatgctgcacttaaactggatatgagtaaagtatttgataggattgaatggtctttcattgcggcagtcatggggaaaatggggtttaatgttcggtggatctctcttataatgacttgccaacacacaacccagttttcttttctcataaatagggttgtgtcaagtttagtcactcctcaacgtggtctacgtcaaggtgatccattatccccatatttgttccttatctgtccagaaggtttatctcaattattgaggtttgaagaatccattggccgacttaaaggattatcagtatcttgtcacgccctagttgtcattcacttattcttcgcggatgatagtcttttattttatcaagcggatgatcggtcatgtggtgccttaaagcatactttggatatatatcataaggcttcaggacaacaactcaatacagataaatctgttatgtccttctccccgaataccacagaagcagcaaaacaatcctttcaatgaatcttaggtatacccatttgtgaatgccataaaaagtatttgggtctccctgcttattctgaacgagataagaaacatttattcaacaacattaaggatcgaatctagaagctttttcattcatggactgaaaagattttctccattggtggtaaggaagtattgttgaaagcgttcaatcaatacccttttatgctatgagctgtttcaagttaccatccaagttttgtaaggaaattgagacaatgatggccaatttctggtggggaacaacaactgataaaaagaaaattcattggaagaaatagatatacctttgcaagtccaaactagaagggggtataggatgtagggactttgttcattttaaccaagcacttttagcgaaacaagattgccttattttctaaaatcctcattctctccttagccccatcttgaagggtcgttattttcctaataacagctttattgatgctctaaaaggggggatgtcttcccttacttggcagggtatatgttggggtaaacagcttttaaagaaaggttgaaggttgaaggttggtgatggctctactataagatgtaattcagatcagtgggtgccaggtcaatcagtatttgtgcctttatactactcaaggaattcagcaaatatggtttcagattatatcacactagatatagaatgggatttatctaaactgcagaatgatttctatcctcctgatgtggataatattctcttaatccctctccttttcattcatgtaaagatgaatggttttggcactacagtgtagcagaattcatagtaaaatcagcttaccatctggcctgtttaagtgttgaagtttcaaaatcttcatcttcacaaacacaagaacaatggtggaaatcttattgtggtctaaatcttccttctaaagtgaaaatctttggttggagggccattcaaaattgcctccctattgctgcttcaatgtttaaaaagaaatttcttacctctgttgtgtgttgtttatgccaaaatgcttgggaatcagtggggcatgcaatgtttagctgcaaacatgcaagatcggtttggcttcattctggtttttttttaactgcgatctactactggtttgcaaccaaaggagtttttgtttcacctctcacaacttcataccaaatctgtgttggaaatgattttttgcattatgtggtttatttggtatgatcgaaacaatattcttcatggtaaatcacctcaaacatcaattgaaatccattctaaggcattagcttatcttcacaacttccaaactgctgctgctacaatcaactcagctgctagttatcaagctgctgatgcaagtaatagtgctgctagtgtaccatctctttctgttggtgtagcagatatttctacttcagctggtgtagtagacatacaaactgctactggtgcacaccgttcctctactggtgtggaagcttctcattcagatggtgttgcaaccccaattaagtggcaatctcctcctgtgcattgcctcaaaatgaacattgatgtagcttttgattcatcccaaaaaagatttggtttaggcataattattccagattcttctgggtgtgtcaaggctgcaaagtcaaagttagttcggggttgctataggcctcaagaaatggaagctcaggccatgtttcatggtctactttttgctgggagtttaaacctacaattggatttcattgaaacagattctctgcttcttactgatgcaattaacaatccaagacccattaagtcttattttcatgatttggttgtgaatgttaattatcatttatctaattttcctttagcttatgttcgtcatgttagacgagatgctaatcatgctgctcatggtttagcgaaacatgctttagtgcaggataatgattgtatttggcttgaggaatta

SEQ ID NO: 19496 - DNA, 3708 bp, Cannabis sativa
aaaaataaagagaacattttaaggaaacggcagttatgaatactaatcattaccaataattggctgtctttctcgagatgaggtgtgctgtagagacaaaaaaataccaacataggcacttttctcgagcaaacttttcgcaattatttttctttttcttgtgctctcttttcattttcctctttcttattgtctttcggcttcaggattctgttagctgacgctaattctcaaacactttcaaatgtttgcttttggttaatttattcccatttagaatctgaagtgtttccttagctgttgtaaaatcaggatgaagacatcaagaatgcaattgaagatgcagggtttgaggctgagattctacctgaacctagtgcagttggaacgaagccccaaggaacactagtagggcagttttccataggaggtatgacatgcgcagcttgtgtgagctctgttgaaggtattctaagagatattcctggtgtgaaaagggcggtggttgcattggcgacttcattaggggaagttgagtatgatccaactgcagtaagtaaagatgatatagtaaatgcgattgaagatgctggttttgaagcagcatttgtacagagcagtgagcaagataaaattatattgggggttgctggcatatacagtgaggtggatgtacagattttgggaggaatccttagcaatttgaaaggggtgaggcaatttcattttgacaggatttctagagaacttgaagtcctatttgatccagaagttgtcaattcaagatccttagttgatgggattgaagggggaagtattggcaagttcaaattacatgtagcgaacccttactcaagagtgacttctaaggatgtagaagaagcctcaaatatgtttcgactattcctttccagcctatttctcagtgtgagtatattttcacaagtagttggtgtaaaatcatgtagtatattttcctcatttctgactatttcttatgcatgttatccagattaagattggtttactgcttattgcttgagaatttataattacagtgattaatgtttttcctcttttttttcactcaagaagatttgaaagaactaatatctgacctgacactaatatcttaactaatatctgtttattgcatgtgatttctgactttttgtggtatcattaggacatccctctataactttccagttcttaatttttataaataattactgatatttgataaaatggcttcagattcctgtctttttcatacgggtgatttgtccacatataccactattttattccttattactttggcgatgtggacccttccaaatgggcgattggttaaagtgggcattggtgagtcttgtccaatttgttgtgggaaagcgcttctatattgctgcagccagagctttacgaaatggttcaacaaacatggatgtattggttgcattgggaacttcagcctcttatttctactctgttggtgcacttctatacggtgctgttactgggttctggtcccccacttattttgaaacaagttccatgctgataacgtttgtactcttgggaaagtatttggagtgtcttgcaaagggaaaaacatctgatgccatcaagaagttggtagaacttgcaccagcaacagcaatattgcttatcaaagatgataaaggtcagtgactgtctgttattttgctccctatccttccactaaaaattaatttctcagaaaatcacttccaatatttcaagttttttactaactattgaaatatgtttagtacaatttgttctctaccttttttcctttttaataatgacatcagaaatgaaaagcctagaacttctaaatagctaaatagttgtactgttaactagatggaagatgcattggagaaagagaaatagacgcactgctaattcagtctagtgacacattaaaagttcttcctggtgccaaagttcctgctgatggtgttgtcgtttggggttcaagttacataaatgagagcatggtcacgggtgaatctgtacctgttttgaaggatgtgagctcgtctgttattggaggtacaataaatcaacatggcgtccttcacataaaagctaccaaagtcggttcagatacagttttgaaccagattatcagtttagttgaaacagctcaaatgtcgaaagctcccattcagaaattcgctgattttgtaagtacttctacatttctcgctatgttttctagatgcggtgaaattttaattccatttgaaatgcatttacctgtacttatagcgatgttatttttgggtatatgtgtatatatttatattcagcaatttgcctcccactggacccttcaacctctgggagacatgaaaccttagcaaattatgttcccatgaggaatagaaccccagaccacgtgggagcaagtcatgaaccatatcaattgataaagatgttttaaaaggcattgtgaaataaattattattattattttcagcaattatcctctttgctttaacttataaggattattatgtatgttgattcatcatcatgtctcttcaatttatattaggaaagttatagtggaaactactagaattcttttccaatcagtttcatttgctgtgaacaaaactgaaaagtttgttgcacattactccttttgttcaagtgtgcattttcatggccacaggggtagctatttctctctactggaactatcttatggatatgattttatattatgaagaaaattaattaatttgatatttcttcggcaaatgattttttgctgctgtaagaagtaagtccaaagtaaaatcaatcatcatgataaacatcagtgagtcactagaaataatatagttttgtcgccacctttatgttttcttctcttctttctggtttttattcatatatcagcatccatttgttccaatcatccagaaattgtgttttctatgttgagggaaaagaaattaaaataactagatggtttctaatattctgtgcttttgtgaaatgcagattgcaagcatttttgttcccacagtaatcacattggcgctgttgacgttactgtgctggtaagatcaatcaaattcatcacactttagctactggatttaggtcatgtctaagatcttctgtccttatttaccgaagtactttgattttaacgcaggtattttgctggtactcttggggcttatccagaaagttggctcccagaaaacggaaattactttgtttttgcccttatgttttccatatcagttgtggtgattgcatgtccttgtgctcttgggttagcaacaccaactgctgtcatggttgcaactggagttggggctaataatggtgttctgataaaaggaggggatgctttagaaagagcacaaaaaataacgtatgtgatatttgataaaacaggtacccttacccaggggaaggcctcagttacaactgcaaaagtttttacaggaatggatcgtggagagtttcttaaattggtggcttctgcagaggtgatttcttatttcttgattaaatcagcagtttctcttccttttctttttgtagaacaaattaagttcacatttcgatctctataattacttatttacaagaaagctgtgcaatctattctcttgtccaattttttttgtctattctcaaaaagg

SEQ ID NO: 19497 - DNA, 8160 bp, Cannabis sativa
taatttatgataagtcataacaatatatgactttaataattattctttgtttctaaaaaatttaaagaaataatacatgtgttttataaaattaaaaaaaaaatattatggaacggaaaaaaaaaaagtgtcaccttaaaatagagtaaagaattaaaaaggatttgacaagtcaatgaccttcacaatcacaagtagcaagggaagatccccatttgtaatagcactttatgattcgaaacatttttgaactttcaataattaggtaacttttgtgatttaaatatatcaaaaaaaataattgggtaacttattattttgtcgaggagagaattgaagttggagaagtgtagaaaaactagatttttttttttttttattttgtgtgtatatataataaaaatatacatataaaacttattaaaaaaatgtataaataaaatttctagtataatattattagagcatttttaatggtaaattatgtttagtgatgtggatatattatttggcaaaatattaagatgttataccgttcgagaaaaaaagatgtcattttagaaatttgcataaatactatgttatagcattgatgctattactttttttaatgaaaaattgaagctaaaaaattattgtaattaaaaagtaggatatatattaaaaaataatatgtaaaattataattataatatttttaaagatggctatatattaaaatatttttagagtacaaatataaaaataatgtaaaaaagagataaaataaaatattatattttaagatgatgtataaattttaggaaatttacatggaatactaatttttgtcattttttttacaaaaataatgtcagacaatattttttatttttttactatatttttttatgagtttcatactgcaggatcctgtgttaagtttaaactggtgttctactggtattttttttagttgttctgttgttgttttgagttgttatgctttgtgttttactggtgttttaaaaaaatacagtatttttgtaaaaattaatcccaatttcagtattttttttgtaaattttcctaatttttttttttagcatttactctcttttaacagctttgttttcttccttgggaaattaatactccaaaaatactccatttattgattcttcgacagcagagagagctgtaatggagaaccaagacgaccacagaagcgttcgaattttatgccctaagcttcttctccataagaaccaacctggccttcaatggctgatcggatccccattcttccctcccctcacaatactatccaccgtcaaatgcatccactttgatcatcattcctcttccccggattacaatcaagaatcaggtatctccatctccttcacttcctcaatactcatgtggtaattgagcgtaaatttagtaatttatttgagcagacgatcttcgaaccttgctgctgaaaggatttgatatcgttggagctttgattgttaaaaattccgatatcgaaacgaatgctgccgaggctattgattctgctcgcaagctcagaaagcttctttatggcgttggagcattagacaagaaagaagctctgggagttgtggcagattcagacactggggaaattcactttttgacttcaaattcggaaaattcaatggggattgaacgtgttgattctgtggtctatgaggattatcctgagaagtatttttgggagagaggttgcttgctaagctgtgaacttcctattcagttgccactctactatcctgtacacaactcttctggtaagcttcattaaagttttttctattagttttgagaattttattgaatttgtgtttatttgaactttaaatttcgtagtttagtgctatatagcgagaatgggataaaacagagaattctcatgtgagattcttactgtgtcagttatttcattgttgctaatcgaaaggcctgctacacttatctaacttttttcctattggatgcgaatttatcaagctcaagttggatagtatttttctgtatgatataagaacatatatgtgttttatacaaccttcttacaaatgtaacgactgtataacggcctgagatcatcatttgagtttgaactatttaatttctggaagaagaagaaatgaacaacaagttagaggttctaagggctcttattgcttgaaaattttattgttaatgtttagctggagtggtttggacacagggacaaaagaaagccctttcaaacttagtggctcgagataaggatttgacccacctctatggatcgtatgaatgcaaaaggattggtgtagctaacttctcatcaggagtctggatttaacactgccatagaatgttgcttttcaattatgtcccagattattttattaagtcttagatttatgctgttcttaacattttatctacttatggtcacaattgcatttggggatagatcttgtgaagaggcacttgttagaggtaaaggatcatgcagtgcattaaatatgagttatcttatatgttccagatgtgaagaaggtattccagcgtgcaactgatggtgttatagccaaattaaaggacccaaagattgcatacattgtagaaacaacagcacaaatttccggtgaaatacctcaacctgtcattctgcgtggtggacagttggactttagtacagacatctcaaatttcagggaaggtgctcaagattctgatgcaaagttgataacatgttcgcagttctgtttgaataataaatctgactcttcagtgtattctactgaggtaagaatgttggattatcctttggtgtttggatggtacattgctttcatttactttaaaatgttttctgatgcaaaaattgatattaatttggtcttcaactttcatttatagatttttctgcttagaatgcagataaaatccaagtaagcattcttgttaacagctcagaaaatactccaacagtagctgcaccgcttgcacaatatgttccaggtatcaattagacaatgtcacaatttctttaattaatactgaaactaaaatatttactgtagatcaactgctgttaactcagtttaatggaagttagtgtgcgtttcagcaattgaagaaaccagacttttggttgtggaatttaagcttgaagtgctcagttatgcggccaaggatcttccacttgtgtctgcagtttcgaagttaatagttccagggttaattgatcaatttaattcaatgaaaaatactattttgcccgatctcctagccaagcatcctcaggtaggcaaatcttttctccacctcaaattcgtcaagtatgtgatagccattctatctgatagtaagaaacacacgtttgataataccatcattttactcctttttctttctgtcttccttgttttattgcctgttatattatgtgggcaacaaggtaaggtggaagtagttttaaaatttgtggggctttatattctactgagaaccaggttttgttctttttcagttgcattcttaccactttaatcctccggggcttcttcatccagtaaatgttatctatgaacttaactatggtgagacagaaatgaagcaaggtaagccgtggtaacttcttaagagtgttgaagttcacctctatacactaatatagataatttatccttacatattcacaaaccaaacagatactttgttcaaacttcaaagagggtttgtgtgtggtgtttttctcccttccaattattgagaaaattccagaaaggaatcttgtgctcattggttggccttgcatccatcaacatattgtgctgataggggtccttgtaaattcctttttcttttttttttgcactacagttgaagttaggaaagccctacacttgaggctgggtttacctcttgatcgtcccctcctaagagctgctaatgctctgaacttttttacatctcatggtctaaagagtgactcaataaagaaaggtaaccattcttttaaagtaggcaaacattcatcataaggctttaaaacatcctttattttttccatttgagaaaaattatttacatacttgtggtggtatcaggctctactttgctgaaggatgtacatattggaattccaagtagtggtggtaggtgacaacttttaacttcttgtactctgtttacactgttgtcatgaatgaaattttcattgcatcgtgttatccttatgcagtttcaggaggcactttatctcttgttcaaggttcttacgaatattaccattatatgcatgatggctttaatgattcggtaatggaagtctccttaaaagtttgcagtatctacatagttctgtcttaagaagtttagcattttaaaatgcaattgttaacaaaatcctctatttgtatttccatatttggaccctcaattattattgccaactcatataattttcactttctagggttggggttgcgcttatcgatctttacaaaccatcatttcatggttccgcctccaacactacacatctacagaagttccttcacataggtttatttcactaacccttattaaaagattgctttacaaagtttctgacttctcggcacatttagctatttgtaaattttgattatatatttactttgtagggtatggatgggtttaaaccattattttgataataaatttataggatcaagttttcaatttcagtttttattttcaaggaaacaaacaaaacccagttgccgtttgatcttaagaaaacatttcatctccagggaaatacagcaatcacttgttgatattggtgacaaagatcctaattttgtcgggtcacgtgaatggataggtgccattgagctgagttttgttttggacaaactgttgggtgtaagtattctcagagttttcctcttatttctgtcatatatcattatcattgcatattactatattgagagggctgcatatgaacaaagggctatattggccgatctttctaattaactgtattttttagtgtgttttctccattttcctagtattaatttgctaaatgttgtcatcaataaacgcgcagcccttcaccaaacattttttttctcccttcttgaacaggtcggttgcaaaatcataaatgtaagatctggagctgagctacctgagaaatgtcgggagctggctttgcactttgagaatcaaggaaccccaattatgattggtgagcaatttgagcttttcttgactattctagaccggagaaataaaaaattaacgaactaaaagagaacactcaaacacatgtatgcaggtggtggagtacttgcgtatacccttctaggggttgattacaatgaagttagcggtgattgtgcgtttcttatactcgatcctcactatacgggcaatgacgagcgcaagaaaatcataagtggggggtggtgtgggtggaaaaaggccgttgatagtaaggggaagaatttcttcttacatgataagttttataatcttttgctgccacaaaggcctaacatggtttgattttgaatctttgattagtctgtattagaccagttcagaatagagaaagtgactcctcttaacttcaacttgttcaaatgtaaaacagacctcattcattagtttatgtttgcagcaacaccaggataaaacagagtcaaagatgaaataaaataaaaggtttttactttttctcaaatatggaggtggagttttagttttatttttaacatggttatacttatattttcaaatatgagaagtcacatattttgacttttgattattattatttttttttttatcaattttcgaattaaaatgttctcaacttcagaattttctcacaaattttttaaacatctcctatttggagataatgtacatttccgttaattgatatagttctttttttcttaattcaaagatcagctttctttgctgatgaagattcaagaaattctaataccaaacatatagattgagtattgctagtgcctacagagtttttaatatctcacattattcatttttagtacgaaatttactttttttttaactactttatgttagaaagaatttttttaagttgagaacttaattaaaaaatttaatggtaaaatttacaatgtagccactaacatagatagttaattgcaacaaataagagtgtttgccgcaagcaattatcacttttgtaaatataaataatattccgtctttattattcagtctgtctatctaatccatttcccacactaatttaccgctcttcttcttcttcttcttctttttcgtcatcgaatctaatcgaatccactgaccactggtgtctccatagaacagacccaacaatcttcaacttcaacatgtctacaactgctttatgatatcaacacatagctcttcccaattccctgtttcattttttccccttaaacagccaattatggctctcacgtatcaacaatcacgattccactttccattaccctttatcatcactcgcagtctaaaccattattgcctcaaacctcacctctttctcatctccaaaacaactacactcttctctctcttcccaattcactcccttcctcctcctccgcactcttcttctcccattttcctcccatttctccaagaagaagaagaagaagaacaggaagtagaagaagaacaagtagtagaggaagagttagaccaagaagatgatgactcgaaagacccacttcgtagatttttcgagtctcgaacttcgacccaagaccctcaacgagagggcaaactctcccttcagaagaaccgtcgctcttcatggcaccttgctgctgataccgactttgtggacgaaactgaatctgggtctgtcgtggaagaactgcttgaagatgaaaatttgcaattggggtcggagagtttgtataccagtccattagctgagactgagaatgttgtgggagaaattttggaaattgcgaagactttgcctcaaaatttgacacttggggaagctttgggtggttttgagaaaagggtcggtgggaaagagtgtgtagaggtgttggggctgatgggtcaggagaggttgttcatggcttgcttgtatttctttgaatggatgggtttgcaggagccttcattggtgacttctcgggcttgttctgttttgtttcctttgctgggaagagctggtatgggtgataagttaatggttttctttaggaatttgccaaaggagaaggaattcaggaatgttcatgtttataattctgcaatttctggcctaatgtcttctaaaaggtatggcattttatcttcatatcttaatggttgcctcaatttggattataagataaatataagtgaaattgattatattagccttgtgaatggagctttttcttgtgaaagaactttagggactcacaaaggaagagtttttgtttctgtagacaatgcttgcatagtaggctgttacttgttgatgtttgttattgaaatttatgaacttaattttaggtataatgatgcatggaaggtgtatgaggaaatggaagccaacaatgtttgtccggatcatgtgacatgttcgataatgattaccatcatgagaaaaattggccgcagtgctaaagaagcgtgggacttctttgatcgaatgaacaggaaaggtgtcaaatggagtccagaaattttgggcgctcttgtgaaatcattctgtgatgagggtctcaagagtgaagctcttatcatccaaatcgaaatggcaaagaaaggagtttttccaaatgccattgtgtttaataccctaatggatgctttcgcgaaatctaatcgagttgaagaagctgaaggtctctttgctgagatgaaaacaaaagggattaagccgacgtctgcctcctttaacatacttatggatgcatatggtagacgaatgcagcctgatattgttgaaaagcttttggaagaaatgcaggagctgggtttggaaccaaatgccaaatcttatacatgtttgattagtgcttatgcaaggcagaagatgagtgacatggctgcagatgcctttttaaggatgaagaaagttggtatatctccaacttc

SEQ ID NO: 19498 - DNA, 5995 bp, Cannabis sativa
ggctcatgattctccatgttgatgctcacaccagctccatcaccaggcagaggactgatgcctgaaaggttttgagatattctagcttttatgaaaatatctgacagaaaatcacgaggaaaacgatcatttatgtcaataagaatatctccatgttcggaagcattaacaccagcaggagactctccttgtgcatcacctgtgaaagcaatttccttcctatcatgctctggtgaacttagagtagatctttccttgggtttatcaaatccttgatttgtcatttgatgattcagccctgatgcttccttatcatttgtggagtgatcttttacctggacctgataaggcttctgtaacttcgagtcaagcacctcctcagaaattttagagttcatcttattaatattttcaacaagattttgagggattttttttgatggatttgatggtaaagatgactgctcagcatgcctagcaacattatcctcctgaaatttactagttgaatttgatattggttgcgagtgatcagaaagtgcttgagttagtaaaaactgagaaccaaaagagtcattagattttgataaacggttcagttcagcttgctccctgggaattcgctcagatttaaagatcggctgaggaacaacaggtggttcaagggagctgttaaagtcaacaggatcagtctcagaaggaccatatccaggtacttgcagtccgctaggtgagtgaacttgactttcctgattataatttttcccttcatttacgatttcaggagataatgaagtttgtacctgttcctggagctttctattgctttttgtaccaattgaaggtggcccaatgtctgctgccgaattaggaaacgatggttcttcccttggcatgtaatgtggagatgaaccatcatgggtatgtgaagaaaagttgtgttcactttccatggccctacttgtatcagtttcagtaaccttttggaaagagctctctcttttcatcactgactcttttgacatagcttccttgtccaaagattgacttttttcaggttcactaatcttttgagctgagctaactccttttagcttcatctcatttgcagatacttcagaattatggagatggacgccaccatattgcttatcttcaggcaaagcaccatgttgacttccatgccctgggatgagtgttggacctgaactgtctccaactgttgcataattgggagggtgggagctataactgtattgcagaggcgtcatatttccatctactccagagaagctttccacgggttggaatgttgatggaggatgtaggccagcttctctcaaatgcatatcatgtccccagtaagcctgtctattagattcataagcactagttaaactaggaactgctgtatgagaagattgacgagtagatgaaggcaaatggattgtggaagccgcagtactagtaccagctaattcaggtgaaggatgctctctttcaacatttagaccaagtagctcatccaaattgttaccagaagtgcttcctaaagcaaatgagttctttcttgagcccaggtccataccatttacagcaactacatattggacctcagagtcaccttccatgcttcccagaccaagctgtacatcctccaaatcggcactagaaaacaagaatatacgaggtttcagtgatcccccatcatgcaggcattcctccatcatgttctgcaaatcttcatcgcaagaaacagaaaccaatgcatcaagatcttcaccaggaagctgatattttattgtatgtgtttggttgtatatggttaatattttctgcattagttcttgccaggaaatatccttgcttatccttataatacgtgtatcacctccaacatatctaagtcttccatcacttggacggggcaaaatttttccaccaaagctgcaaagaaacttcacctttgtggatgagctatgagatgctcctgaagagacataaccatgaagtccacggccaatatcactccgtgatgaggtttgtggtacggatcgtatagaaccatgataactcttctcttcatttacagaagatcctttcctctcaaaatcctgggtttgagatttctccatagaattaaccatagagatatcagatccactttcagaagctgcatggctagttcccagtatgccgtttagattcatataagcaggagcattgttaggatcaccaccataagcatttggaacatagtgttgcctggaatttactctttcacgcataaactcgaattcctccccagtctgaatggagaaattcagcccaggtctagttccaacagacacattgtaacccggtggccttaagttagtattaacattactggatggatcctgaaaatatctatcatttgtagacccatgtccatcatttcttggttccatattgctgtacctaacttgttcatagtttttttgttgatccatggccctttttccctgatttctatccatttttggctaaattcattcacatggagaaacatacaacctgtgacgtgtggatcatgatacatgagcatgtttcaaattgcaaacagctacaaacgtcacctgcatagaaccttcttcccatggaggttactcaatcctcaacagattaacctgttgatacaaggcacacacaaacttttataaagaatcatctcaataatcaataacggaattcaaagaatatgctaaagaaaaatgggcttttcagtttaagatgttaaagaaagactagcaaacgtatcaagcacaaaagttacaacaaagtattccccaccaaacccgaaaaatgcacagaaatagaatctcaaaatttgggttccaccctaaaatctcagaaactacaatcaaaattcagttgcccaccccgttagctttcatgaaccgggggggtctttttttttaaaaggaaaagattaactgcaatttcttaaaacagaaattaattctaatttttttattataaataaaaaaaataaaaactctaattgtattaaaatgtttggtgttgttcttagagaaactacaactattagaaatttacattcttatattgtagatagtgagactagaaaataaatatctttatcttccacaattgcactacaaattaccatatgcaaatacaaagtccacaaagtacataagctaatatttatcatccacaattgaactacaaattcacatatgccaataacaataagggcgttaatggaaaatgacagtatattatatatcatcttcaagcttcaggcatttttgaatcagtctgtacataacgatttataaaatatatataccaaaacagattaaaaagaatgggtttacaaatatatatcttcaatttattttattctttgaatcattttgttaaacatatctctttgtgagccaattcatcaaacatgtgtgttaaattagagaaactgataagaatttatagaaagactaaatccttgcaaatgtcaggacagtaacccaaaacgaaattaattcaaactcatatgaaactgcaaccttggaaaatatatataacatactactgttaaaaaagctattcaacaaaaatccagtaacaaaatttcatctttttaaaaaaaaaaatgaaaaagaataagataaacccacttaattgtttggtcaattagagagatctccaaagataataagaaaaacccagaagatctagagcgagaaaatggggattatatatcgatagacctaagaaattatatatctatagaaaatggggagatttgttgtgaagagagagaggagagagagagagagtaataatattattatgtattgaaaggaggaagaagaagaagacagcaactgaagatcgcaaaaactcaaaaaaaaaaaaaaaaaaaactgaaaccattgattaccgatgagtgggagctatcagaagaatggaattgaaagcttggatccgcatgtctgggcgttcagggatttcaatttcgagcgagaggagaagactgaagtgagaaaatcagagcactcagggatttttcctttttatttttttattttatattattattattattatttgttatgaagctaattctttaaagtttgaagaaaaaaaaatctttattttgagaatgaagaggtgtgaaaacccagagatgaaaaggaggatttttttattttttttgtttttatttgaatgaaaatgaggaagacttcaataataatattcttcttcaataatgaaaatgagaatgccaactgacttttctttattggttttctgaattattggttttcttaatttttttttgagtaaacataaaagaataatattaatatatattatttagggtagtaagatgaggagttctatttacactcaaaaaacaataagtaggcttcaatatttaaaaaaaaaaaaaatttaaaaatttacacctcaatacttattttaattttttttaatcatgtattttttttttattttttctaataaagttttatacaattttttttatgaataagaatcattgtattatttaaaaccaaatttacatccggccaattacaaaccaaacaattcaaacacattacatatcacacccactaattatttacacctttgagcaaaccaaactcttatctatattttgagccatttttgacattagagtaatttgtatatctcttttgattttctgtactttatacaccataatttcttattcaaaaatacatcatttcggactctccaaatgtggtataccaacgctgtcagggtagcatacatgatattttttttaataacactcaattttttttataaatccattatactagctgcagatagatttaatgaggttgtcgtccaatcaaaccaatttttgatcccctataagtatttcctgttgtactggcagtgaaagaataagtgagttatgctctcatttttcagctccacataatagatatgtttgatcaactaaaggatcaaacttttgaacttgatctctagttctaagtatttgcaacattaccaaccagagcactattctgtgttttggaatgctcaatctatcccaaattatcttacaccaatttacttgaaatgactgatcaaatagtaaatcatgaccaagtttgatatcatatctcaaagtagcaaatgaagagagatttatcatagttttaaaggcatttttgacaacgacaagtttttttcaatgccagctacaatcattcggtgtctagtactcccaccaatttgcatccttcaaatagactattaatccatttaacaacaaattgtcttttatggtggaaattacccagtcatatttccccatgttataatattccaatcaaggatcttccggaagtctaaccccctgcttttcttggtaagcaaacttgattccaagttaccaaaccagggccaatggtatctgccgaacgcttccaaagaaaggccatgcacatattttccacatcttttagcagctttttgggaggattgtgatctgggcccagtaagaatgaatgacaatcaatactgagttaattagtgtaactcttctcatgtatgacaagtttcttgagctttaaaatttgatccgggcaaccattttctctagtatttcattacattttgatgctgaaattctttgaaacatattggtatgccaagatacctaaatggaagttatgatcttacaaaacctaacatttcaagcaaacgggtaaccactgtctctgtcattccaccacaaaacacagttgttttttcttcatttgggaacaaagcaaatgaagaggaaaagagtttcaatcccttcaacgttaacaatatagtgttggatattattttatcaggatctagatttactaccatgtatgttgtttaacatcctgaacatgaatttctaaaacaatgaaatttaaacatatataaagtt

SEQ ID NO: 19499 - DNA, 3269 bp, Cannabis sativa
tggcttgaaggcgagccatcattttctccattctttgagataagttttcttgttgtgcttgctttttttgagcttcaagtaactcactggacactcaaagcaggtatgggtcctgttcatattagtatccatctttgtattagtcgtctttgatttctccatcatattcttcttccttttccttgtcgtgagggttctcgttgataaactgttccttacgtttagtgggctcatctattcctccaccagtttcagatgcttccccattcttcacatggcttggctgggcatgccctagagggagtggattaacatcgctcatggaaacattaggatttacgcgaggatttttgtctaccactattttacgtgtagccaccattgttgcaaacgtactgttgctttacacttcttccaattctcaatgaaaacaccaaaatatttatcgagatttttgaaaaataattaaataagagctttaggaaattaaataaagattaagtaaataagatgaagaattttaacgtggttaggcgttaattatccttagtccacgagtcattgtattagccttttaggctttgaagcatgttacaaatgagctttacaatatggagccttaacccttgctctaagatagtttctctaggtatttcttgtagaagaagagagcttataataaaaccaatccctttgcatgaagagacagtgaggtttatataaactggagttcgagtctgggaatacccgtgactcatccatgttttttgtaaaagtcgacccactattagggcaaaatacacaatatacatgactatgaaacccactaagaatgttaggctcatgggacgatggttctgtactgatgaggagaccgtttggtataaggcacgtgttgcacggaggtcacacctggcaaaataaggtgtcagtggagctgtcggacaaaaatgggtattagtggtgcacgcactaccatggtctgacgcaagggataatatctgatcttatgtcagagacgtggacacatcgttctaaggtagacatttgacgttcacctcccgatagtatccaatactcttcctacgatagacatccagctcccgatctgtggtaggcttccaagtgtcatcctttgcgccctgcatccagatatgtctttatctttattaagaggccttcaatcctttcgtgtcctgaaaggctaggcgtcttcagggcctcaaaagaaggttatgtatttgaggcagagcccttaatccttgggggatttgggcccattccaagtttgacttggcctttcccacacgagaaggtttaagcctagttttaaatggtgattatcttctgattacgccacgtgtctatctaccagaaatatggacaacacctagctatattaaatgtgtctatataacaaaaagtattatttttttcaaaactttacaattcaaatttaaactcactacacatatccctcttatcttttattttatattaaatatgtctatataatataaagtttttttttaatattataattcaaatttaaattcgtttcacatatttaaaaaaatatttttctattattatttttttactaaaaaaatatattattatttaataaaataaaaaaagtaaatgatattttaaaaataataaaaaatattacggtaattaaactaaaatcataaaaataattttatttattattattaaacaacataaaaaaaaaatacaactaataaatatacttcatcagaaacaaagttagtttttactaatcatcactttttcatatagtaaagtcacaaaatttgtaacggtaaacacaatagcaaccttgataaacgtaacaaaatttagttctacttacttaggtagttaaactgagtgacaaatttgaggtttgaaccaattattattgttgaaaattgaaaagaaaaagtaagtcattgaatcttgaaaaacgaaattaagaaaataaaataaaacccaatcgaaagtcgaaaaccacattactagtactaccaccaccaattgcttaaggccacaaggtgaggtggtgaggtgagccgtgagagaaggaaaaagtggaaaattagagaagtgaaagttgtccaggttagacaaaacaagtggggtcaattgggtagggcttataaccaaaaagggcagaatgagagtgaccccatgttgataatggcaccctctgccgacccaaaaacacaaggaataaagcgaaaacattcacatgactatggagagaaataaagagagagagagagagaaataactaaatagataaataaaaagatgttacatcacatctatgtgagtttgtaagaacggctatcatcatcttgtcgatcacaacactctattttgtttgactatgattgagatagaatatgagcttatatatttacatataataataagtagtagttgtattgtatataatatatatatatgttgttcttgttggtaaaatgaagtaaaggtaaaaatgagcaatgtcttcaaggccatatggaaatgttattagataggattaaacaagcattgattttattagtacacaatatttaatgtgtttttaataacttcaaatcaaacaaggaagtactttgagtaacttttaccaaatgtcactaactcatcaaaatatttatgagggtactcatgcattttcaacccaaatctttcattctttacataattataagactattatggtcttcactacattcgagataaaacttataaaacaataacaccaaaagtaaaaaaaaaaaaaaatggaccacttttctacaaaacactgaatctattaaacaattttcaatacaaaaatgaaaaataaaataaggtcctcaaaacaattataaaagaaagtaatgtggactttgttacacatgtcacacatgccagattgaaaattagcttcacaaacaagccacacacacatgtgtataaaatcaactaaagtccaattaatctaataataactaaacaaaatcccaaatcatgtgtatttatttttaattaattatgttttatttttttgaaaattataataaaaaagtgtgtagtgtaggcgaatgatcagtttgcatgcagggaatgtgcagaacatgctgtacatttcatgctgcctcactgtccctcaattgtcacatgccttcttttcttctctcgaaatcactacactccaaaaccctttcatttccatgtgcttcccatgtgcttctctctctctctctctc

SEQ ID NO: 19500 - DNA, 5366 bp, Cannabis sativa
taagcaaatgaaacaataaacaaataaacaagcatgcatgatgaggcagaggaacataaaatgaaggcgaaaaaaaggcttagatggacgagccacggccacgcatgcattgaaaaagtactactttctctcaaacaccaagtttttaattactatattcacaaaatattcatatccgaatcttaacaaaagaccagaaaataaaacccaccaaaaataacaaaataataataatcatgaaataaaagaagaaaaacccctatcggtcagaggatggccgagtcaccatgaaggagaagtacacggagagcctgaggatgaagacgagcgaccattgttactattggaatcacttgctgaagtgccgagagatctagcgtccctaagcgaaacagagcaagcctcagctggaagctttttcattggtgtcaatggtggggttgatgggctagagtgtagtggctgagcaacctcttcatcatcttcacctgacgaagaactagaacccgacatttccaatctcgacggagacgtgtctggtgtctcaaatggggtagtattcgctccgctttctctgctttcgctattgtcgtaaatgggattggaaatgtacacaaaatgctctcgaacaccacaaccatcagtagtagtagcagcagcagcagtacaagtagttccattctcacttactgttttgtcttcttgagttggtactggtgaaactgccaatgaaatcgatggggaagggcttgagtttggttcacactttgggatgtcaatgactttgtgatgaagctgagaaagttgtatttttgtttggagagtagtgctttcatctttgattgagatagctggaaagagtaggcttcttggagctttgagaacaccctgtgagtgaaagctactgagaggaggatgaggagttgatgatgggggaggaggaggatctgatgatgactggtcttgaggctgcaatgtggagttgccacttgagatttctgtggcggcggggtcagtcactgtggcggtgttagtagctattctgagctgacggcggcggaatagaagagagcagtagagctcagcaagcaagactagaattagacccaacaccagggcaaggctcaccaccattaccagggttgctcccataatcacctttgatgtccccttcatctctctctatctcactgagtggaatagaatgtaagtagtaggtagtcaaagtagttcggtaatataagggagggagatgtttaatttggcgggaaacagtacttcacctatctatgacaaagaaatgacatgggaaaaacttcttgaaatgtagtaaagaaagcctggggaatgtgaagctttttttttttacatattttgatgagctggcaaagggattttctgacagttaagggcatattggtcattttagtgagatcaataagtacactactatttactttttacttatttactgtgtttgttgctttttctagctccagtataaaacttaccattatcttcaccaatgacaccaatcatcagggaacaaagaaagaacgcatttgggcagtaaaaccttagtaacaatttttatttgtcaaagatatttggtgaaaaaacaaaatacatgcaatctcaacccttaaaactcaacttctctggaattataacctctctattaactgaatctgcacgcattagtaacttttacaatgatgaggtctaaaaatggtattgatatggggtaattatgctatagagattaagatgtggaagataaacttcgtggagctactcaaacgtaacaactaaaacgttttcttttggtgattttactcaaaaaaaagacactcatagagccactcaaggaaaccaagacgacaatggtcagaatcatactgctgattacaatgtagattctgatgtgaatggtttaccttcctctcaaggctgcaaaacgggcagccaagtcatcataatctggcagcttgggatgcacatggttagctccctctgatcgctcaggttgaaaggacactgcacgagcaaatactttcgtagccgctgatggtgctgagtgttcatgagggagtgaaattgatcgtgcagcaggagggatcattggtgactccttgtcagacccaaccctgcttccattttgaggggattcaaccatgtcattaacactgtgatgtgcatgtcgacttctggaagacttctttctcagttttcctgcttcatgggcagtaggctttttactgtaatgaattagcaacttgtcaattattctctcctcctcatcagttcgatggtgttcatcgtcaaacaatatttgtaggcctcgtcttgagtcatcccttcttctgcttcttgattttgttggtaaagctccatcatcttcaaggttgccagcctcgctttgacttggccgtgattttgagtgtctcctcctggatgatcttggttttggtataggattcccagttacaccctcaggataaatacgatccttctcatcattatgtaggttagctttttcagatccatcatgatgcctttctttatcagaatgatcggatcctcggtgtactacagccatatgaccagcattgactctatcctgagctgaatcgttaccattcaaaccatcatctgaagatccaggatgggaaacaggtttcctacttttagatttatcaccacgtttgacataaggaggtgggattgcattattgtaatagggcttgggcctaggattagcttcatccttgcccgcataactttcggtgatgtgctgaccaccaaagttatcgtcagacaacttttctttaccattgatcttcatctgtgggctggctataacgggctttacatataatgaagagtcctggcaatcggttatcaaaatgcttttctctctgccatattgctgcttgaatgaggcatctataggatctaatctttctctgtgggatgaagtacctgatcgaactgtttttggggtagcctcctccaaattcaaagccacctgtctatcaaaaccattttctctcctccctcgaagcaaattatcatgactgtcttttttcttgacattttcttcacaaccattgtgcgaattaaatcctttgctcgggggcctggtatgaaagccaactgcatccatttttgagacagaactgtctttttcctttcctgatttgtgagcaccattgaggtcaaacctttcattaaacaaaatgccaggcctatctgctttgagagccttatctttcccattaatcaaattgcttttatcatcaccaagatagaaaggcccacgagctttgggagggtcctgaaattctcagacaaaaaaagatttcaagtaattaaaatattaaggcttataactggtttcaactaataattaaatgagaactttatgatagtcatcaaaaaaagctgatagaatatgaagccacaataaaatgagcatacctgtggaagtgtgggcggtttgttcattctttgttcaaaggctttggcatcccactttattgaaaactctaatgctatatctttcattaaacgaactttattttccaatgtggaaggctttgatgctaaattctcaacaaactagttagcagaaacaagatattgagtcagtttaatatatacataaatgtgaatgtattaatatattcagatatcaactgagcattcataaaaattacctcttcatttctaaacaattcaagggaatttccatatctctcataaaacatttgcctgaggtcacgtaactcaggtaagtcagaaaatcgtgctgcagcaaacatcagggacgccacagctgccctacactcctcggggcattccctgaaatcatattgagagcatggcagaagaagaatacgaatcagtttaattaatgtagtctaataggtctggttccagaaaaacaaatcaaccaaaatatagtaataaatgctgagtggatatcattatctcagtcgcctaacaagataaacatagaaagtagactagataaaaatcaatcatggtgggcattcaagaccaaaccttcctagagagtagttattgagtagattcagagatcccataaactaataatattaatgatggcatcattataattttaaaccattattatcagtatggcataatcatttaaaaaccctcagcgtggcctgaagacttgtatttaagacagatagcaaaactaatgaagatcgggctataagctactcaaattaaaatgattactaaataacttacgaactggcaatgttgacactttaacaattgaatgcccagcaattttgtattcccaaatagaacaaccattgtccaaatactaatcaaatatgtatcctagtctagagataaaactcattagccatgaattttgttgaagttatttcttagcattttctacattcacaagatggcattaagaccaataccatagagcaggaagttgcgcttacacctgcaaacagtactgccttgtggaataatactttgactaaaatttcaaaagctctagaatggtagtaacatgtgtcttcagaagctaaaggttttaattaaaatacaagaaaaaagcagtctaggctcatattgttaggccatttaagagttagtgacgcttttcatcaattggttactactggacttgattacttgaataacaacaagcgatgaagaatagaacatagacacttttatcatacctctgtttctgcattgtagaaagatgttttagtaccacatcgcagcatcgctcaacaaattcgtagcaagaagataggatcacctcgaccagaagtccctctgcctggttagatagaacaacagcacagtaatgtttcaatatacaaattttaaccagaatcacaagcttgcttcttaatttttttctaaagactacaaatatatctttctttaaatattcagaagaacaaaacagaagaaagaaaattacatttccaacgaaattcggtcagctcaaaaacggtaagataagtgaatcaaaagcaaagcacaaaagatggaaacaaatcaaaatacccttccataagcgttgatatcaaggccattggcaagtagatcagcaacatctttcttcagaaatttctgagttgcgtttttctttctccttattacatcgattcgagtcttggtcaatttaatcaacgatttactgccaaaacaaaaaaaacaaataaaattaacaaagacatacatatgcacctacaaaatccacaaatacatatattcagaaacaaaaaaaataataataatcaatctgagatcgaatcgcaaaccatttggaagtaaaaccccgaccaagaagc

SEQ ID NO: 19501 - DNA, 3011 bp, Cannabis sativa
tttttttttttttttatctttgtttagaattagaagtgtgtctatagaggttatcaatagtgcttatttagcaagagggagaagggaagattggaagagagaggattaatggagcgagaccttcttcctccaaatacacaatttttaatccattaaaaaaataggggaattgaaaaaataaaaaaactatataaaatgatttttacaccatttaaaataaaatatataattctattaaaataataaaattataattttaatatttattttactctttatatttccaattttatttttaatatcaaacaacactaatgagaataactatcatcttcatcattttataactcttcagtcatagaaataggaataagaataggaatgaaatgaaataaaatttaaaatgcataaaaaaaattattaaatttttattcatcatatattggaaaaatagtctttctttcgatttcaatatgatcataataattcttgtttttctcattgttatttctctaaactttaattattattaggtttatttacttttctccaaaattattattgatcaaatagaaacaaaaaaataattgatttataattgtcaatcaattctcatctgaacaatactatactttatcattatattacttgattcaattgtgtatacttgggtatcaattttaccgaacaagttgtccttttgttattttatagtattttttatgttgttgtttaggtgttttatagttattttacgtgttttttttatacagttgttgtttagtttatgtgaattttttatcgtgtatattttcagtttattagagacactaattttgttgtatgtatgtgcatttgcttgttatttttatgttatttttcagtttatagttatttttttaactattattaactcaaaaagaaaaataaaaaaaattgaaagaataaaatggtaacaataaataccatgaaaaaaaaatataatagtacaaaaaataaattaaattgtcaaaactaaataaaaacaaattataatacaaaaacatactgctttgtaattatatttttgttagtgagtccaacaaaaattttgtcattgcaaaattttattagtgagttcaacaaaaattttaccattccaaaattttaattgacatttttccacgaaaatcattattactaaaccatgtaacaattttttagtcaattagaatttgaattataactattttattcaataaacacatgatatgattcattctaaaatgtgagaaaaaaaccaacacacacaacacaactcagtctcaaactaagaaaaactattgaaaatttgaaacaacacggaggactactttgaaagataagagaatttatatggccaaaactgtaattataaaaaatataaggaccaaataataagaacacaggtagtctacaagttcgttatcgtctaatcttctctgatactaatttccctcccttattctccataaccaaaccttcgaaacaaaaatggccatggctattcccaccatggcattctcaccttcaactcctcacaatcacagcctctatccacttcgtaaaacctcttccccacctctgtttcactgtacttcatcacccactttaaccacctctcaacctattcccaaacccccattattgaacaacaccaaaattcagtgtgttaaggaagaacgagcttctcgaactcctggtgtcgatcccaaggctggagtttctctctacaaacctaaatcgtacgatgttctcgtcactgacgccgcaaagtctcttgcttttgctctagaagatggaaagacccgtttggagattgatttcccgtaagacattgaatttaagtacttttctcctttaactcgagaaatttgccaaactaataatatgaaaatgttaaattagcaaaataatcagattgaatttacattgaaatgcgatcattattgttgcttagtgtaatttttggttgcccttacgattttgctaaattttctaggaagctattttgctaataaaaattactaagaattttttcgaagcccattacttgaatttgactcagaacggacttgtacattattatttgattggcttgcacagacccttaatagatttttttctttttgttttttttgaatgggtggtgactcaaggcccttgccaagcgacatatcttcgtataaggtactttgctctactcagatttatggtgacatactaatacatcaagtatttgtttgtatgatcaaactggttgttatgtacctctcattggagaactttaaatattagtcattagcataatttaatgtcttgattgtgagtttgctctttactgggtttttaggaaggctctaattcacccctatcacacttgacttgaggtcaaaaattttcaattttattgcttgattcaatcttatcattgacagtgataatggctaattgatgacatgacacttatcaatctgaatacatgagacatgattttctccaattcctaaaattgtaaagggatcttcagatgaattcattgatgccaacattcaattggccttggctcttgtgaggaagctccaggaaagaagggaaaccagagcctgcattgtaagcacagtcttgttttaattcgtatcgtatctgtttactttgcatgttccatttgaagagatttttccaatttattttttatttcaggtgtttcctgataaaccagaaaagcgcagggcctcagagttgttcagaacagccatagactcggtaacaacatatgcgtcttctttaaactaatcaatgttctttactattgaggtagagtttttttggattgtatctgttgtgaatacaataacaaaccaacgataaagtaaaaattgttgggaaaatagaaatttgaatttctaagatttcatttgtaaagagactaagcatatgatacagttcatgtatggttgtaagtttgtatcatatttcatggtcttaatttg

SEQ ID NO: 19502 - DNA, 2455 bp, Cannabis sativa
  modified_base (119)..(130): a, c, t, g, unknown or other
attagattaaattatatgggacccgatacttaattggaccaatagcgatattgacacgtaagattgtactaaacactagtggtaccgtttaacatttctcataataataataataatannnnnnnnnnnnataataataataataataaaagggcttctattgattcaagcacatattccatcattaatggggggaaaacaataccaataaatatgcatatacttgttttctaggtggattatgccatatgcatccccaaactttatcatagtgaattgccttttcactccatgccatattcatatatattttgtttgattttgatacagttcattatttgatgctagaaaacaattactaatagatcttccttaacataattagatatagctcccctaatatatactttcttgtttggatatattacactcaaagattctattcttttttaatttttttttcgtttggagtttgaatttggtagagaaataaaactgcaggaaagaaaaaaaaatgtagaaaatacaaaagtaaaatattaaattaaattaatatttttgttgaatcaactacttttccacataattatttctataccaaacatgaaattttttaattattatttttacattttttccctacatttttctaacttcttataggcatgaaaaacactagtggattcaaaccacatatatttatctaaataataaaaattgactctaaatcatgtttaggtttaatttaggtacttaatgatagagcatattgaggaaaacgcatcctcactaaatatgtagttttttcagcttataaattggcttttataagggagagaaaactaaagaataagaaaaaatatattggagttattctatttcctttgtcactacatatataattatatacttttattttttctttaggtttgccagttcagtcagtggtgggaagactttaaaaggttaccatatctctatcactagctaggcttctctttgccaaaggctatgcatggctttttctaagtgccaatggcatttctaccgtttgtggggcctaattaaatattgaaaatagtgaaataataataataatatatatactacccagaaacattaaattgcaataatttgaaccaaaatagacaataataattacaatttaaaaggtctataaaatttcagttattacgctattttacgggacttgtaacctacatctataatgaatacaagagtgagaggcaaatatatagacatagatacagaatagaaaaggtaacactagtagtggacaagacaaagactctaactaacatgtaacaaccttaactaattagcggtctagtcaccacaaccatttacttcctcaatatgcctcctcaagctacacgggaagaattccagtgaaagcttgctgcataaaaaattgaacttaggaaaggttaaggctttggtgaacatgtcagctggttgttcttcggttgggatataagagacatcaatcttgttctgtagaactaactctcgaacaaaatgaacatcaacttcgatgtctttggttctggaatgaaaaataggattagaggccaacatttgagcaccctaattatcacaccagataacaggtttgctgagcaacttaattccaagctcttgcagtacagaagtgatctaaacgacttctgtagctgtggtagaaagagctctatactcgctttcagtgctggaacaggacacaactctttattttctagaaccccaagagatgagattgccaccaagctgaacacagaaaccagtcaccgactttctatcttgaatatcacacgcccagtcaacatttgaaaagccctcaagaataaaacgagatgctagtttaaacataaggcctctattgggtgttccctttatgtatcttaatacccttttgcacgcacaccagtgagcaacagttagtgattgcatgaattgagttaatttattgacagcaaaggatggatctggccttgtgagagtgagatattgcagagaaccaatggtgcttctgtagagggtgggatcattgaatggctcactattagaggtatagagtttgtgactaggacaaataggtgtagtgcagggtttggtgtcaagcatgttggttcttttgaaaatatccatggcatacttggactgacagagatgaatgttagaacccacctggtgtgcttcacaaccaagaaaattattaacctggccaagtattttcaagacgaacttgctattgagattggaaatcacttggtgtacatcctatggtttggcaccagtgatcaggatttcgtatacatacacaagcacaagtattagatgaccattgttatttttgaagaagagagaactatcggagatagaattgtgaaagtcccaagacagcagagcttgtttcaacttgttataccaggcc

SEQ ID NO: 19503 - DNA, 3830 bp, Cannabis sativa
  modified_base (118)..(133): a, c, t, g, unknown or other
aaagttcagggggcatgatttaatacatatcaaagtttgagaggcataatttagtagatatgaaagtgtgaggagcataaacaatcactgaaagagtaaaattgaatgaaattagacnnnnnnnnnnnnnnnnaacaatttcaatagttcatggggaatttttaacggcaaaagaaattcataagcttaatttagtatatgtccaaattcggagaaaaaaattactaattaaccataaatagatatacatttcatcgtagctgatcttggacacgactactaactaacaaccaacccaaagaaaagtgtactaaaattataatcatgaaagaataggacactcaactcctagccatctactaaaccccataaatgtacgttgtatcacgttatatattcattcattacatagagatataatgaattattaagattgaccttatatactattacttggaggagtccaaatcaattttggcatgaaatatacataattccaaagaataatggggagagagagaatcatggtcatataaatatttgatagctctaatgaccgatatccactagatgataacttaatttgtaatatcatccatgcacttgtcaggtatgacgtctatgcacctgtcccatgcattaatttgcagtgagagagccagggacagttagaaatggagttaatggttgaatttatgggtacaaaattaacattcatctaccaccccaaacgacacactataaattactatgagctcttatacaattttcttacgatatacattaaaatttagttccattctacatctctcaatacacacacacacatacctctctcaatatactgctggattacaatcatggagttccattatttcccatacatcctagcttttgtcacagtaagctgttattccaaaactaataatcttgttttgtcatcagctactcattatatgctcttctcgttccgttttttttttttaacttaaatatatgtagcacatgttgattagttgatatacgaactaattatgtgaatcacatatctatatatatatagttgacgtttgcagtaagccatgcggtgcagtctcctgagctttattggaagtctgtcctgccaaacacacaaatgcccaaagctgtcactgatattctacaaatgggttggtgctagaaaaccgacaactcctctttaaaaatttactgacaatatttcttagataagttcataagattattatcatgtctagaggcgtgacccaaacatgtagccgggccaaaaatttcaacatttgcttttttggaagagaacaattttttttttaagatctaaaatttttttcccatggtgggaaacctaaatccctgtttctccacccttgagttcgggctgcgtgcttattcattatgattaattattgcattcatctctaagatttgttcaaacttataatataaatatgtatatagttatttaaaatgaaagaatcatgcagggttggtcaaagtgttagaacatgctagtttattagatagtaaaatgaaattaatatttgtaaagaatattcttttttggaaatatattaatagccaatgaattgtcaaaatcaatttttcacaatttagtgattattttttttctcacaaaaattaacaatataatagaaagttagatagtaaattggtggcggagagtaaattgtttgtatacactttctatctgaaatatgttaacatatcaacatgtatcaacaaaaggtgtcatagataaattataattttctgatgattttgtagatataaccgaagataagagtacctctgtcagtgttgggaaaggaacaggtgttggggtgagcacaggaaaccatggcaaaggaaccaacgttggcgttggcaaaggaggagtttctgtaaacacaggaaagcctggcaaaggaactaatgttggcgttggtaaaggaggagtttctgtaaacacagggaagcatggcaaaggaaccaaggttggcgttggtaaaggaggagtttctgtaagtacaggacataagggcaaacctgtttatgttggagtagggaaagggaaaaatccattcatttataattatgcagctagtgaaactcaacttcatgacaatccaaatgtagccctcttcttcttggagaaggacattcgacctggcactgaaatgaacttgaacttcttcaagactattacttcaaagcaagcaactttcttgccccgccaagtagctcaatcaatcccattctcgtctcgaaaaattccagaaattttgaacaaactttcagtgaaaccacagtcaaccgaggctgagatggtaaaggaaacaatcaaagagtgcgaagatcagtcgagcattaaaggtgaagacaagtattgtgccacttcactagaatcaatgatcgacttcaccacttccaagttaggaaaaaaactacaatcaatctcaacagaagtggagaaggaatctgatgttgggatggagaagtacacaataacaaaagtagaaaagaagaaaagctcagcaggaggtggtgacaaaactgtagtgtgccacaaacaaaactatccatttgcagtgttctattgccacgcttcacaagccaccgaggcttatatggtgaccttagaatctgctaacgggaccaaagctaaggcagtagctgcctgccataaagacacgtctgcatggaacccaaagcacttggcctttcaagtccttaaagttaaaccaggagttattccagtctgccatttccttcctcaagatcatattgtctggatacaaaattagaaataagttatcatttgtgaatcgcgtattagtgtgtaagtgttttatatgtacgttcagtactgtcctatactcctatatgtaagacttattattatgagcttataaaagtattgtagactttcttttgacaaaataaagtttttactgtcattttgcttttataaaggcttggtttgttattaagtttgtaagagaacattgtgctctcaccatttgcaatatatactagccttttttttttctaaaaaatcaatgaattgtattttacattggaaatattacaatttattgagcacaaatgaacgcccagaacacagaaaaaaccaattacatctcaaacaactaaccatctcaaatcatttacattaattctactaagacttgtataaaaacttctatattataaacatcttgtttaattcttggaactataaaatccacagtcgatccataaataaacgacagctgaaagaatagtcaagaagacattatcttttcgaaccagttaagtctacttcttttaatccatttatagacaactaaaacagtacagacccttgtatgaattccaatccaggacagctaagaattcatacaatccgcagtcaaaaaagcagtgatagtaagtctcatctgccatatcataaatattgctgctcagatcaatgtccaaaccaaattggatcaattggtcctttgtcttcaacctctagaggagagtaagccacatgaaaattctatgttttggggtaatcaatctgcaccaaatataagggaaatcaaacccagtcctgtgttatactcagctaaaaaagcgtagattttggcaatggaaaatgcctgcttctcaaactcattattggtgaaacaagccttaattttcttctttaccttgacaacttactttcaataccagtgttatccctattcccgaatgggttcaacgtggaaactgtagaagggtgccacatcaaatcttatgctgatgtcacggatccctcttta

SEQ ID NO: 19504 - DNA, 7775 bp, Cannabis sativa
gattaggacaccagatgatgttttcggtaacacatttcgatcacgttgagttctaatgtcgatactgtaaatcggccattgtaaacatttgtgaaattttattaatggcggtgcttatgcttctctatgtgaaacagataagtcgttattctctttttttttaatttcaatttattgtgattatttcctttacttatttatgggtatatatgcaagagttaatgtagttttcttctcaccattcttagatttttttttgaagagacctgtatcctagaaaataaaccagagagaacatgatacagcagaaaatagtttaatgagaagccacttgatctaagcctaaagcttgtttagctaggcgatgagcggctgtgttagcctctcgcgggatatagctaatcgaggcttgaggaaggtgagacagaaggcctttgatgtgggtaataaagtcttgcagatgaatattatcagtgtaaccaagtgaatagcatgtattaaaatcttgcagccagattcaatatggtgaattgcaattgagttctgaagacaccattggagggcaaattgaagagcatgtgcttccataatgagaggttgatgaataccacgccaaggaatggctaaggccgcaattgtatcttcggcatgatttcgaacaatgaagccaaaactcatcttgttttgctggactcgctgggcaacatcaacattgagttttacacagccaggtggtgggggctgccactgtgaattgcgctggcgagtttctttcaaattaggtggagctctgtggtcattgtgttgctggtattggcgtaggtaatcttccgtccattgaatgagcgttggggcattttgagttggcttgtgatgtaagacttggttcctgcaatgccaaactttccaaaggagacaaacagagaactgaaagtctttgggtgtcataacatcagtaaacaaaagtagaatatcgttacaatgcattgaatttaaataataagaagattataaaaaatagttaatttccaaaccttctggactgaagagcaaccaaacaaagcatgtgctaaggtttcctcatgattatggtagcgacagcaaataggggaactcacaattcggcggtggtaaaggttaacactagttggtaaaacgtcatgataaacacgccaaagaaagtgtttgattttggaaggaattttggagtttcagatcatcttccaccacttttcttgggtagttgtaatggagggggagggttcaaattggtggatgatagagtaagcttgatgatatctcgaattgacagtgtatgatccatgtggcgtatgggaccaatagactcgatcttgacctagagggtgaaggaggggtagtgattctatggcttggcacacatcacttgggaagagattttggagttgctgtgagtcccaagatccgctaggggagataagactggagaccttactgcaaaggtaggtgatggttgaagatagtgtagtttcccatatctcggaaccaaggcatccttgtaaatgtttatggaatcatcgttccctacaatatttcgtaacctagcttgaaggagagatttcccccaagagatgctattccaaacaagagaaaggcggtgtcctttcccagagtcaagaaaagaagagtgtggggtgatatcgacttttgagaagttgcgcaaccagcgaggaaggagcctgaagaatacgccaagcctgtttggctaacaaagcttgattgaaagctttcatttaacggaaaccaaggccaccatgaaatttggatttacaaagggagggacaattcttccaatgaattttcctggtgtgagtagttcctccccaccaatattgagccatcatggtttcaatctttcggtggaaatagtgaggtaatttaaagtaagacatcacataggacgaaatcgcttgaaccgccgatttcagtagaatttctttacctccttttgagaaaaagtagagttccatctgtttagatggttccacacacgatcttgaaggtacgtgaaagcttctctctttgaacggccaaaagattgaggaagacccaaatatttctcgatagagtcacggataggcacattgagcaaagaaatgatttgagtcttaacaaggtcagtggtgttaggagagaagtagagcgatgatttgtcgtagttgacgagctggcccggagctaggctgtaaacatgaaggaggtccttgatttgattggctgcgatgggagaagcatcactaaaaaggatgatgtcatcagcaaaaaagaggtgtgagattatcggtgcattcctggaaatcttaagaccaagagcatgtttcctgtggagacgctgattgactcgttgggttatgagcgaggaaaggccttcagagcatagaaggaaaagataaggagaaagagcatcgccttgacgaattccacgggatgggataacggatccacatagttgctgattgatggagaaagagaaggaggtagtgggaatcgaaatttttccataaccctcttgaggaagctccattcaacgcggtcgaaggctttagccatgtcaagttttaaagccatccagccaaccttaccattttttcgatgagttaaagagtgagttacttcttgccctatgatgatattgtcgaagattaaccgattgggaaggaaggcactctgggtaggcgagataattcggcaaagaattggtttgaggcgattgactaaggtacgagaaattattttgtacattgtggaacaaaggctaattggccgataatcagtgatggcttgagggtggctcttttttgggataagaacaatgatggtgttattgataggagacaagtctgcattgttattcaagaagctcagagcagcatgcaccacatcagctccaatcaaatgccagtttttttggaaaaaggtgccattgaagccatcagggccgggagacttgtcactagccaactggaaaacggcttgttggatttcatcctccgtgaagggggcttctagacaagagcattccgtttcggtaattctgtcagagattccagataggatatagtctatatgctcagcagttggttgttggctggtaaaaagttgagtaaaatgttgttcaatttctgttagaatgccccgagtatcagtgacagtcgaaccatataggtgagtgagagaatgaatcttatttttagctcgacacgaggaagcaaattgatgaaaatatcgagtgttcttgtccccgagttttagacaagtaatgcgtgagcgctgttgccagtattcctcttctttatagagaagtcgatcaaggtctccttggagttgacgacaatgaataatatgagagtttgatggttggggattgttttgagcgatgtgaagttgagattgaacttctttgatttggcgaggaaggggaggccctagattttctgccattttgaaagagtgagggtacagtgtttaagcttgttggcgatattggaaatatgatcctgactctgagcatcatgggtatggttccacgcctgtgtgatacagtcttcaaatctgctttcggcaagccatatgttatcaaaatggaaacgttgctgtgaaggatgagagttaggcgcaatttggttgagagagaggattgaagctcgatgatccgaaccaaagaagtttccatggagtagatgtgcattaggaaaggaggacaaccacgggaggttcgaaaggccccaatcaagtcgttcttgtatgtgggtgagcagggaatgtttattggtccatgtgtaggggctgccatgaccatgaatgggattaagaatatatgtatcgaggaaagtgcagaaaaaaggcgaaggtcgtgtattgatagtccccccaattttgttagacagggaaagaaaaatattaaaatcacccattataagccatgggctattataaacagtatccccgagacggtgtagaagttgccacgtgttggcgcaattattgtggtatggttccccatagaagctagtgaaagcaaaagtgcaataattaggaaaccggacatagcaatgaaagtgatttatattataggatagtaaagttacatcaacatcctgagtccataacaaaaggagtctgccactaaggccaactctagggacttcaagaccatatgaaaaggaaagcttagatctaattttatttatagcaccaatagggagtttagtcttcataatacacaaaagcgttggtttaaactgcttaaccaaaagggagatacgacagaatgctcgtttactccccaatccacgagcattccagttgatgagactcatggctcctggcaggtgcgctgagcgtcacccgcctcatcgggattgttctcatccaaggattttgcttgattacggttatgctttagaaacttccggaactcggcctcattgatgcacggagggcgttttggcttaattctgcggccaaggggcgcactaagggttgacgcagaggaagcaccaggagagaatttattttattctaacttcaatttcagtttataacactagagtaaactctagaatatccacttgaataactaatataaacctaataaaaaattatcaagttaccatttacttactacttaagtaaacttaatgcctagtagtataatggtcaaaaaaatattacctcgcatagacttaagacatttcaaatgtctaaaaacttgctccactaattctttgatactctaccgtatcactgtgacccttatagccaaattgtcacattctactcttatcgggcattaatcatgaaaaattataaaattcacacatagcatgcgtgatatacctaaaatttaatataatctctatgattaaaaaaattatctctctaatgtctattttagacaacaagtcttatttttctaataatgaacatataatcaaaaaataacaattaaatatctaattatctgctaagtctcatgtttaaactatgtagtcattacatagttagttcgagcaggccaattgcctataatgtcaagaaccccgaagttcatcttctcgactctactcttcctttggactgctcagctgggattgtgggagctacacttgcatcaaagcatctcacccaacaagctttctaatattttcttaccaagaacaataagactcaaacttatccttggaactaaatggtcggggctaaggaagtgggttgacaaagggaggtttcaggagagtagaaccgattatggtggtggtggctgcattcggggtcttggtggtagtggtggctgataaaaaagagagaatgataggggaaaggatggagggaaagatatgttaagaaaataatgagcatgataatttgggtaggttatgaaagaataacataaattggtaatgtttattagtagatgattgtattattattgggaccacagaaactcaaattttcctttacatagtgagtataattaagaaatttttacataatacattaaaaattttaaaaaaattataaaaatatgttaatacggaaaaattttaaattttaattttttctttacaaaatacgctcttgaataaaaataataaattgttcgatattattttttaattgttttatagtttatttatagttattataaagtttattttctcattactttttattattttatagtttatttataattattgtgagattgatttctcgtttttttagttgttttatcatactatttttttttctaatgagaaagccgtatttttataattttcaaactttaaaatcgtattttttaaaaaataaatttataaaattgtaaataaaaattttaggtcgtaaattgtaaataaaacatgaaaagaatatatttatgaagaaaaaaaccttattgttattatcatttttttttttataaatcctataattaatattttttaaccatattccttcaaaaaaaaaaaaaaatattttttaaccatatttcttcaaaaaaaatatattatttaaccatatattgctaatattatcttttttttttttttgaaacggattgccaatattatcttaaaactttatatattctcacacgtatattttaaatttgaaaaaattaaaaaaattgagtgttgttgtaaaatattttagaggattactaaatttatgtttaatctctaaataatttgatatttttttaatctttcagcaataataaaaataataaatttatagttttaatatctgtttgttggatattacatttgaacgaaaaactagttcagtatcgtttgacttggtcaattttatttagattatatatacatgaaagtgatcaaactgccacattatagtatcaaggatttttttaaaaaatatatatttgatttttctatttattaagtcctaaaaagtataggaaaaggagtcttgattatttttataaatagctttttttgtaattgtcaaatattttatcttttttataaaatatagattaacattataaatttaaataaacacgtaaaggattggcctataaaaggacttagaagagatagaaagggtttaaactaaagtactagtaaacacacacacttaataaaccatacaatcacaaagagcaattcatcaactttcataatggccgatcaaagtttagttaccaacaaatttgttgaggatccaactttaatgtcttctaatacaaattcgatcatattcaacagtgaagaagattatcatgacaataagtcttttacaatacctaattgtaatggttcaaagtttcgtgatgaaaaatactacgcttctagacgaacttttcttcaaagttataaatttacaaaaaaagaagagacaatgggaacaaaaacaaaaaagtggctcaagaaaaagcttggaactctcgtcaagaattaaactaattgtcgatacatagatagtattcttttattcttattgaaattttcagagtttttattaatcagaagctaacttggttgcttcttgataaactgaaattaaaagtagaagtttagtaaacaaacgtttattttattatttcatatgtatctgttatgtaattttttttaatttcaatttaacaattttattttatattgtttatgaacaatcaagtgatttacaacacagaaaactaagaacacaagaaaaatgcaattacaaaattatataaataacgagtataattattatatgtttatttatgaatgaataaaaaattaaactaaaagtgataacattttaatccaaaaaaataataaataataatttgtatttttttttttgaaatattttaagatagatgattttttttagatgatgtatttagtttatagcatagaatggaaatggtagttttgataaaaaaaatcgtaaacttggtaaacttcttttaatattaaaatactttaaaaaaactattagcccaataaaatagacccaactttgtttaaaagcccagtagatgaaatctgaaacacctttgtcttgggaaatttttaattatatacttaattataaaataattaacaaatctaccgttaatcatttaaatgataaattgagcggtaataatgtacttcatatgtaaataaatatatggtatatttatttttttttgggtaaattgcggcataaatacctcgtgttttagattttgtacacttagggctcgtttggaacgctgtattaggtcgtattgtatt

SEQ ID NO: 19505 - DNA, 3972 bp, Cannabis sativa
  modified_base (317)..(324): a, c, t, g, unknown or other
  modified_base (3861)..(3886): a, c, t, g, unknown or other
  modified_base (3935)..(3946): a, c, t, g, unknown or other
atctaaaatcaatggtcaaaaaaagttccctaccggtagggaacttttgctaggtcctaccataatcttgccctatatttatattttatgatttgttttattagttatttcaagtctcttagtggacaaaaaaataaaaccattttccattccttaaaagatttttctctgttagggtttaggtcctgggtcttaggtttcaggtttggatctgggtttggtttcaagtctgggttcggatcggagattggtgtgatccgaaatcttttgtaaatattataatacaagttaatacagattatttgttatgtattaannnnnnnnacatacattgtattaaaaattttagtcgtaatgactaacatattaatgttttcaaaaacatttccttattttagattataagttaaagtcttgtcttctgacatgttgtgagaaagtttgtttttgtccttctttgttctttgtttactgtaaggattggtgtttaaggattacgttgatccataatttcaagcagtcaacaagctaatgagctagaagaacaatatgcgcaaatacaaatcgatgaagaggaggaagggatactgatcgagggggattctgatggtgaggaattggtgtttaatgacagatggtgtcttgtaggaaagttcttgacaggcagaagtatagattttgatgtaatgagacatttgatggcttctctttggcaaccagggaagggtgtatacattaaggagttggatactaatcggtatttgttctaattctatcatgaacttgatattcaaaatgttgtagatggtagcccatggacttttaacaagtttccattggttttccataggctgaaaaggggagaaaatcctagaatggttcatcttcataaacttgatatgtgggttcaaatccacgatcttaaaactggtttcatgatggagaaggtggtgcgaagtgtaggaggatatgtgggaacctttgttaaatttgatccaaaaaatttcaatggtatttggcgtgattatctacgtgttagggcaaccatagatattgagaaaccattgaagcgtaggatgaaactgtgtaaggagaatggggattggatttgggcaacattcaaatatgagcatttgcctactttttgttttgtgtgtggcatcattggtcattcgaaaagattctgtccaaaacgatttgatcaagagttggatcaaattatttataccgtatggcattggtatgaaagcgcagccaagaagaaagaattacctcatcggagcacaatggctcaaaactggaaatgaagagtctgcaccgatttttggtattgttgttcgtcggacagaggctgatactcggggaattgatggagcaaaaatcatggaagtcgatcccatgatatctgggagtaatggaggacccgtgatactaggagatagtaatcaggggagtaatgagggagatagtcaaaatggtaagaatgtggaaaatgctgaacctgctcgtgttatggaaagagtcaactcgtctcataaagatatgactctttatttggaaacaaagaaaagaaggatggatataggagaagtgatgggagatgatgatgtggcaatggaaaatgaagattcgggtggtatgaaaaaagaagctgaagttggagttgggtcaaaaaacatgttaaaggtgggccttggttatcaggcccactagacattatgagtcttatctcttggaattgccatgggcttttcaattcataaaggatcttgtgatccagaagaagcccaacatagtttttctctgtgaaacgttgtctaggaaagatatggtggagaagttgcgtgcgtctcttgggtttgaaggagctatggctgtcgatgtacaaggacgaagtggtggtgttgctatgttatggagaaataatgctgaaatccaattgcttggatttggtacaaactacattgacatctctattaatagtagtgagtatgggagatggaggcttacaggtctttatggggagccgaatagaagtcttagaaaaagaacatgggatttgctgaggaatttgaaggagaaatatgatctttcttggtgtataattggtgatcttaataatgtgacctctcaacaagataaatgtggtggcaacttgtactcgaattggctcattgagggattctgtggggtgttggacgattgtgaacttcatgatatggagttgaatggatacccgtatacttgggagcatgggagaggcactaacgattggatcgaagtcgaaatcgatagagctcttgtttcacaacaatggatggatttatttcccacaggtaagctatttaatttaaaggtttctacctctgatcattgccccttgctattagttcctgttattgtcgtggcctctgttaggaatgaagtttttagatatgaaaattgttggttgaaggagcccatttgtttgaagatggtggatgatatgtgggttcaatcagcgggtatgcctttgctggataaaattaaacactgtggagagatggtactcgaatggggaagtgactatacaggaaattttaagaaggaattcatgattgtaaagctgaaatccgaaggtggaagaaagtaagggacttgattgctgttagtaactataaagctgcccaaattaatttaataatatcttgctgcaacgtgagatattttggaaacaaagaagtaaacaattgtgggttagagaaggggatcaaaactcgaaaattttccatgctaaagctacctcgagacgtcaaaataatctaatacagaagctgaaaaataatgattgagagtgggttggttgggaagatgacttaccaaatgtggtgattgattatttttagcaactttttgattatgaagatgtcgaatttggagatgtagttgactgcatacagtcgaagatctctgaggagcaaaatgttcagttgatggaaagtgttacaattgagaaaattaaaaaagtaccattccaaatgcatcttgaaaagtctccaggtcccgatggaatgaccccaggcttctatcaaaatttttggcatattgtgggagattgttaacttggtaaggtcttttttctctaatgggaccttccctcgtgtacttaataatacaaatattgtcttgatcccaaagaaaaagttacctgagctaatgagcgatcttcggccgatatccttatgtaatgtggtatataaaattatctctaaggttcttgctaataggttgaaagttgctttgcctgatgttatatctaccactcaaagtgcttttttacctagctgcttgatctttgataatattatggtttctttcgaggttatgcattatatgaagaggaaaagggtgggaaaggacggttttatggcactcaaactttatatgagcaagccttatgatcgtgttggttgggctttcttggaagctatgatgattaaaatgggtttttgccgcaaaattgtttccctcataatgttttgtgtgtcaactgtatcttataatgtaacttatgggggaaaattatgggacctatataccctggaagaggtataagggagagagatccactatccccctacctatttttggtgtgcgctgaggtcctatcttctatattgtagaattatgaacgaatttgttggttgacgggctgtcaagttgcaagaggagcccctcgtgtttcacatatgctatttgttgatgatagttatgtgtactgtaagactaatgagaatgaagctgcaaaatttttgcaactcctccaagtgtaccaaagagctttgggtcagcaggtcaatctgttggattttgtgccctaannnnnnnnnnnnnnnnnnnnnnnnnntttactaattaataaagatcagaactcattttatgttgcatggttcacnnnnnnnnnnnnatgattatatttaatgtataaattct

SEQ ID NO: 19506 - DNA, 5634 bp, Cannabis sativa
  modified_base (3584)..(3608): a, c, t, g, unknown or other
  modified_base (3826)..(3828): a, c, t, g, unknown or other
gatcggatgaacacccctactagccagggtgtggcaacgtactttatgtatgttgattggactcttcatagtatttgataggttctaacagtcggaatctttggctatatattgggacgaagaggaagtgatccaactttgaggttggtggctctagtgggtttaggattaattcaatggggtgggggtgggggtgggggtgagggtaaatctgaatggtgttcttagatggagcaatgtttgtgagggtggattttcggttcatagatcagtgtgtggttggactcgggagttatggttcattcgtgatgcagtcgctctttcaaatcaaggtgctttcctttgattttttattttttttttttaatttggtaatattgtcccctccaagggagggtgtttaccaccttatttatagacagagagtttgattgcaaaatagaatcaagaaaaggaaaaacaactaactaactactgagaaacaaaaaaaggttaggtattaatatctcccctcaaacgaaataaggagacaaccatgtgaagtttggacttaaggtagtcccatctctctgtagacaagagattttgtaagtatgtatgacacttgatcaactgatggaacaaagcgaactgctaacttttgtgccacaatttaatcacgaacaaagtgtaaatcaatctcaatgtgcttcaaatgggcatgaaaaaaagattagccgcaagagcactagcactttgattattaacccatatcacaggacaacaattcatgtggattttaagttcagataacaaagacgttatccatttgagttcaacagcagtgttagctaatgctctgaaattgctttcagtactagaacttgttgctttttagtagaccacgatattagatttcctctatccccatgtagatcgtcgatcatcaatacaactcgctcaatctgcatctgagtaactttctagaactattttaatagcaggatgaaatactaagccttctaaaatggtacctttgagatacctcagtaatcgtttgcaagcctcctaatgaaaagtaatagaggccttgattaattaacttggtttattcacaataaatgccacatcttgtcttgttagtgacaagtactgtaatgctccaattgtacttctgtacaatgtcatgcatggaaatggtttaccttcagctaatgaaagtttagtggcaggcagcactgattggattaggggagctttttgcaccttccatatgaagcttcacaagaagattagtgatgttctttgtttgagagagatacatacccgttgaatctcaaaaaattcccaccccaataagtactgtacctcacttagatctttaagtgcaaaatgtttgttgagattagaagtgagcttgtttataagagtcaaatcaggtcatgttaatagtatgtcatccaaatacactagtaaaatgattagagagtttcctgaggtgtaaacaaacaatgagttatcagcttttgatgttgtgaaaccccactgaatgagacaacttttgagcttatcattccatgtctgaggttcttgtttgacgccataaatagctttaggcaaaagacacatgtgatctagtctttctgggtcaacacatgtaaatagttcagttagtgatccattgaggaatgcattgcttatatcgagttgtttgacagactacttgtgagacacaaccaaaaataaagaaatgttctgactgttactggttttagaacaggagaaaatgtctcttcataatctatccctggtgtttgtagatatcctttggccacaagtcttgacttgaatggatctagtgtaccatcaacattcaattttactttgagcacatacttgttatctatgacatgcatcccagatgtgtatggaacaaggatccaagtgccagctgatttgagagccccaaattcattcttcatggaggcaagccactaaggattctataaggcatctttgagatttttcagttcagttgggagaagagactctagcaaaggatgctttgtggccatatatgattttggcttgaatataccaccctgtgatctagttttcatctggtgtgttaaatttgtagtaacctcaagtgagctccctgtattggattgtaaagggacctatggtatggtatctgagacaattgttgtatggggtaaagttgcaacattggtaactgtatttttagcaggtaatgggatgggagatgtgtttatgggtgttgtgacattttttgttcggggtaaagttgtaacattgataattttattttgggtagggaatgggatgggagatgtgtttattagtgttgtgtttactggtattgcagggataggagcagatatatgttgttgaggtgtgctataggagtttggataggaacagattgagctgctgatggagtagcattgacttgggttgtcttagtaccattggaaatcatggcattagaagaaccaagattagtatgtggtttaaagcatgaggttgtaaagctagcagtaggaacattagtaggttgagaatgtacttgatctgtagcttttgaagagagaacaccagggtagtggccttcattattgcaataaaaatctttccttgagcattctcacacatataacccttgtgatatgatgaataccctaggaaaaggcatttttaaacttgaaattcatctcgtgagagtgataaagtctgagatgtggaaaagaagcacattaaatggtttcataatagcataatctggtaaagaaccaaacaaatactcaaagggactaatgttgtggtctgtgcaaaatgacaaggtgtgggatggtaagaataagactgttaaggaggtactttcgttggctaatggtagttttgatcaaaggagatgtgctcaagataaaacttttaattcatctttgttctctttacaagaaggtgaaaggcacgagcactgaattgcacaggttggtaatacgatcaaaattaatatcaatgcagctatctttagcaatctgaataagtatgggtacggttggatggcacgagactcttcaggcaaacttattatggctcgaacagcaagccggatgggggtggttgatcatgttctcgctgaagctattgaggttaaggaggtgttgagttggttgaaagaaacatggaagcatgatgtggtggtgaagtcgaaagttttgtcatgatccaatctatccaaagtcgttagatatgacttctattttttagttctgtattgctgagtgtcagcaaattctttctagtttgattattgtctttttaatttttatcaagcgattcactaattgtgttgttcactatttgactaaaactttacaattatatattgattgtacatatttaaattctatgattctgagtagtttacgtgatgtacttttaaatgatttgtgactttgggttaataaaattacattttttttattaataataataaaaattaaaatataattatctctgaattaatacacctaacaaaaataccataattatagctacattattattattattattannnnnnnnnnnnnnnnnnnnnnnnntattattattattattttaagttgaggtattaaatcaagataatatatgtaaatagtgtggtgtgtctaataaacaaaaaaaaggaaatttcattttacatgcttaaaaaaatatttccttacaaaatttagactcttaattaattgatacaattgaatgctattgttttcaatttctactcaaaataccttccttttcatctctctctctctctctnnntctctctctctctcttcctcttcctcttcctcgcaccaccgagacacccagacccgggcactaagaccaccaaccaccaccaccaccgaacctcctctcctccaccaccgaacctcatcatttacccaaaactcaatctaacaacccccaaatctcacctacccaaatctttctctcttcctcctcctcaacttttctcaaccaccatcgccattcatcactgcccacctaaccctcccccaaccaaaagctcattgaacggcgccaccacaccacgaaccaagatcgagacagaccaccaaaaactcttcctcgctatatcttcctcttttgaacttgtatttttttgagacattagatggaggtaaagggtatggttttccgaccaaaatgtgattatcgatactctatcgatggttttgtctatgcacgactatttttgtgcacagacagaaatcattaataaatgtcatcgatatactatcgataacctatcgataaatctcatcgataaattatcgatatatgtcaaattgacaaaactgttacacaaacataaatcatcgataaactattgataagcacgttttggttagaaaacaccataaccacaaccatctaaggtctgaaacaaacacaaatccaataaaaaaaataaataaacacgaagatgaagatgaaggcgaaatctggttagcatctagtcgggctcaaagacgaggtcccctcttcagtatggacgacgctcgtagacaaagatagaggtttggggcctttgggttttttcaatgcttgagtgctatggatgtatggatcttgggcctctgggttttgtctgggtttttagggtagatgaggaggttcggtggtagaggaaatgagattcggtggtggtggtctcgatgcctgggtgtgggtggtcacggtggtgtgaggaagaggaaaaaagagcgacgaataaaaagagaaaaaaaatgaaagagagagtattttgagtagaaattgaaaacaataatatttaattgtataaattaattaaaagtctaaattttattaaaaatatttatttaaccatgtaaaatgaaatttttcttaaaaaaaaatatacaataatataattatttctaaaaaataaaagaaaatcactaattttgggaaaccagttcccaaaaggagggtgagggtccatagctacgcgtattcactttctcagaatatattttctcttcaacgtgatgcgtgcaagaatatgctaaaataaaattgatgaaataataaaaaaacaaatcaaaattattaattaaataaatcaaattaaaaataaaaaaattgcctcaacactctctctctgtctgtaacccatttatgattttcctctgcaattgcatcatcatccttcttcaacccctctctctctctctcccaccgactcttcagattcacaatcacattccctcttttcttctttccttaacttattaaatcaacatttccgaaaataaccctatactttcccttattttacgacactatcccattagggtccggaggttttctagtttcagataataaagagtaaagaccacccgagtcgccggttcaactcggccgagtcagaatgctggttgaacggtgtctgggagttcgccgtgtccgtcagatccagagggcgatccgccatggaatggtgtcttttctttgcttatttcttactgtaatcgtcctacgtggcaccatcggtgccggaaagtttggaacccccgaacaggacttcaacgagatccgtgaccatttgtactcgcgcca

SEQ ID NO: 19507 - DNA, 2951 bp, Cannabis sativa
ttactatttctaatttacctcctcaataaattcaaaaaccacagtccacactttattatccaatgataaataatcagtttacataagtaaaccttaagatagactaacacatatgaactcatatttaatcaaagcataatttccaatgggggacaatcaatctagttccaattctaacaagacctcaataattttgattaaaagggcatgggagacaaaaataagaaaatccaaacattgtataaaaaaaattcatgttcaatttaaaagtttcatagttaatgtttagagagtcttttggaaatcgattatattaaaaaaaatatgctaccaaaactaagatgaaaaagacaatacatgatttttatttgattggggctataatgaattttagtttacgagatagttttataagctcttggcaatggagtttttgttgaatttggctcaaaagtcaaattagtttgaagctccaaatatataattcaataattaagacattttgaacttattatttgtcatgttagttaatgaagttatgtaataactgttgatttatgctcatttcatttacatatggttgagagctgagctaactctcattaaaattacatatgattgaaaaatgagaattacttctcattaattacatataatttggagatgattatttttttctattgttaggctagtttttagcctactttttaagtgttttaatctctcttttctttatgagaatacatatttttagaacaaaattatacttatttttcttgtttcaggtttaaatggtaaaatccatattatgaattgaaaataagaagaaacgtgttaaattaaatgaatatgatgaacttatcatggaattttgtgttctaggatataatggatgaaaatttataagttttgaatgctcaacatattccacttgtgattgaaaattaactctaaagcttcaggctaatttttttgattatgatgtgttcactttcagtgaaaatgttgtgaatgaaagttctagatattttcttaaacttttcaaaacatcttgaataatttaattctgaggaatattgataaaattatagtcaaaataccatcagtcattgtaggaggatttcaaaataaaaaattgtgcacgttgttggaattagtgccacattgcccaaatattgcgtcttggcaccccactatagaggagattgacattttttattagttcccagcgatgcacagtgaattgcaaacattttagctttttaagggcattttgggaatttttgcaaaaaatagtctgagggcttctttttaaagaagaaaattgcaaacttcagggggggagacttcttaaaactttttttctcattttatttttgggttttattatgttttctacgaatttgattatgaatgttttttatggagattgttagctaaattctaatttaagaattttgatttttttttttatagatgtatgatttattcataattgtacttattacatgtgtttgactagccatcttattcatgatttatgatctcaatacaaaatctaaaataaacataggtttcgataaacaaaaatatttgtgtggcttgtgtagtttttgggttattgcttaatgcatattgctaatataattgtatcagagatgcaataattatccttgaaatttagtaccttgatgtctaaaatgaattttggtgaaaatataatctgctaccatactagatagaagaagaaaattgatttgcattattgaaataggaattggatgcaattaaagttaattttcctatatttcattcttgattaaaaattgcttgttgttttgttatttattttttacttagattatttagtttcaaaatttatttattcaattgccaaatggaaacaagaatgcaattgattgatacttagctacagttctcatgggaacagtctcacttacatgagtattacttgtcaaaacgatacgtatatttatgtgttgaatttatcacaatatttataaatataaagctctttgaagagtattttaaattagttcaaggttgaaggaaatatgagagagaacatttgtatagccaaactcatgggagagaaaaatactttgtgagtgtatttttagtgagcttggaaaaacacttaaaatatattattagtgtggaaatttgtatttgtactttgtatatttcctactgaattcaataatatcagctgactcttgtagagtaggagaattattgaactacgtaattttgtgtcttttattttttactactgtaatatattgttgtttattgcttcggcacacaacaaattttataattttttactgtgctttctggttgtgaactaaaagaattcaaacccttactatgaaaaattgagccatatttataggcacatatgtttaatggatttaggtcccattaggatttgtacaataaagtcaattgatggagtaaaatacacttattttatattatagtttgagctattgggccgagtaggggagacataattctaatacgttgtctgttatacacaatagtactattgataatgacagttgaaacgcgagctgttgttggagtagtggttttcacccaaaaaggtaatttcctctttgccgtgtgcttttccaagttctaacaaaggggaaaggtcgctagatttttaaggatcgtgttagaagtgtgccacgtaggtgacctttagaatagtaaactatccgaaacatcctttcgaattctgtactcggatgacccctgacattgagggcatcctccttaactttacatgcttcttgtctctttttatttgggatttgttgtccgaatttactgctgaagagtgagatgagaactggaccaaccatccagttttaactgttctcggtagatgggccgattagttgaccgttacctatggtagg

SEQ ID NO: 19508 - DNA, 1689 bp, Cannabis sativa
aacacatactgaatttcattatttcgagaaagtttcccacttaataaactcaacctccctctttaactttaaaggttgcagggactaaaatggtgaccgcgaatcatttaaacatacgataaaacaagcacttgatttactagtaattcgatttcacaacaagctattagaaactcttgtcacttctgtggccgagttaacgactcagtaaaccgatgctaagcatcattacttatctaagaactgattagaaaaacagcattatggtagatgccatatgatctaccatgatgctgaaaacatgttaaaatgattcttaatcataaaaaaacacaactcttaaacacaaacaacagacacatctaacatctaaacacatactgaatttcattattttgagaaagcttcccacttaaacagcttaatatgcaccaaaacaataatacttcaataaatttccattagtgaaatattcaaaaatgctatcttttcaacaccacaacagttctaaatgcataaacaacaattaatttcaccatttaacaactgcccatttgaaaaaatacacaaaatttcattaattgaaaataaaaataggaacttgaaaagaaagaaaagggaaaatagatgaggtaaaatgcgctaaccttggcaaccattcgttggaatgttacatcttcatcatcaaccttatctttacctttccccaatttcttatctgcaattgattaaattaaattgaattttctcaaaacacaaaatcaaattatgtcaattaatgaatgaatcaattgagcaaaaaaagaaaagtaaataccttttgggtcactgagattggtgtattcacgaacttctctgcctgccattactgtaattcctcagaaagattatggctttcagtagctctgatgataatgcaaaagaaaactatgagtttgaggaagaaaactgtggaaaccgttgccctatattatggttttcctctattaacgggtcgggtcaacccgagtccgcttactatggttttatttatgggctttattattaccatatttggtattatttaagagtttttggcggttaataaatctttttaagagcattcttattaggtattagtgatgtttaacactttcttgacatgtcgcgttgcgattggttagcaatattctctaaaagctattatattaaattatatgggaccaatagctatattgacacataggagggtgttaggcaccactggtacccttcagcttttttctctttttaactatcgttctacttgtatttaatcctccaagtttaaattttggcggtaaaactttttaatatagcaaatttaaggtgtcattcggttaacagtcatcatggactgcttatgtgtatactcttgtacatgtgacatgtttttatattttggtacacttaatactatattatttagaaattatttcaaaatttataatattttttattttttagatattttataattttatttaaatttaaaataaattttaaaataatttttagattataatattagatgtactaatataaacatgtcacatatatacaagaatgtatacataaggagtttataatgacacttaaccggatgatacatttcttaaactttcttccaattcaataatttagagaattttatcgtcaaaatttgtgttt

SEQ ID NO: 19509 - DNA, 4822 bp, Cannabis sativa
gctccggcctcgggaatctccgaccgctcatttcgtcgaatagtttatttaaagtcgcgaagtccggtagcatattcaccgttaaggcatcagcaccggggtcagccacttctccagtggttccggcaactcagaagccatggcagggagcggcgataaagcctcttttggcttcgattgcgacgggaatcattctttggttcgtcccggttccttctggggttacccaaaacgcttggcagcttctttccattttcttggccacgatcgtaggaatcattactcagcctctgccgctcggtgccgtggctctgttgggattgggagcttgtgtactcacaaaaaccctaaccttcgcggctgcgttctcgggattcggggatccgattccgtggttgatcgcactcgcatttttcttcgccagagggtttatcaagaccggtctaggtaacagaatcgcttaccaattcgtctccctgttcggtagctcgtcgctggggttgggttacagtttggtgttcagtgaggcgctcttagcgccggccataccatctgtttcggcaagagcgggagggattttcttgcctctggtgaagtctttgtgcgttgcatgtggtagcaatgtcggagatgggacggagcacaaattgggatcctggttgatgcttacttgctttcagacttcggtgatttcttcagcgatgttcttgacggcaatggcagctaatccgcttagtgccactctgacttttaatacgattcagaagacaattgggtggactgattgggccaaggctgccattgttcctggattggtgtctttgatcgtagtccctttccttttgtatctgatttacccgccaactgtgaagtccagtcctgatgcacctaagcttgcaaaggaaaagttggaaaagatggggccaatgagcactaacgagattgttatgtccgggactctgcttcttacggtaaagcccttctcttgatctactaattcattaatttcataaactagattaggtttttcattatgttactcattgcattcacttcatgaatttgcgtgtcttcttaagctctttgattatgttaaaattaaaatttaaatactggactgatgtgggtttgaacttttttaactggagaccttgaatggtgcaatttatttattttttttaaaaaaaataaaataaaatgtagcatagtgtgaataagtagactgtaaagcagattctcagtaagtatattattcatttgcttaaatttataggcgaaaaaatacttattttgttctaagcactggacttttggggcattcattttatatctgttttagtatttactttaatcttggtttaaaatgtgaattatatcatgtgttccttcagataacttttgcagctcggatttttattcaattgtataatactttatgccacaaaccagtttagtttgacaaattttgtggtgcaaatacactatgtgaatatggataatggatgatagatcaatgtttcttgtcaaacatctacatgttgtgtacaataatgggctcgttttgtttttatatacaggttggactttggatttttggagggatgttgaacgtggatgctgtgactgctgctattgttggattatctatccttcttgtgagtggagttgtgacatggaaggagtgcttaggtgaatcggttgcctgggataccctaacttggtttgctgcactaattgcaatggctggttatcttaacaaatatggtcttatcgcctggtttagccaaactgttgttaaggtttgtacttactttcccttactaattttcttcgtggggactttttttgacaatgatgtcatcaatgccgaattatcatcgcttgacatggcttcatcatacgatttcatatgtgatacgtaattgcagagcatgctatttatttattttgtctttttctaacatactaatatcggcacttctgatctggcaattagaagttgtccattggcttttctttttcttcctgtgaacttaaattattaaatagatagatagagttacatgaatattgtcttggaaattacaagtacgaggagcatgatttttgggtgtttcagtaaaaatatatttgattgaattttgggtcaatagttgtcaagctcatttgcaatgtataaaataaacagtgtttttcgtttaagctaaagtctagagtagaaagactatagggcactgatgaaagagcacatattattatgtatttgctaataacttccaatagtaaccattctattattgccgtttcacagtttgttggcggactgggtctttcgtggcaattatcctttggaattctagtcctcctatatttctactctcattacttctttgcaagtggagctgctcacatcggtgcaatgttcacggcattcttatcggtggctagcgctctggggactcctccctactttggggcaatggtattggcattcctatcaaacctcatgggtggtctgacccattatggcatcggatcagcgcctgtgttctatggtgctaactatgttccactaggtaagtggtggggatatggattcctaatatctgttgttaatatcattatttggttgggaattggaggagtttggtggaagtttattggcttgtggtaggggatttcataattcgacgaccctccagaacagatagcagcattttaagtcctgacttttctgattttcaggatgctagttttcctttctattctttgcttagatataaagtattatttatttttttttcctcttttgggtatacaaaatgttgttattcaaggaaatggagagatggtagagatcttatttgaagttttgactaggctttgcttaacagctgccagcaattttatggcatataataaataaagtgttatcatattctctttcttctgcatccattttttcccttttattttgatgtataaaccaacaataaagggatttttcaattgtacacgtgatattaaaaataattattaaaataacgatgccattataattggctaacatgcctaggaatgttcattgaatgaatttggatcaactattcaatttatcatccgatccaatttaattagatagagtaatccgatttgattcaatgaatgtattagttggatcggttctaaccattaaatgcattaactggtcttctattggattggatttgatccatccaatatattttagataccatttaagttgatttcattaaaaagaaaaagaaatataaataaaaaaaaaacataatttaaaatttaataatttaacatatataataaatattagtttagttcaacctaattttcatgatgctataataaaattgccaaaaaaataaaatttattcaataaacattgacaattttattagcgtttaggaagatgagagttaatattttatatctaatttttttttctttaatcttatgtgttaaatatatattaaatcaattaacatattttttaaataaaatatactaaatatataaaattataaatgtattttaaaaaatatataaatatagttagataactattggatgataattggatcggttcggttcagttatccattgaatcagatgtcccatccaacaatcgatctgctccaattatgatgaatatccgattctattgaatcggttgggatcagatcaatcgattgtaattggatcggatgactttttgcacacccctaatgcaacgcaagagagtaccgctatcccaaattgaaatagttccctctcttagtcttatcatcctttagggtcccctacgtatgattgttatgaaggagctttcttcttggaagaatcatagagaattggctataattgctctataatgcttaaactcctaaactctctctcacattcgtctctatggataacactggagtatgtgatctgtttaaggattctattcgagtatccaccaacaacattaccttgatcctcaaccctagagacgttgatgaaccacaggaaccaaacaacattttactgggaaaagttttgaccaagcataaactagacactgactattgggccctttggaaggatttatgcttgtgcattgaagtagctagaaaatatgggaccaccgcatgtaatggatgcgtgtctccaaaaggtgtaaccttgaaaagtaaatttctggactaaccatttggcaaaaaggtgtgtgaggtgcgcacactaccatgtcctggcaaggagacaaggtctgatcctgtgtaagaaaaaattataatcgtcgctaggaaatccaggtttatgtccaaggtagacgtccatgatccttttaggtgattagcattcgtgataggccctttgagtacccatccgagcttgggctactctaggtctccgagtggtaataagtctttcgtgttcaggaaactaaagtaaggcaatgtgagtctccgcatacttctcgatcttgatctattcatatcaacaatcatgttcggggaaaagaatcttcaagtgacaagactcaacgcttggaacacaaagtcgaggagttgatgaaaatcacaaaaaagatctataggaagaaagttgcacggtgtcagattttgaagaagaagatatagagccttgtgtgaaaatgattatagaggcaacattaccgaagtgcttcagaataccgcagatggaactgtatgaaggaaagattgttggaaatattttaccaggatctagatttaccaccatgtatatttcattaacgtcctaatatgaattctaaaacaat

SEQ ID NO: 19510 - DNA, 2413 bp, Cannabis sativa
aactcaaataatttcaaagaaagaaaaaaccagaagaagataagaaaaactctctgcaaacttcaaatctccacagaatcaatggccaacacctccatcaccaaacccacttggcttcaaatcccagaccccattaatcttctccaacccaaatacctctccacaccaccaacattcccttcttcttcttcctataaaaatcgaatctttagagttagaagcagcagcagcaatggcagccccaaaaagagctttaatttaaaggatgcattagctggggttgtggatgagcgagtggatgagcttatgaacagtgaagagaacaagattatgcttcaaggattggagaaggcttctatgagagttgagaagattaagaatgagattgctgagttagaaaagcaagagcttgaagcccagaaaatgagggaatatattaaccagctagaaaccagagcttctgaggttttgatttatgatttttattgttcaagttttgattttttgagttttttagtatctgggtattttttataatggaatttatggtatgtttgtactgttttttttttacatttgttttagccttttttgtgtggttttggggaaattattatttgtgttttgataaccataaaaatggtggactatgttgtagattgaagagtttatttaattcctatgtttccaaacaatgtatttttaaaagaacataattattataaaactaggtataaattaaataaaaagttatacaatttatagacataatctactttaaggacataattttgtcaaattcggttgggatgtctctatttttaggcttagagaaatttcaactaaaatattcttatatgattgtgtatagtgtaattatagtagacattccactaattttcgaaaatgtcaaaaataaggtttaaacattcagttacacgcgtgctaaaagaaacaagcacgtgtacaactaaatctttgtattctgatttttatattgtaaattatttagatcgtcacgaaaaaaaattgttataattttttggaaattaaagatgcctactatagtattatctatatcctacattttgttataacaaaaatgagttagcattagtgtggttagagtgattttgacttcatttttttagtcctttgacatcactattttgtattttgcttacaataaaaatggtggttactattagattgaagactgtcagaaggaaatctcagaggcgaaagccatggttgaggaagccgaacgctctctcagtcaaagcgaggatggagtgattagtaaggacaaagagagattggagtctgtgaaagcagcttccatagctgccattgttggcactcttgcaagcttaccaatctccttgactcaagtttccactacttcagagctgattcttcctctagcaataacctttgctagttgtgcactatttggggttacttttcgatacacaattcgaagagacttggatgatgttcatctcaaaacaggagctgttgcagcctttggtgttgtcaaaggtacttgtcatcatgacctttttgccttttgctttttacattacacttgaaatttgttgtgttaatcctaagattcacaaggagtgtcatggatatgctctggcatggctgcagccgatgctagtgctcgaaacatggttttcgtactttgagctgaactttgcgagattcgtatttactttttcgagcatttcgaacgagtaatgtttttgttgatatgagaattggttgaattgggcaaatgcaggtcttgctgctctaggtgaaggacaacctttggagttgaatacagaaagtctcttgtctcatgcttttggtggtgcaacttttgtatcccaaaaccttcttatttttgcttttgcttctattggtttagactattgctttaaagcaaggattttgagtcctttccctatgcaaaaatcaatttcaaacaccaaagataggtgatgatatgtaccacttttgtatgcatagtattatagtgacattgttcaataaaatcatacaattttttgccttatctattagagtcttgagcttttttcttcaccattaccaaattcaatccaatagtaagtgttgcattttattcaaatcacataatcaagaacaaaaacaatgattggaatcacaaaatggcaaaggttcaaagttcaatcttttctgtctttctactattttagtgtttccttctttcatcttcatccctatctccactcaacctttcgccatcccaccctcgaagcttgttcctcgattgttcattagaagatggaaggttccgttgctcattatttttcttgccctgaattcgaaatcaaatcagttactcatagaaatataccaactttaaagtaaattctaacta

SEQ ID NO: 19511 - DNA, 4685 bp, Cannabis sativa
actgttgattctagtgtttgcagtccaaatcatcacatctctgaaccagaaagcgctaataattttatgtctgaggaaacagaattaacgggtaagagcttataagaaaacaaatcttctacacgcatatatatatatatattttatttatgccatattttcctctctttatgccctttttatgcactaaaatttgctgttcgtattccttttcttatatatgtctcatatcataattaattgtaatctaaataggttcaaaacaaaatgaagaaggcaatgataggattttggatcaactactatattgcaatagtgaagaacttgatggaaatcgtacaataaacttcttacaagagcacttacaaataaaaccaattgagctagggaagttacgccttccagatttccaagatatcccaaaagtggatttgaagtcttctagaggtggaaagttgccaaagcgtagtcatgtcttatcaaacatagataatatgttaaaagggctaagtagcaaaagacctatgcagctcaggcagggggctgaaagtcctcttcatcatgttgcttctcccaccccatcaaagagtccacttgcatcattgtcagtgctaaaacagagactctcacatccaaattcactaaaggatccattttcatctcatgacattgatgattctccatctccaaatcctccaactattgaacgtaacaagaatacagcacagtctggtatgaagtcacctttatttgaaagagacgagaatcttgaagattctaatcctggatcaccagaagcttctatcagagtttttaatagtacaacacctgataaattcagaaatgatgatagaagtgaactagatggggtaattgatgtgggcttgagtgcatctcaagttcccgtggatgataacatactggatagttttataaacgaagatggggatgcccaggcaagtggagctaatgtcgatgagaatgtgagttaccttctgcttgtttagatctcgcctttagggttcatgaatgtttgacttcttaatattatgtgtttttttggaagatgcaggcagtgacacagtgtggaatgaagtcacgtttgtttgaaggaaatgagaatgttgaagattctaacattggatcaccaaacgctgctagaagtaaattagatggggtaacggatgtgggctccagtgcatctcaagttactatgaatgataacataacggactgttatctggataacagtgctatgaatggaaacttatgcgggcttgatgctgatagggatgcccaagcaagtggagctgatgttggtgacgaggtgagttatcttctggttttccaggtgtagctttaattgttcgtgaatgtttgacttcttaatcttatatgtttcttgaaagatacaggtcgaagacttacagcaggaaacagtagtttccacaaattccggtcttcaccttggggaatcaactccagataatttgaacgggattcagagtcatttaggtataaggtttatctagtgcttcttttgctagtatactcaatctgtgtgcatgtatcaattataagtgaacaatagtatcagtttcttacactatacattatattctgtttcaatgtttgcatgcatttttgttctgtgatagatgaacaaagaccagcttcagctgacggcagatcaacagatatgcactccggagttcctgataatggttcagaacagcatactgaggttgtttcctccgtactaatctaatcacacacacccacatgcatattgttcattttatttcattcatttcaaaaaagatatttaatgtaagaccttcaccccaagtgaattttctcttctgaacttgctattttgctgattaaatctcaacttgtcttgtgaaacagatggttgaagaaacttccaggattccattggctaagaaacgcaaggaaaagtcagatttacagaacgtgaaaaagagaagagagatttctgtaactgggaggaaaagccttgcaggtatgtatacctgtgcacattcagaatatccttatgtctctattgcagcttctgtttttgttgccattacaataaaattgttttgtttataattttgcacatatgttgtcttcttaggggctggtacaaagtgggaatctgggttaaggcgaagcaccagaatcaggtgcagacctttggagttctggaaaggggagagattattatatggacgtgtacataagagtgagtattcactttttagtgtgagcaaatttgttacatgctatgagatagattacaaattcagttttatttcaaaatagaaaaagaaatactgaaattaataggtaaaagaaattaagttgttgtataatgtttcaggtcttccaactgttattgggttgaagtattcttccccagataagggcaacggaaagctcgctcttaaggttaggtcttatgtctctgatgaatacaaagagcttcttgagctggctgctctgcattaggatttatgatttgcattattagaggagatgagtaccaaagctattgaacagtttcatgttttataactaatcctcatcaagtggaatttagtctcaattccaaacttgtttttactaagaaccatgatgttaattttactcatgcttttccttaatgtaaattgtactgtactactgtgtcaaatgggaaaagataaattctttcttttacaattattgactcatttccttactagcatagcaaatctactttttcttgatctttcatttatatttaccagaaaataaaaggaaacaaatgcaagtctcgaaatgcatatttagtcatggtgtaccgttacttatttcttggcaacgatcgtagtctcaatttggcctctcgccatcttttgttcctaccaaaacttcttcaatgtttttctatagaacttcctttattatgtgtactcaaattcagaaaagaaaaagaaaaaaagccaaggttttgggggttacaagagcattttcttttggctctttctttaccgactttgtgatgatttttttatatatatatatattatttttattttacatgccgttaattgaccgttttgtcgttttctttgggttttttttttaagaaaaaaaaaatagtaccaattattttaaaagaaattgtaatctaactgaatttcctgtatcgggtagtcactggagttccacatttttgttttattgtatttatcttttaaatggaaatttgttttttttaaaacatatatggtacaagatctcaactttgcttaatcaaagggattgtgttgagttgaaagagagcggtttgttttttctgataaattatatgaacacaatttcaagtcacaaataattcttttcaagttcctttatttgttgaaacatttaaaatgaaaagttaatttcatatggtctaaaagtaaataagactatctacaacatttgttgctaaagtttcgagaagaaattaaatatattatgtaggtgaaaagtcagtagtttgaggtcacataatttatgtcaataatagtctagcattttcaacttaaaacaaaatagctgaacttttttgagctgacactttgcaggttttaatagcaggtagtacataattatgtgatgaacaaatacaataatgttatatataatcgaaaactgtagctaaagtttgtcattgtgatgaatacatattcatatttggattaacattgtatataaattatcatagtgaagtgatggtaaatatgatatgatttttatatatgactacgcacgttttcttcttccagtagctttttttttacacatttatatatttatatctataatatgactagacttggaattcgagaaaaaacacataattataataaatatattacattcaaagtaaggatatatttgtttagactattttaactaaaattttcatgttaattaaaattagccccaaggaaaaaaagtatatattttagacatgatgtcagagtaattttctttagcaactacttgtatttcatgttaggcaaagatgatggtctataaattatttcatgttcaaagtttcaaacaatgtaattaatattccacataatgaaacagctgatactttaattcagtataaataaacatataactaaatttgactaaatgtttattagtgaaagctatatgccctgaattttgagagcataataaaataaataaataaatgattagtttcagttattttgatcaatttaaataccaaaaacagatttagtgatacgtgtctctctaaataaagaatagaatagatagacacaaacgtcgtcgtctcgtctcttgaagacatcaatttagttggctattgattttgaaaaatataataatttatatatcataagcattattaattagttttgtagaaaaaatgaagttgaattattgaaattcgaaataatcgtagctgtcgttcttttaataattaatatcttttgaaccaaaatcacattgacagatttcaacactttctttgtctcccaaaattattagcctttttctttaaaaaataaacaaataaataaaataaaattattcatgctaattatgatttcttattaaaattttttaaataatttttacacccaaaatcttgaaatatatatttt

SEQ ID NO: 19512 - DNA, 8573 bp, Cannabis sativa
caaacatataccactaagttactaatacatatcgtgctatcaaagcagacaaattacaaatcaaacacaaatgggcatgcccaaattaggcttagccactcatatatagctaccattttatgtcgaactcgataaatttgaaaattcccatacaatgaccaccaaaattcacacccaaatagtcaaaaagtagggagggaaacatcttagaagtcaatcttacgttatactaactgaaaaaataaataaaaattcctattaatcgaaagaacagagtacctggcatcagataaggtctattcccacagacacaaatgtatttgtttgaattggaatcaaatctacactggttagaatgaaggcatttagaacattcatcggttttcggattcttcggaatagtataattgacgttaaagcccatcatcaaagcctctacaaggaaagatggattatgcaacactctagtcgctatagattccataatcgggacgctaatagtctcaccgcattttataactccagaatcagatcaaacggaactggtccgatcaagaagtaagaatccacaaatggaactgatttagtggcgtcacatcaaactcagttgtattgcacttatagattattgtcaaatcgacgttatgcgctggtttcgaacgtggtgttaacgaattcatgggggcaggtctcgttccagaggtctaatcgagccaatgaaagagtctgatcagatgtattgagttgagttggacaactcggtatttgaccaagttgattgtcaactcgttcaagatgttcacgcaggagagtgggaactccgacagaccgcagcgctccgggaggtcgtcgccgatgaagggataagagatgttacggaggggcccgcagttgaaggtcgtattgcagtctgaagaagaatcttcggaggccgtgacatggccggaaagtaggaagaagaagaggaaaccggcgatggtaaccggagagatgggtattgagtgcattgggaaggagtggagtgtggaatggagggttgagatgccattgggtaattggtgatgggtgaagactggcgggaaagtggttgtgagcttgagagttgactgggtgtctttggttgactgtctttcaacgtacatatatatataattattttggtgtgaatgtatgccatcaaagtttaattcagactatttttttacaccgatatgatactaacgaatacttttagcatttctcttaagtttaatatggatttgctgtcaatgtgtcgtagttcatgtaaacgtgtccattttattttattattataataatataatgtcacttttctttctcaaaacaaaaaataatgttacttttatggagtgttttaagaacttctagaatgtcgttggggagaaatatggtattgaatattaacatttataccggtgaatttttggtttgttcatgattgtgaaaactacgcggagaagagataatcaagtttttactcattcattgttttcaaaacttccatgtaattatatattgagtttttcaaagttgtacgtatggtttgaattttctgcaataaaatatttctatttaagatgaagcaaaaaattcaatttcagggacccgatccatgaacactaggaaccaaatgaaagtgacttcgatgagtagtatgacctaattaatttatttgaagttgcagaagaacaattttaaaacattactaatatcccaagttaaaaaaaattaatagagaaaagaatacaatttgaactcgaagggcgaaaataagcatataaaaaaatattaaaaagtggggattagcttccataatatacatgtaatctactattaatataatttatatgcttataattatatatatccaagataaaggctatatagaatttgattatgcaaatataataatatacatacacacattacctaacctgaaggccgattattcaaatagttaagcaacaatttattggagtttggcaatagtttatgggaaattaatgcaaccccgtgacttgtatatatgaattcaggacttgttttgtttgatcaccaagatatcaacaacgtgccaataaaacccgaacttgatacttagagtctcacataaattatcaaacatctataaaaaatattgaccatgctacttaattattttggagggggttgtaggagaacgagaaaaggcatctgagtggtttactccatttcaaatcttattcccatcgatgaaacatggttttccagatttgcgatatttttggattttttttttcttttttatttttttatgtgtatataggtatatataatgtttataaatgtgtgatgtttttgtgaagattttatgtttggtttgattattattttagtttttttttaatgtgatttggatctcaaaaaaaaaaaaaaaaattggtggtagtggtgacggaaagttaggggatttgagaaatctttcgaggaagagcgtgcttgcacatattgattcgcgacaagatcttcaaacccagaccttcttcatatcagagagttgcgttggtggagatagaagaagagatgagatatgaaaaaaaaaaagggaaatgagaagagaaaagaaaaaaaaaaaataattaagattaaaatttataatatttttttatttctaatttaatgggacacatcatcaatgttaggtgatattgcagtaaaaaaattacctcaacaaagtaagttagaggcacataggatgttaatagaatttaatggacgacaaattaaatatgcaaataaatatggagtttggcgggtttagtaaaaaagaaaatagtgggctagttgttacagtaagtaaagtataaggggtttagccccaaataactcactacaaaagtttttttcaacgtgcaaacatgatgcttcatatttcatcctaatgttaaaacttaagcttaaagaatattcaaactttaccttatgtttggtagagaatgaaggtgagaggaaaaaaaatggatgtaatcaaaatttgagattgtttggtaaaacaaaaaagataaaagaaaatgaaaaatagggagaaaaatattggtgggccctactcaaaaattttctccactaaattagacaaacacaagttaacaaaaatatatttttaaaagtgattatagaaatttattaaaatattattcattaaaataaaattaagaatatggttaaaataataaataatataaatttacaatttttctttttatctattttatcaaactcaataccaaacattaacaacttaatgaaaaatatttttcactctttttttctagatttttttccctacctatattttccgtgtcttctattttctttcttttctaccaaaaatagggtgaaaaaagctttgttccagtttgaatttccgaatggcatgtgaaaatggattcagttataaaggttgacgcttacaatagcttgtttcttatattttctgattattaaaatatgaaacgtgtaaataactaatcataatatataattatgatggagttgttgtccaggttaatatctaagggcagtgttcaaaatgatcttaattacgatgtgtttgattgaatttttaggagaagaatagattaaattgtcattaagataattaaattttttacttttgcctaattctaatgatttcattattcatttacatggtccaataaaagttattttatttaaactcaaagttttgaaattttcatttatgatcatcagttgatatcgtatgcttacagtacggaatcccagacccaattgatcaagttatacacacaagatcagctaagagtggagctggcagttgttaatattgagagaggtttgtgttgtgttttgtttaactttcgaaaaatttaaaagaaaaatggcgctagaagaaacgatctctttacactacgtaccccaaaaatatcttacaaattttctaccaaaaaaagttgaaactcctatcccgagctcataggagaatctttatatttgattactgcaatacgatcgaattaatgaataagatgagaacgtacccgaagatgtagcagaaaaagtatcggatccacatctagcgttataagctctatctttgcagtaacatttgaattgccttgttgtattatctgttccacacactccctcagaccttaaacattcctcgcagtagctgttattcgcattccactctattccaaatcctaaatcgatggcaccactcacatcatctgtagttaaattgggggtctctaatttattggctgccgaatccaaaatgcgtagaacaacaccttccccgcaacttggaatatcggcaacagcactcctcatggagtccgttgcgtatacattagtaacgcctgttctatctccggggcaactgaattgctttgcgctaatcatttcggtaagtaaagatgaaggacatccgtagtaaagcgttaggttttgtgaacccacaccataacgaaacaaagtggtattccacgttgcgttttgtcgatcatctgggcagaggttgtcccagtaatcatcccgaacaactgtcagttttcgttcatcccaaatgatttcaatcactcgatagtcaattgagtcaattgtgatctccggtgcatccccactgcatttgagctcaaaatctgggtggccgcaatagaccggtcggccttctccccagaaaggatagctgaggttcctgaatttttctccacagtttaagagcgtgttgttgcatgttgtgtattccgtgtattcttgggcaaatacagaggtacgtaatatcattgttatgatgatgaagatggaggatgcgatatggggaagcattttcagaaacagagaagaagacagatacagatcactttgtaattatgataatgtaaaagatgtgggagatgaaatattagtggtctgttcaaatgagagcatcataagaaagtgatggagttttgacaaactaccctacctactaataaaattattgtcaaagtggaagtttctaatatgtggccaagtcattagctgagtttaggcgacctcgtctaacatctgtttcggttttccattgcgaaattcaattgtccatattcggtttaaccacaccaaaatgaaactaaaaacggccgtaacttcaaagtcataaagtcaaagaaatcagcctcgtgattacatcatttgccttcaaatgaataatactcttgacttctttgtataatacatggcaattgaattgaacatacaccagccaccacttataaatgtcgtgaagtgagctgagtaagattcaaattctatcccaagcccatatctttatacttgaaataataaataaataatcttttattgtatttttagaaccaacaaaaaacataccaaaggaaggagcaaagaaattaatcaaaatagaaaggacaaaagtagttgactgctggtgcggtacattttgtgcaagaagtatcaaatagtccaacgaattcgatcgtttgcaaatacaacgtgtaaattaagatagattatcgattgtgccaactgccaaaatatgggcgtcaccatacttaggtccttctataaccagacaaaagaataaagcctaggtgttcaacttcagagtcctaatttgtcagcttaagaaagctaagctcgacctaacggcgtggtcatagtgacgtagtagctagcttatagacataaattaaaataatttatggatttgtcaccaaaaagtagagacacgagatgtcatatttaaaacaaatcctggctaaattcaatttactgttatttgcagaacaagcaccaaaattagaagctcagactcataaaaacagagaattttctctgtaattgatcggcccaattaaatggttattctagtacgttgttattgctcggaaaacaagttcgaatgatattcgacgtccaaatttggcatttgatagattaatggctgcagtttgtgtacttgaagggatcatcgatgaacaatgtaacatatatcagcttgcatcgaagataacgaaaatggagagagaactaaaagaaaaaacaaattattttttctctatttttctaacctatatttgcagcttggattttattgtggaaatctttgaagcttgtcaacctttattttttgtaaaggtaacttgaagcctatagaaattgttcaagcagccattaacaacttttatgctaaagagggctctaagccaacaaaactaaatctcaggtcttctttggagagattaaagaggattgctataacaaagtgcgagagtggacatggccactatctgtataggtgcggatcagatagaattacttgtccgcaaggaatacatctctgtcatgttcttatatatggctcaattctctaccatttatttcatgtgggacaatgtccacagtacttacaaagtggagagctatggtggaatcataaataagatccaaaagaagctcgacaattgggctagtaggtcgagctcaacttgtccaattcttcgggattagaaattattgaatgagtatttttattattcctcataaagtaattgcagctattcataagctttgtacaccccagaggaaatcgaagtaaacttcaccatacttcttaggaacaagtttgtttaccaaaaaaagtatgttggtattggctttagggaaggaaaaataaatggaacattgctctaatagccgagttcatttgggccatctctagaaagcaagattttctttaggctcgttggattcaagccatttatttaaagaacaaggagtttggaaactttgtcccaaaaggtaagctaagctggtgttttaggaagctaacaaagcttcaaaatatcataagattatcatgctgcgttgatggaggttgtgaagaatgagaggtttaaggtcagaactttctacttatctcttctgcattctaccccggttttatattcaaatgctatctggaataggctttctgtttgtaaacattgcttcattatgtggcaagctataaatgatcatctccttacccgaaatcaccttagctaatttatggtgattccttcttgtttatgccccgtttgtgaagtagagattgagagtcgcagcagcatcttttctatgtttgtgtattctagattaatcatagatggtattcattgttgatttggcaatttctcttgaccaacagatttggaggcttggaaggttttggtgtgagctgcctcagacaggggtggtgggcatggttatgaaggcgattattgtagctgctatgttatgtatttcatttggtgtaataagaattgttgtatttctaatttagcttgtagctcggtcaaagttctaaggaaccatgttaagttagctattaaatctagagttaagagtgttttcatttctcagcttagtaagaggggaagggatgtattaggagcaattaactctttgtaagagtctagatttaactaaagactcagtattcaggtagagtattatttctttattttttaatttttagctagattgaaaaacttgacaggaaaatgatagagatattcagctcataatttcgaaaagattagtaagatgcaaaagaaaagattaaggggaacttaatttgttgatgtttaaatggttgatactgtgtaatgagcaaaagtatggctgatggaagttgatgcaggagaatttatctttttttagctgttttatatttgtttctcaattcagcttcagaataaatggcagtgttttaagaataaacacttctcttagttcaacaatagtagaggccaagaatcagatcacaacaatggtggatgttcaacaattcacacaatccaggtatcatctctcccttggttataaactcttagttcctccacaaccaaaaatgcattggagtaaggaagtttggggaaagtttaacatcccaaaatgtagctttattttgtggatttctgttcagggtaggctaaggacaagagagagattgcatagatttggtattattaatgattcgggttgtgtgctatgcaatgctcaggaaaaaacttgtgatcatctttttttctcttgttcgttctcacaacattgcttgcaaatgattaaagattggttgggttggaaagtttctacccaaaccttaccaagactcttgaggtggattgaaagaagtaaatacagcaagttcaagaaaaacaccctttcggctgtagtggcaagcctagtgtacctcatatggaaggctaggaatgaaaagatatggaatgggaaagatgaggatgtaaatagagtaagttgtacagtcaaagaaatggtgaaacatagaaatagcatatggccgaaacaggttgaggcaaaggacttggagtggtttagaaatttatagatgtaacaacaattatttgaaaatagatacacaatgtacaaatcagatgtttcataggcgaggtccctttaatcgggatgctctttgattgtaaatatggtttattggagtaatgaaattaaagctgattcat

SEQ ID NO: 19513 - DNA, 4427 bp, Cannabis sativa
ttattattattagaggtcagagtatataaatcttagactttctttaatccttatcagaaacataattattatagttcttcatcgtgtagcatcaaaaataaatcaaatagttgataatttgaaccaagattataattaggtgttatagaatggaaagtcataatgtgaaaatgaaacaaataaatatatatatatggatgagtgttgagtttgaattaagattgcttatatataggttggaagaggtgatgttgttaatgtcaagggaaaattggatcatttcaaaaaggaaaatgtgtcattgaatagacttctttggctatataaatgagaccaaccaacataataagaggcaatgagataagcattttacaattttgcattatataataaaattccaactacctctatactccatattcttttttaaaaaagaaaatcattcattgggtttgccttctaggatgggctaataatatagccttaaataatgaatacagatcaatatgggaaagaatcatgattaagatgagaagggtcaagagcactgaccatgataatgggtttgataagaatgcaaaagaggtgtcttaaacaaaacaaaacaaaaaaaaaggtgatggtgagatgagtagaaccattgaaattgaaagcatttgacagccttgtttcaaggagaaaaaaaaatgagcttaaaaaaagtttttgttttccaccaagaaagttggttttgtgggttgagagagagaagtatataggaagagaataaagcaaagggaaaaaaaaaaaaagcactatctatatcccaattggaggggaagagaagaaacctacaaaacttaatggctcagaaaagcttttgcctctccccaaaataataattaataaaaatcagaaagatgggatttctatgtcataatgttatgtgtctttagaaccccatttagctacatttctcctttttcatgaagatgccagcaaagggaaagctacctcttagaactaatatgactttgattcaaagacaaataatggattaggaaaaaagtttggccgcccataattaagattaatctcttgttgttattattattattattactaatgtcatacattaatattgttgttatgtatgtataatttcttattggggttttacttttgagggaataaaatatgcccaataacttattgcaatgttggaggaataatcttaaataatagaggttcactttcttgagtgaggcatccaaacccacctctaaattggacttggggaaaagctataatattctatatggaatggagcatgcttttttgaagagattattgtggacatggaaaaccacatattgctacattcgtgtttcttaaaagggttgaaaaataaggtatcaaatagtgagttataatatattatatatggtctatattatttaatatttgtatatatttgtttttgtgtgaaaggctggcttgaagtctagctgttgacccactttcttagcccaaaagaactgccctaggtagatttctttttcccacattttcttctctttttttttcagtttttttgggtggaattttcctattccaacctaaaattttcataatggaacggcttgtttttaggcctatacaaagacaaaaattaaagtagccattttcagtattgaccaatggaaggaatccggtgccaccagaattgatctaataatagttgttaagactagttgaaattgtaataaatttgcttatctttatacgtatgaatacaacaacatgatcaaacgtcactaaattattagaatatgggttcaatattctgctgctgacttttcatttggcaattattaagcttaaaaatctggtattcgagtacatcttattcttagaagaacaatgcttcattactttggaaataaagatttaagagattgaaagtaaacaatgcattgagaccaatatgacataataaaatacaaccccattgttatgatgaatatgtacccaattcaccaaagaactaacaatttactcaaaacaagtattgtaacgtatcaaggaattaatgagaaaatcaatgtatcttcaaacagaatacaaattggaggtaattaactatttataaacacattaatttatggaactaaaaacatatgcattctaaaatgaaattacataaaaattgtgtgcctcttttttttctttcgttttcctaaacctataaacctcccaaattggctaatctacaatccaaatcttgttccaagtcttatcttatctctaagctctaattatagactttctattccatcaagggaagagaagtgagcatccacatgtcttagagtttcttgatctatttcggttggagtgatcaatgatggcaatgaaaagtttacttctctacttacttccaaatcatttttgccagtctcctcagttaatgactttatatccctagactctaattgaatttctttattatgatgattaaaaagctgagattttacctccaaacaagattttaaatcctcctcgtttcgggctttgtttagcttgtcaacaagctcatttaaagttgaagccctttcagcccacaaatcttcttcacttttgggccctttgtccaactcctttggatcaaccggtccattatcacagccatccaacccactcttctgaagcttttttaatcctcgatcaacaatttgatgtattctctttctgaagttactagttctcagagggttagacctcatcttcaacttcaaacctgagaatgcagcatcatagccatcttccatcgaagcagggttacggtttggtatagatgactcatcgtcatttgatctgtcgggactacttttcactgaaaatagttcctccaataagttgacattttgcatgtaccgatcaaaagattcattttccacttcaatacttctttccttgtattcttttaacttggaaaatctccattcatttatagctgccgcatcctgaaattattttctaagattagaaagaaattgtttggtttagaaattttttttactggtttattattaaaagcacctttctagtcaatggcttccttgatcggacagggatttgcacgttactgaattgagaaaaactgcttgaaagatgccgatatgaagccactctatgtgaattcctgaaacagaaccaaagagaagaaaatcctaataaaaaacagtggcaaatttgaatatatattaagaaagaggcaatgtaacaagcaattatgatattagccaatttaaggaagcattagagctaaatacaatatgctgctgcaaagatgaaaggcaaggctattgttcggaactcaccctgatgacgatgcgtcagtagactgctggtcaaataaaggagaacttgatgttggtgccttatcaggaaaagtggcatttgctttcaaaactgcagtcataatgcagattaaggagaagaaaaaaaaaacaaatgttgtgatctttaaaaaatgacaaggtaattcaaaaaaaaaaaaacactcctagacaactctcaaatatgaatgatgatgaaaataaccactatccaaaatttgaaatattcttcaacaagcttttatcaggaactaactaattcaagatttttgcaatttcttaactagctatgtaattaattgcaaaatccccttaaatttagttgtttaggtgtttagataggattttgcaatttactttatattaataaattatctaattacctattgctctctaagagtaatgatatgtgcacctaattgatatcacatctcctgtaatcaatatcgactaaaatgtttccacaattaagctacagacatctaaaattcaatgttttttgaaaatattttcaattaaaaacatagacagtaaaacatactccaaccaacggcaactcaaaatacattaccaaacaacaaccggaaatcagtgccagctgaaaggtgggacagcaggctccccaaagaggccttaaaaagaatgcaaaatctcatacacattcgtaggcccaagattttttcttttttttttaattaataaatgataagaggttgagtaattggaacttagaattccaagaggccaaccccaaaaaacattaaaaagaaatgcccaatttaatacattttttcttatttattttatttcaaatgtaaaaatcagttgcacaagggttttttttaagccccatttaaaaaatttgcgctcccctcaaaaataaatgttatcatattatgactatttcttctttggtgtaaattttatcctgtgacaccgtcaacaaaaaatatgcatccagagaactccaatcacataaatatagaaaccacaatataattctcaacgaattcaaacaccaaaataaacaatgcaattaaataaaac

SEQ ID NO: 19514 - DNA, 3932 bp, Cannabis sativa
ggcatgatttatgcaactcataatataaatatacatacatgtgtatttttcgtaaatttcttattataacatcttaatcaacttatatttaaaaaaatacgtactattttttctttaattttttatagcggtattgtagaatatgttgtagctatttaaaaacacttataaatttttaaatttttttgaataaattgtgttgaaaacatatttaaagacacatgataaattgaaatatcagaaattctatttttcagtactttaaactattcgaaaattttataaatttataaagatcatattataactataataaatattgttataaaaaaaattttaaaaatattctaacatataatttaaggcgcaaaaattgaataaaagtttataattatcatacctagtatagagcatgcataatttatggatttgtctttatattttactatttaatattttctcttacacctaacttatatattagggattattttaagaaaaaaaatataaaaatacgattgtacggaattttaattaattttacagtttttaaaattttatttacttataatatgacattttattatatttttatattatactcttgttattttattatttttatattgttttgttattattttttgttatgatttttcttttgtgtctttatactgtaaaaatataacaaaatatttgaaggtaaagtgtaaaaaatttacttaattttctctatttaatatttatatttaggtcagcatgttccagaatctggaggccggcccaaaccgaatttcttcagtttcagtaaattttgtccaattagataagtgtcacattggcctggctaggctatgaaaaaaaaaagtcatggttttttttttaaattttctacacttaaaaaagtaatcttagaattgatgtgcaacatgggttttgtccattaagagcataaactattaaatcaatttcaagaccattgacataaaaaaaaatattaaaaaattatggcatttttaaaaaaggagaaaagaataaacaatatatacactaatagtggtttgtctttctccatttaagagatgagactcaaaatttggttctggttcaaccttaatagttaaaaatttacttctatggtagagaatagattagagattgtgttgacccaacaaatggtccacaatcaaataagattggttttcttcttattgtattttgtatcccaataaaaccactttccttagggaataagactcaacatctttagaataataaagggtaataaagtcaataaattttggcaaatttcatgatggtgatgactatgatgatgctatagaccaacaaatttttgcaaataagtatgattatgttgtaggggaacataaacaaatatatacactactaaacaataacaaaagaaaataatcataataataattgcaacataactttagttttaagtgggggccaatcttgagtcatgaatcaaaaatcactatgttaagtttactaacacgtttcatgtcttgggatctctcactgttttttgttgaaaaaagaaaatataataactaaaaggtgcgtgtttgaaataataaggtagatgagtgagagtttgaaaatgatagatcttgacattttatatatatatataaaaatatatgtatatatatatttatataagtgaagtggtagacacggcattgccttttgtgtttgatacttgtttagatgtagatttcaatcaaaaaaatgtagacaacatacttttcacaatcaacaaccccattatgtactttttttcaataaaatttgaataatgccttctttttctatgggcttgactatgggcccaatttaagaagaggtcatttagttttgcttttgactattcgtattatgtcatttttattaaagcccataagaatatatgaagtagattgcccacctttgattttttagtcaaatttatttttccattttagatgctgatgtgacaaattagtttaaagagatatttgtggctagatgttgaacttttgtaggtatttaggtggaatttttgtagtttactataacttaagtacttttcaaaacatgaagttatgattgtgtataataagaaaaaatggagtataatcaataaaaaggctaaagaataaaattatttgaattgtagtagttataattttaaaacttaaatatatacatatatcatattagggtgggttcagggcatgtatctattcttccgcccccgccttgtttccgattagggtataaatatttaaatccatacccgcccccaaaagtcaactcctatcccagctccattaggggcagctacccgaacttacggatataattgtcatccctaattttattgggaatgctctaagtatttttgttattgaaaaataaatttaggtacataattgcaactttgagcttaatttatacacttttaccataagaacacttccaacatcttcgttatcctatcttttaaaatactttactatttttttttaaaaaaaatttacctcacacatttatattatcccatacaacaacttctctattttattctctacatcatttaaatattttatttttaacttattttacttaattaaaatattttatctagaaatatagaatattaagagagagaggtgttataaaataatattttagagcatgaatagttgtagctaaggaatagtgtttgaggtaaaagagctaaacatattgtaaagtgtagctctccaagagtttggtttgcattcttagggtcactgtgaggaaaaaaaagttgtagttgtgttgtgagaaaaaacaactgcaaaaaaattgcgaaaataagttgagctgagcgtttggtaaatcataaattttaaatttactgtgagttgtgaaaatatattacagtgataatgatactgctataatctaatttattataatcacaaatatataaaaacttactttatataaaaattttattttttttatatatttttaattttttttgtcaaaatataaatttatatgcatttgataaaaataaaataaaatatttttatattatattttatcaaatataaaaaaaaaataagaaactcaagtatataagaaaaattttaagttgatgtggtttgttgatgctaaaataaaatgtaaaatatttttttagaaaataatatatttaattataattcttttttttaatttttttttctaatatatcataaaataaataagtaaatatagtttttgtacaaataaatttattatagtcttttaattaaaatattttttttttctaaaaattagattgtaccagcacgtgagtctttccagcatgctttgtcttcactcacccgctttcctaggaggtcacccatactgaaattacctcaggtcaagcacgcttaactgtggagttctttcataatgggctatcataaaaaaagatgcatattgttgatataagtagtactaatcaatcgatttaagtcctcttcaaatgtatagttccatacctacacagtctcaaaatcatcatacttgatcttctccaggcaatgtgggattgcacaacttactctatattttttcttacggattaggagactacttactatcacagcttttaattgtaatttctctataaattattcaaaaagttattttttaattacttaccaaacatatttttattgtagtgcttagaagtttatatatcatattgtacatgttttccaattgtactaaatgtttagttttgtgtaagttttaattcaaagtgctttacttgataattaatggtgagaaaatgggccaagtgtgaacttagtatagaaagcttgccagcagtataagcccattaagttagatcactgggctttaaaccataaacaaag

SEQ ID NO: 19515 - DNA, 1547 bp, Cannabis sativa
ttccgatgttttcaacaactctttaactttattcttccaattttatttcttttctatacgtttagggttttgaacactatattttgacacgatcatagaaatttcaggtttggattttctccggccagcctcaattttcgactttgctgatattgaattacttggttaggcttgaagactctatcacaagaaaccgaaaaggttgagccttgattttcttttttttctccgatgattgaaaatttaggtttttctttttcggataagttttgggtattgatcaaaagtcttgccctagtctgagactggttgcatgcgcttgtcaagcaatgtgttatgtatatttatcggcaatctgttttgcaatgtcgctctaatgtaatgcttgtgtttaggttgatgagtttggtgcagtaatatgtgaagttgaagtttcattaaggcaacatgggatttgacaacgagtgcatattgaacattcaatctcttgctggagagtacttctgtcccgtttgtcgtctgcttgtatatccaaatgaagcgttgcaatcgcaatgtacccatctatattgcaagccttgtttagcttatgttgtgaaaactactcaagcttgtccctatgacggctacttggtcacagaagcagattccaaggttccttctttttgttatttatttatgtcttatttgtgataattatcttttgggtagaattgcagacattaaccttaaattgtttgttgcagccacttagtgaatcaaataaggctcttgctgaaaccataggaaaaatatcagttcattgcctatatcataggagcggttgcacatggcagggatctttatctgattgtacatctcattgttttgaatgtgccttcggaaattctcctgttgtatgtaataggtgtgcaattcagattgtgcatcgtcaagtacaggagcatgcccaaaactgcccggtgagtctccatttttaaaagtgaaagcttaagaactatttttctttcgaagaaataaacgacttttagcgctttttttgactaatttgcaacattgttcaacgacagggcgtgcaggctcaggcacagcaggtagtgggtgctgcagaaacttcagccgctggcacagcaagtactactgatcagccccaaactgctactcaggtagcagttgtgacttctcaggtccagccttctcaaactacagctgccacggctcctgggaaggatctcaatcaacagtcaatttcaagctcccaaacccaagctgttgtgcctactactgaacaatggtatcatcaacagcagcagtatcaacaatattaccagcagtatcctgggtatgacttgtatcaacagcaatatcaacagttttatccataccaacaagccgcagctccacaatatcagcagcagtatgcgcaggcccaagcaccacattcttctgttcaaaatcaatcccaggcgtacatgcaacctcaaccccaaccccaaccccaaccccaaccgttggctgtagcggctactcaacctcaaagtcagccc

SEQ ID NO: 19516 - DNA, 7489 bp, Cannabis sativa
tagtacataaataatcacttaaatagtgaaattgaatgaaattagacaaagtccttaaattcaacaatctcaataattcagaggcataattaacgaccttaaaaattcaggggacatgatttggttcatgtcaaagttcagggagtaaaaatcctaattaggcttaaaaaaaaaattaaaggacctcaccgcaaatatcttctttgttaaataaaataaaataaaataaaagaggagagagacaagtctgtgtacgggaaaccctagctgggagtgggtacattttacgctaaagcttgctcccatagttccagtttcagttctatcaacccaaacccttaacacagaatcaacgccgtcgctccactctcaatctcactttcaatggcggacccagttgatcaagctgccaaatctgtctccgatttatcaatggatgcttcatctgatactatgagcaagaagtaagtttccccaaggaccctcacgttctctctctctttttttttttttttaattattataattttatttttattgggggatgtttctctctgtgtgggtgtcaaacattggagggaatttgaagaaatgaaaattaagctataatatgtaatgtattttctattatagtggattatgtctaagctacttactagtacattttcgcattttcagaaccacaaatgctaattatactagtcagggtttttgttccttaatatatatacacattttcttcttttctttatgtggtgttcttacatttattttgtttggttttgcttacagtgcacgcaagaaggagttaaagattaagcagaaggaagaggaaagacggcgaaaggaagaagaaaaagctaagcaggtactctctttttggttatcatatagctagtcgacatagaaatgatatcgggtatggtgaatttggagaactgtggataatgtatgaactgtgattattcaatttcttaagggagttagaagctttaagtatgtcttccctttgatttatgaatctgaagatgtaacattacatggtgggattgaattgaagtgcatgattcgtacatcagtttcttgttttctgaaaattttcaccacaactgaaatgttttatttttatgatagctctatatcttgcacttttatggttaaatcttttgacattgtaaaatttgtttacatctgttaggctgctgcagcacctagcacacaggctaagaaatctgcaacagctgatgatgaagacatggatccaacggtataaatacagtcatcttcttataagaggtgcataatgaaatattaaaacttctttctcatttgacacgttttctgcttcagcaatactttgaaaacaggatcaagtatcttgcatctcaaaagacagaaggtcataatccttatcctcataaattcttcgtatctatgtctattgttgaatacatagagaattatggaagcttaagcaatggggagcatcaagaggatgttacggtatctttagctggtatgaaagtcttaagggttttttaacaaggaaagtgttgggtgttctttcttgtttctgttaggttgattttatttttcctttcaattatgcaaggccgaattatgagcaaacggtcgtcttcctcaaaacttttcttttatgatttacatggtgggggtgctaaggtccaagtgatggctgatgccaggtattgttttattttcttttttcatatttaaatctgtatgctcaaataacatgattttcctgtcacttttttttcctttgttggtactagatctttggaattttaagttcctataattacttgattgttattatgcattttactcctcagagttttgtgctgtggatattaatatttattatttactataaattgcagcaagtagctcttaaatttaaatctgtttgcggacaagttttacttaattttaaaaattttaaatattcaatgcttatgttaattttgtgaacttgaaattgttgatattgtgagataaaaatacaattactatggtatcattgttttcctttatttattttttccttttaatcttttaatgcagcaagtcagacatggatgaagctgaattttctaggttccattcaagtgttaagcgtggtgatattgttggtgtctctggttttccaggtctgagtctctactgctgcctgctaactgtttgatatttttttttcttgaataaatataatatcgtcataatttgatttggattgaattgaaggcttgttcattgtagaaacaagaatcatctggtaaataattaagtaggcaaaagtacgataattaagagacatgaggaatcagtctgaaagagcaatatcatgtgaaaaatctcataataagtcatgcttattgtttctaaacttatgaatcatatgcagttctttgggagattaatctaaatatgaagtatgttgtcaggtggtaagagaagccatcttcactgagtcatagaaaaaacacccaaaactaattgatttgcaacagttttcaaaatcatatgcctttcctgttttttttttgacttcgcctgcatcatttgtagtagccttattttgtgtatcttactagactgtaattactggtctgtttgggttgaatgactccttataactgcacttcgctaattgaagtaattttaaattttttaggaaaaactaaaagaggggagttgagtattttcccaaaatcattcatggtcttatcccattgtcttcacatgatgccaaggcagaaagctgtgactggttcagagaatacaaatttgaaggtaagaaaaaaggttatacattctctttgttggttggcttattcatatgtgtatataatttattaattctgcagaaaactgatgcatgggtccccggaagtaccaggaatcctgaaacatacatattgaaagatcaggtattagttttctttcctcctttttaagatcatctgctatatgtatgattggaatactgtgctaaatttggcacaaaaattgttcacgtaatttatttggcacaaggcattgtgctcctgcaaagtagcattttcagatgcaaattgataactatcagtaatatttattgaaaaatcagttttgaattttcattttttattcttcagtggcagtattgtaattataaaagtaagctactaggtaggagtgggggtggggggaccaacatttgaacattggatctgtagatgtttacgttcttatagcgcctcaattaagcaccaattgtgtcaatgataaaaagaaaattgaaattttaaaaagacctattatggcttctataacgcaaagccttttaggaagtatgaaggataagatccaaatttcataccgttcttagcccctactgaagtagcttttttttttttttttttaaaatgctcaaatatagcaatgcatcacttctttatcactccactgaacatgctctaagaacatattgtgcttatcttggtctatgcataccaatgttgtctagctttagaatcacaatccttgatgtgtatttctttattgagcacatttgatatattatattatgcacacgagttgcctcaagcataaaaaaaaaaataataataatatatgcctagatgtttctacaatataaaaaataagcagtttatattatatactcttgtgatcctgtatcaattgttcagtaacctaccttggtttttcgaactgggtatccttgctaacagctttttctagttttgtggtatttatttctttattttaattctctcctttgtatgtatactcaatgatatagtctatttctgttttaatatttctttcattttattaattttgttagcattttaagtgtttacccatttattttatgattcagttataaatgtgatttttttgttttgatatatggtaggaaactcgatatcgccaacgttatctggatttgatgctgaattcggaggtccgacaaatttttaagacccggtctaagatcatttcatatattagaaagtttcttgacaatcttgatttcttggaggttagtctgtgttacgttatgagtttgttcagcttatattttattgcctagtgtatatattctatagtttgtttttttttgcacacggtttttaatatttgctcactcttttttctcttaatttttgttccattcaggttgaaactccaatgatgaacatgattgctggtggagcagctgcccgtcctttcgtgactcatcacaatgatcttaatatgaagcttttcatgagaattgctcctgaactttatcttaaggagctggttgttggtggacttgatcgtgtatatgagataggaaaacagtttaggaacgagggtatagatttaacacataatcctgaattcactacctgcgaattttatatggcatttgcagactataatgatctgatggaactaactgagaaaatgttgagtggtaagggttggatatttgttagtacacttttattattcttcatgtgcttgccttttcaaatttcatttcctcaagtacctaggtgtgtttttttggctaaacattgttcatctgaattaggaatggtcaaggaacttacgggcggatataaaattaggtatcatgcaaatggacttgatgcagaaccaattgagattgactttaccccacctttcaggtatggaatatatctactttttttttttatttgatagaatatatttacttgtaatggaatcaagtgcttttaacatctggataacatttttattggtttgacctattgcagaaggattgatatgatcggggaattagagaggatggccaatcttaatataccaaaggaccttgccagtgatgaagcaaacaaatatttgaaggatgcttgcgtaagatatgaaatcaaatgtgcacctcctgagacaacaacccgtttattggacaaggttagacttcatttttttctcttttatgtgttcaaactttagcataatcacgtttaatagggaacataaaagaatattgtttttttttcttatgttgtagcgtcatgagcttggatgctgagtttctattaacatgcctaggcactgtttggtttacttggatgatgtgtaggagattttgaattttattttgtttcaataatttctttcctatttagttatgtaaatctaagtcattgaaaagcttaattgatgtgtgataaatgctctcttcatcagaagcagcacataagactgcccgctggctttaccaccttccttgttggttacaacttacaatatgctggctaggagattgtttttttttttttccactagaattgttaatgtgtaagcctcagttctcacaaaggtgattgggataaagtgtgtctgcattatctaagttggttccttgtaattctactaatactatcttaactattagcgtaagagagtatggtatttaattcatacaattgctgtaacatgttattcattgttgaaaattcctcgagtttgtgatttggaaaattttatagctcttttacaggacttcagtcaacttccattttatttttagtatatataacatcgagtctaccttttctgcatgcagcttgtgggtcactttttggaagagacttgtgtaaacccaactttcattattaaccatccagagataatgagtcctctggcaaagtggcatagatcaaaaccaggcttgactgaacgttttgagttattcatcaataagcatgaagtatgccctgtcaacttttagagtttgcaattccccttgtgttaacatagttatctgtttttgatctttaaccatgtttctggtcaatcttttattatccagctttgcaatgcgtacactgagttaaatgatccagttgtacaacgacagcggtttgctgagcaactgaaggtattatattcttcttcagttgtgtacttgtttcttgtttagcaagtttttttcctcaaatagttgtgtggttcattaccaggaccgggcatcaggtgatgatgaagctatggcctttgatgagacattttgtactgctcttgagtacgggttacctccaactggtggctggggattgggtattgaccggctctctatgttatttactgattcccagaatatcaaggtatgcaaatctctcttttttggtgccctacatgttagtgtgctgctcacacgcctgttcagttctcacccctcgtttaaagagttgctcacgttcactataattttgctgggtgccaggaagttctacttttccctgccatgaaaccacaagacgaagctccaatcaaaggtcctctactttttctcccttcggttttttgaccttcaatagtcttaaacggttaatttaatggattcttgattgctttgcttagagtttaacaaattgtttaccattctttggcagttacagcggcttaggaaaattttgagactgctcattaagctcgccaaaaacttttagcagtacttaagcatcacattccaattttgctggggaagagaggcagtacaaattattattttgtagaatttgatgaaacaatcggcttaacatatacagctgtgatagttgtgatatttttcctttattaatttgtttgtgaagagattaatggtcactatggcttttactttcgtttgaatgagaatgtaccaagaaatgaaaaacaatatacaccatggggctgtttggatgtgatttaatggtgtcaactcatatcttaaaactaatttttggtttttttttactattttttttttaattctacatcatgacatgaaaccattccaccttgatatcaaactctgggtttgggtttgaggtctgagtttgaattcgaggtttgggtctaagtttaggtccatggttcaagttctcgatctgtgttagttagggtatctgggcaaaaattaaaaaaaaaatgttaggaaaaaaaatatttttaaaaattaaaaataatatttgcaagttttttattttctaattatttgaaactcaatttttgaaaaattgtttttgaaaaatttggctaaaagttatctatgttataaaataatataaaaatataaaatatgagaaaaaaaaagaagataagaagatgaagagagaaagagaaattaaatgagaaattaattgtttatttcaatgaggtgaatttttatttatacaaagatatgactaaatgaatgtaataaaggaaaatacaaatgatgataattaatttagtgatttggaaataaataatatttcataacactccttgaatgtccataaaaactctcaaaaaaacattgttgaaaaacttgttcaaaagaaaaaaaaaatgcagtgtaaactaactcaccctcatttaggccttcgtggagatcttctaatcgacgaattccaatcttgtatgtcgtattctcaaatgttgatgctggtgataa

SEQ ID NO: 19517 - DNA, 2520 bp, Cannabis sativa
cttttccaagacaacaatgtcaagtttatgctttttgtggcgcttatggcagctgcagtgagaactcattgcctttctgtcaatgtttgatggggtttcagccaaagtctcagagagattgggatttgaaagattactctggcggctgcatgaggaagagtcaactgaattgcttgaacaatagtcttccaaatgatgagaaagacagatttttagaagtgccaagcatgtctgtgccagaaaatgcacaatctgaaccagtacgaagtattacagaatgtgaatctacctgcttaaacaattgccattgcatagcttatacttacaacaccaatggctgttcaatttggacaagagatctactgaacctaaatcagcttgctacaggtgacagcaatggaaggacactctatattcgactagcagcttctgagtttcaaagtactaaaaaaagcaagggaaaaattgttggtgttgcagtaggctctcctgttggcttaatagttttactatgcctaattttgtacttggctttgagacatagaagaaaaacaattggaatgggaacattagcaggcggttcattggtagcatttggttacagagatttgcagaatgcaaccaagaacttctcagagaaattgggtggaggaggttttggttcagttttcaaaggtaaactaaatgactcgactgaaatagctgtgaagaagcttgaaagcgttcaccaaggagagaagcaattcagaacagaagtcagcacaattgggacacttcaacatgttaatcttgttcgacttcgtgggttttgttctcaagggactaataagttgttggtctatgattacatgtcaaatggctctttagattcacatcttttttgccaaaatgactcatcaaatgttttggactggaaaacaagatttgaaatagcagttgggacagcaaggggtctggtttatcttcatgagaaatgtagagagtgtatcatacattgtgacatctaaccagaaaacattctcttagatgttgaattctgtgctaaaatagcagattttggactagcaaagcttgtaggcagagaattcagccgtgttttaacaaccatgagagggacaagaggttacctggcaccagaatggattgcaggagtggccataaccccgaaagccgatgtttatagctatggaatgatgctatttgaattgatatccggaaagagaaactcagagatttcagaagatgggaaagtacaattcttcgcaacccgagctgctaggctaatagtggaaggaggtgatgtccttagcctattagacacaagattggagggaaatgcaaacatagaggagcttagaagagtttgtgttgtttcttgttggtgtatacaagacaacgaaactcaaaggccatcaatggggtgtgttgttcaaatgcttgaggggataatagagatggaacttccaccagttccacggtctatacaactttttgttgaaaatcaagacaacatagttttctatacagagtcatgctcgagccagagttctcatctacttagtgacatgtcatctgcttcctatgagtccaagagcaacatctctactatgtctatgtgcttaattaataactgagttgaatcaaatgaagatgtatcatacacttgttcaaagttttttctttactgaaggcagcgaaaattggtcccattacatgaattgtgaatttgttgcctgtagttttggctttgtattgatttataataagaagaattcaattcatgatattacaaaatctcttaaattattgttgaggctttattaagaaagcaatattgacaaaacagatttcttgaatataaaataatggaaagcaataaattaaaagaggattgcattatattctgcaacataaagtcttaaacattttctggaatgaagactttattccaataatgtcagcagtgttttgacaggcatatgaagacaagagttaccttgcatttgagtcagagtcaactggagcccgtcttctagtttcgaagaaacagcctcaattgatatattttttttaagattattgttatgggaaagtaatatgataatatgatttgtttttataactatatagttgttttttcgttgttggtttttatattactgtcacgtgagagaaatatttttttgttaaaaaaacatatgaaaattagtaaaaaaattcgtaaaaatatatatataaaaaaatcaaaatctgtaaaaatgtaagaaaaaaaaatctgtaaaattatatatatatataaaaatttatttattttaaagtgtgttgtgtaaatgtactttcttaatattgatatgacaaagtagaaaaatgtagatattgttggaatttaattggttagaaagaaaattttactaataagtagtagtacatcagagtatttggcagttggcatcttgtgaaagtgatctaaatgagatttcctagagcttaactatcgaccaccatttgcgttaattttgg

SEQ ID NO: 19518 - DNA, 9313 bp, Cannabis sativa
  modified_base (8394)..(8397): a, c, t, g, unknown or other
ttattattattattatacatactacaatattaataattatatatgaaactaaataattaaatttaattagtttaatatatcataattgatataatcatttagtttatcataaattatttagtttcatatatgattattaatttttaaaactgtataaaaaaactaaagtaaaaattaattgatttaataaaaatatttgattaaaaagcatcaaaagaaaaacaataattatttttgttcagaaaattattttcaaaaaaatatatatcaaagaaaaaaataatatttaaaaaaatattcttgtaataaaaaaagtttaacttaattttaaaattaatttaagctagaaaatactatattaaactaattttgaatttttttcatacaataataatttgaatatttaagtaagattattatatagttatttatatctgtcaggtggtatttagcaattgggtactttaactttttcttcattaaccatatatttttcttctcacaattatttattaatttttctgatattttctttttaaatcaattattttttatttagtattaatttctttattttttttttaaatttaataattgtatatgaaactaaattatttactaataaactaaattattataataataattgagagtatataaataattatatacaaactattagtttagtatttaatttcatatataacgatatattataataaattaaaaaaagtaattgtctaataaagtaaagtaaacaaatatatgttttatctgaaaaaaaaagcaagcaattatatagttatcacaaaaaaagtaaacaattatattgttattgataaaaaaaaattaaacaatatttttaagtgcagataaaaaaaaaaactctctaaacattagttggtgtgccatttttccattggatggacagcaaaatggataggattctttcataggtgatccggctccttaaataaatttaaataacattaaaaaggtgatgataaagctactagaataccatattgggatttagcagtgtggcactacatctccaaaatcagtattatcaaggcacgttgtactttatcaataatgaaccctatattagtagatataagtgtattaacattgtagtaacatcacatgagcccttttgacttcttgtgattctcattgacacgtagctgtgacatgaaagtaacactctcgacggcaggagctgcactagctttgcttgtgagattactagtgctattacagattgcaccggccatgtatacaaggatgagccacatgtagatccaagaaccacaaagtagtgatgatacaatattaaatgtaagtgctcttcctaaacttcacttataaatagagttgtgcaactcaacgtagactacatgagtgtattgtaagttgtcctgttatattactttatatcaatccttacaatatatatatatatatatatgttattttgtggtggtctttatttgttcattgcttaagcatgagaatgagtatgggaaatgctaaaatgtttgttttgatgatgatgatgatcttcataggacttggagaaggtcatagaaaagatttaaataattgttttggcagtggtaatacaagtagaggttggggaggtggagttggtgcaagtggtggtgttagtgttggaggtggactaggtataggtggtaatgtgggtagtggtgctggaggtagcactagaggaaatttcggtggtgggttaggtgcaagaggtggtgttggtggtggagctagtggtggagtaagttcaggcactggtagtagagtcggaggaggagccagtgcaggtgggaatattggtggtggagtaggtttgggtggtggcatcgatgctggaggtggagcaagtgtaggtggtggttctgtggttgttggtgaaagtggaagtgcgagagctggtggtggagctacaattggaggtggagtaaacacaggtggtggtgctagagtagaaggaggagctagtgctggtggaactattggtggcgctgtaggtgcaagtggtggtgttagcagtggaagtagtggtggagtaagtgcaggcaatggtggtagaactggaggaggggaaagcgcaggtggcaccactgctggcggagcaagtgcaagtgctggtgttagtgttggaggggcaggaaattcaggcggtggtgtaagtagtggtgttagggttgttggaagtggtaatgtagggtctagtggtggaggagctaatgcaagcgggaatgttggtggtggagcaagtgcaggtggtggggtaagtagtggtgctggggttgttggtggaggtggagttactgggagtggtagtgcaagtgcaagtggtggagctataattggaagaggagctgcaagtggagtaagtgcaggtggcgatgctagagctggaggaggagctaatacaggggaaactgttagtggaggaccaagtgcaagtggaaatgttggtggaggtattagcgggggagctagtggtggagtcagcacaggtggtggcagtagagttgggggaggagcaagtggaggcagaactattggtggtggagcaggttcaagtggtggtgttagtggaggagcaagtggaactggcagtgttggtggaggaattagcagaggagctagtggtggagtaaacataggtggaggtggtcgagttggaggaggatcaagtggaggtggaactattgttggtggagtaggtgcaggtgcaggtggtggtgttagtggaggagcaggtgcaagtagtggtgttggtggaggaattagtggaggagctactggtggagtaagcgtaggtggaggtggacgagttggaggaggagcaagtggaggtggaactattggtggtggagcaggtgcaagtagtggtgttagtggaggaacaagtgcaagtggtggtgttggtggaggaattagtggaggagctagtggtggagtaagctcaggtggtggtggtagagttggaggaggagcaagtggaggtggaactattagtggtggagcaggtgtaagtggtggtatcggtgttggaggtggagctagtacaggtggtggcgtaagtggtggtgctggggttgttggcagaggtagagttgatgggggtggtagtacaagagcaagtggtggagctataattggaggaggagttggaggtggagtaagcgcaggaggcggtgctatagttggagggggaggaaatgcaggtggaactattagtggaggagtaggtgcaagcggtagttctagtggaggaattaatgaaggagctaatggtggagtaagagcaggtggtgatggtaaggttggagaaggagcaagtggtggtggagctattggaggtggaataaatggaagtggcagtgttagtgttggaggtggagcaaatgtaggtggtggtataggtggaggtgctggggttgttagtggaggtggagtttcaaggagtggtagtgtaggggcaagtggtggagctataattggaggaggagctacaggtggtaatgctagagctaaaggaggagctaatgtaggcggatctgttagtggaggagttggtgcaagtggtagtgctagtgatagagctagtggaggagtaattgcagacgacaatggtagcactggaggaggagctagtgcaagtggaaccgtgagcggcagagtaggtgcaacaagtggtgtgagtgctaaaggtggagctgctacaagtggaactattaatgatggagtaggtggaggtagcggtgttggtagtggaactagtgactgatatgttagaacgtcaatggtataagtatgactagagattgactcagtataaaaataatcgaccaatggatgtagagggtgattgtaaatgttgggtcaagtttaaaatgatataatgattagttactaagttgtatttataatatataattaattattttctatccttaaaacatattaaatgagtcaatcataaatctattttagtgtatgcttaagtattgtaataggaatataataatggttccttatttaaaatggaatgaatacatattaaagtattttattgttaagaaacaacacttacttattagtataattaactcgtgtagaaaaatatctctctcaaatatgtttcaccagaaaatttataacatttctacaatatttactataaattacatgaaatacgtttttgaatatgaatggtaacttgttcatgaatgtgacattagaaatgaataaaatattgagtaaataccaatttagaccttattttttgtaaaagctaactatcagacactctattttgttaaataacaaatcaaactttctattttttaaaatggtacaaaatagtaccccaagctcaatttttatcaaagtaaaacttaataataacctaaccttgaggtgtttgtaaccagactgattacattttttgcatctatttatgctagaaattcagattggttattgttatccgcatttttggatggagacacatggcataaaaggaacaatataatctaaaggactcagtaattaaattcccttaattaaaccaagtcacggagaagctttgcaaatctgggaacaggtcaagaccgagagatatgtggagatttatactgccttatttcaactttcgagacatggaagccttactaccactcagggatccgaagtggcctaggttcaaagcttgcccaagtgatactcaaattaaaagggtacttgtaaggcctatcacagacgctgactgcccaaaaggaatgtaaatgtctaccttgaagatgaaaccggatcgcctaacgacaattatgctttctctgacacaagatcagatcttgtcccatgtgtcaggccatggtagtgcacccatcttattccaagatattacttttcaaggtaaaatattttagcaacacgtgttctatacgaatggtggtcctctattgtccagcttcttcaacgcacaagtacaaatccatccaaggggcctcatagtcaactctctttgcatatattttactccattagtaggccttttgttgaaatcctaggcgggtcatgggcatgtccatacccgccttttaacctataaatatccttctattttcataaaaaaggggggatcaaaaccaagatagccaagactctgctaaaattgctttaagctttcctcttctttaagagaaacgcaaaatccaacacgtcacctctcgtttctctagacataattgcttactgaccttattcctaaataactttcagattgattactttgagagttaccgatgctctcttgatcgttttgataataacaacgtgaaccctccctatcttgtgctcacctttcacatgcatgggttctagtggatctgctatacccatgggttcttgactttaacctgctaggatctatactcgaccttgtttcttgaggttcctctcacactcgcctttgtcttcaaaaaatatttgacatgcatcccctactcagataggtgtgtgagttgtctctgtcattgtgatttggcctttatgggtgtctcggtggtcaacttgatccaggccaatttcctacccctcttgcattgtgatgaaaagatccttgattcccagattgtgcctacctggtattcacattcatgcaagatcactctggattctcaggttgcacattcccacagtttgtaaatacatgagaagttcctagatcattaggttgagtttcttgatttctagtttttcctggattctgaggaatcttatcatccactgggatgtccctcgcatccttaagttgatcctcctgagtgttcgagggatttctagggttattcccctaggggtatccccatgtctcttgattctagagcctctaggtcttcctcaaggtcgtatagtagacatatcgagttggtttggaggggcatcgtcttgtgcagcccttgcagctgctacatcacgctccagttctacatttcttcaatttgattcaaccagtcactattaaagttgcctattttctagttccactaatggaacatatcttgttgcatcgtatgcatcctcgcttcgcctctctaggatttcatctcccgtttgttcaaactctccaccatttcttccagaatggggattttcagtggtattcgtcctgtgagaagtctgatgctcctttcctggacgttgagtcatctctcctagctgattctttcatttcgaggaatattgtcttccatgaatggacaattttaatttgttttcaaggatggtgttcttttgagatgttgttacaaggctctctatgaaagtactaaactgttaacgcaaatttttgttaactaataaatgaactttttttttgtaataaatgatctttagagttaattaagtaataattaataataatgtagcaataaatgacaagaggctttttacgtaattttgaagttaatttttcatagtacatgagtcttatttaaagtttgataaattatatatacataatacaatacattattttgcagaatgaataatagatatatctctctttcttttctccaaaaaaggtcgtcccttgttccctaggtctgtccctatttatagtagtctagaatgacagttattctattgggattttatcacttgtaaacattcatgaaacgtggacattttccacatttcatatttacatcacatgggataattattgataaccaccataaccactctttgtctttatctagagacggttatgctgactacgcttcatacttctcgcaattcaatagtacttttttgtatacttcatcgtgagccagcgtataagtatatgttgtagtattcattgcgtttttctattaatattgagtgaggtttacacgagaagcttattacaacgttacaaaagcgagaattttttaacataatcatgtgtatgtaggtcggcgagctgcaaactcactaacatactcacgtggatatgggtcaatgaactgcaaactcattatctactttttccaaacaattctataatataatatgtttatcctcaaatggattttctatatttatctcactggtctcatcaatcggtagttattacttgtgtctcactattgtctataaaatattgagttcgagtatttctatcaactgtatttctcggggcgagttgtctggatgcatttattgatgcataattagagttggttcatattccagcgatattacacatgtcagtaccatattacttatgggtataacattactctttgataatataaatttatacttaaaaaattcttttttgtagtctaatgatataatcaatacaagtaatttattcttcaatttattagttcataattagagtttgctaaaattattgttttaactataagggtgcaaagtggagtcccatgagctttcagcatattttcacttattagggtggaaaaacagtattttatgtcatatttctcaacaatttctttgagcttggacccgtcatcataaacggcatcttattagccaatgaggatgtctctagctgcctcctttgacagatcatcaactacatcttttctccttggcttattacatcattctgaaaaaaaatatcttattattattttgttaactaaagttgtaagtattcagtattgtgtatagttgaaaaaatttcaaattaaaaaataatttggtaggacacgatctcataatagtaattatttgggaagaaaaagtattattattttatataataatatgttagtatttatctaattctaccaatagttagaagggttgcaataagaatttgaatacttcaagaaacatattaataaaagtgaatataaaaagctgaattgtttttgctcttgataaatataaaaagtgaatataatgaactcattcaatattttttttttggtagaagaactcatcaaaatgtgaaactaattaaaagcataaactaaagtaggaatataggattagggatcaactaaagtaggaatatagaattagggatgtccattcaatccaattcgtacaatagttcaaatttaatctaattcaatttgtaaaagtgcagattggatcggttgctttttaatattaaattacttaatattatgaaaaaaaaatattttttttacataactagcaacaaaataaaacaaattataacaaattcaaaagaagaaaaatatttgtatgtatataaaaatgtttaattttactttaaattgtatatagaaaaaaattatatatataaaaatagaatatacatttgatttattaagttttaaaatataattgtattatatgtattagattttnnnnttattattttctttacattaaaatgttatttttttataaatatatatagattggattggatcggtaatatccaatccgcacaagtacgaattttaaattttgaatcagattaaatcgtacagattagattgaatcaactattttatgaatagccgtatgtaagatcacaacaattgatgttgatctcgtattgaaatagaagtataaagtaagtaaagtaagaatattatttctttttaataattggcttattcttttctctttttttccttcataaaaaaaagttagggatatgtataactaggtagcaattgtactaagttattgtagatacatgattccaatctcaatttttatgattttgataatatcactttatcttttattttaaaaaaagaataaaaagtaatctcactatcatctgtcaccaccttcccaagcttgttggaaatcacttgtttgattatatattgatacttataagttggtgcatttagtaaaaatttcattaatgtttttatatataaaaatatgtttgacaaatgtttttgtaatatattaaaacaaaaaataaaaattttgatggattaaaaatattttattcaatttaatttaaaaaatataattaattatttaataattaattaaaatattctgatgatcaaatttaattaccaatttttttagttgtctaatttaatttttataactaattgtcaaaataatttgacaatattaattgtgacaaagactttgataaaatttttatctgtcttgattattttgaggttttctttctgtgtatatgtatatgactatatgtatatgcatatatatatagagatatatataactctcatttttagttgttcatggccgctcaaaagaatgtttttcttttaaattattttgattc

SEQ ID NO: 19519 - DNA, 2458 bp, Cannabis sativa
  modified_base (966)..(975): a, c, t, g, unknown or other
aagaaaaaagttgaaaaaacttagtacaattaaatatataaattttataaaaaaaataaaaaattattaaaatagggtgttttaaaaaaaaattgggtgtaaataaattttccatttctttttaattttgaaaataatttttaatagactatttacttgtcttggttaaaagtaggaaaattctccaatacaacctcttaaaaagaatacaccgttgtatctaatttgtttcgccatctgaaaatattttttagtctatttttttttcatagtcatatacgttatagttattgaaaatatcttgtaaaatttgtagaaatttaaaaaatttaacacaacaaaaataggattcaaatagtttattgcacgcgtaacctttttatttttatatgcatgtgaaatagattaattgaacattactttctatattctaattgtaagtgataaaaataactgcaggggtaaaatgtaattaatttgcaaccttagaagtaaagaaagaactaatatcatgatgtgataggccctcaaagaaatgtatcatatcactttagaggaaagatagttcaagagaagcggagctcaaacaagaaaagatgtggagcataactccgaaaagagaagagcaaaactctagaaataaagaatagagcttgaagaattcaaaaaatgaaaagaggaagcatgcaaaggaacatacgaaaatcaatccacatggaccaatctgaataggaaaaagagaaggacatataggaaaattaatcactgtaatttttctctaattttatcagtacaaattctgttattgtcttaaacagagcacatataaggcccaaaatcttgatcattgggtctagataaaaatatgtagtatcggctacttccaagtgttctttcaataaattcaaaacagtctatactgacgaaactggaagaaaattatagttttacaaacattgggtactnnnnnnnnnnaaaataaatattaaatttatgccgcttacaaatataaaattttgggtaattatgccgctatttactctttctaaaataattctccacaaacaaaaaagataaaaaaaaaaaaatattaagggtcatttttcttcttagcccaatttctcaccaaaactgaatggaatgtaatctaatgatccaacgaatacttctgggcctgaaaatgaagcccatcaatttactgtttctttccaacttttttcttaaattttttgagctggttggtgaagcaacaagaacctctgaagaagaagaagaagaagaagcggttttcttgagcaggattgggtgattttttctgggcttagtttttttaaaaaatagtttttgaaattagttaaccaatcaatcatatatagctccttaaattaatttctcctttgagctccaagattctccaaaaccccttcgctcacccacttcgagatgatgaagaagctttctcgtctactgttaacttcaaggtacttccaccacttcaactctactttattctgatatccattctcttttcatcgccacaaaccacaacttttacagtttttgagaatatttttgttaaatcgctccttctgtccatataaaggttgaaactttccataagcaatggtaccatatatgtttatagactgtcaatttggacgccttagttagtttttgtgcttgtgtaggtgtattattggatataattaatttatagttggagtttgctctacattttactataccctgtttacttaacttgcattactgtgtgtttagatattggaagctggggaaagttatgaaagtagtagttttttaaaccttaaatatattatcatttgtttttcctacattactttttggagtcaatatgagcacacaatctccatcagggtcagttatctcttcaaaatgtagctagaagattcttgttttgtaggagattatagtataattttatcaatgtcatgttctggtaatttggttatggaattcaacattataatctaccatccaagattcactttccatcccatgtattatggttcctggcttccatacacatttttttatttatttgattattttctgaatccttgtagtttttttctttccctgtttgtttatgaattacatgctttccagctccgtttaagttatctgcattggattataataaaatgtaccatagccatggtctcgtggtttctgaaattgcaaattcgaataaaagtgaaaacataataataggaaagagaatgggaataggaacagaatggaataatattttttctcgcattgaaatagtctttccttccattttaaaatggaatagtcatttcaccaaaatagtagaaaggccattacattggaatgacattttaatactttaacatgcaaccaaacaaaaaaatgaaataaaaattgtttcatttccattccattccatttcatt

SEQ ID NO: 19520 - DNA, 5331 bp, Cannabis sativa
  modified_base (3624)..(3625): a, c, t, g, unknown or other
ttccccttcgtaggtacttggctcaaagttggtgactgcttcccttccattacatttgatagctgctttatcatatgccctggtttccagaaaatcaaaaggaagacgtgttggatggaagcctaatgaggttgagaaggtaataaattcagtttcaggtagagtgtaattcatgatcattaggaccttgcagcttctacttcgctgtcgaatagcccaagatatatatacctgcatgcaagcatcgtaacctccatgatgtaaacgcggtccccaatttctgtttctttttctttgttttcattcattcattcattcttcatcttcttttttcttattgaaatatatttgatagtttgttttacacagaacaacaaaaattgaaaaccaaaaaggaaataatttgcaacaattgtagttcacaccaatgaaggcataataaacttccattatcagaagtataaattgaatgataatattttttaaaatagttcctcacttttttcctaggaattgtcccattcgcgcttcccatcggccacatttgtgcagcgtcactcctctatattttgagcttcccctagagaacccagtgctctgtctgcgtagaatgtgtacaaactcttccttggtcaagttcttcatctgagaaatgaccaaataggcaaacaatttaagtcttatagcactatagcacccacaaaattaaacaaaagggtattcagtatttctttcagtgaaaatagtatcacattaatacctgctttaaatcctcgtcataatcgctgagattgaaattaatatcagcatctactcccctgaacttgatagcagctcgatcataagctctaaaatccaaaaacccaagtcaaccaaatgcatatgataagcactgagacaacaaataacccaaatgcatatacaagaagaaatttacctagccgcagcatgggcagtgtcaaatccacctaaagcaaggtccaaaaacaaaattcgtcaaagttttccaaaaatagaagatcataacagaaaattttctaaatgggtagacttaaaaaagtcagtctctaataaaataattaaatccatacccagatacacttgttttccacaatccctggtttacaaaagacaaagaagaagaaaaacaaaaggagaaatagtcagtcaaaggtgtaaacagaatcataatatatatctatatatatatatataattaacagatattatttatttccctgttgaaaccctgaattgcttaaatacaataaatgcattaattatcaattagaactaagcaaatgaatgatcgaaatccatacacatacttgatttaacaaagacccaatttcatcgaaacaataaacaacacttattgaatacaattcaagaagaaattgactcaccagatatgcgattcccatcttccagtcctcctatagaaggtcacccctctatactgtgagctccgagacctgggccccctcctgctcttctttaccggctgtggctgtgggtttagaggcggcgccgcttcaagcactctcacctcaccagacccactctgatcaaaccccagctcgatccagttcctcctcgaagaagaagaagaagaagaagccgacgaaagctgcccctgccaatccttaaaatctccatttcctccaccacccatcgggaaaagctctttcgtcaccacgacgtcgttttcagccccaactttcaggatatcgaagctgaacgtgtacacctcggaaccaccggcgcgtgcggagcacgactcgtcatcacctacgttgctagacgcgtctgcattgacgattgaagaattagaggtcccagactcgtccattggagtccccgaaccttgcggaaccttatcgagaaccatcgacgagtcatcgttacgagccgaatcggccgagtgcacattcagattaagatccaacatagctattattattttcttcaaaattcagctccaacacaaagaatcctccaattctcagctcccaacccaacactatctattatatcaacttcgctcgctctttacagcttccgaaagttcgatcaataactatcactaacaaaattaatcgaacagacaaaattaagcggatcagaatcaatcaatacaaacccattccacacataatcaatagtcaaacacaaaaatctagagagagagaataaaatatctagataattcaaaaaaaaaaaaaaaaacacaaactcaaacaaactcagattaaagccaaagagataagaatcaaaaacctgaagaagatgaagaagaagaagaattagttacagtaactgtgataatatctctccgttcaccaaaaaccgagggagagattaaaacaaaaaactaaaaaatcggcgatggatcgaccgagaaatgtaaaacgacagcgtttaaggcgtaagtaagtgaagtggcattggttattaaaccggcgaggagttgagtagccggcgggaattcatcgccgactagagaaaggaaaacaagagagagaaagagaaagagaaaggaggaggaggaacaatttccgacccggtttaaaaggatggaatatatataaacatttttctctttctctctcctcttcacttgttccatcggttaccggttattattattataattaattaattaattaatttttaattaatttttgtttatttatttatttatttttggtagtggcaatggaattttggttattacccctacacaccagtctctgtcttactactcttctcctcttctcacagtcttgtggtttcttactcgaaaggaattgtgctgtaaattcgtatttgtcgtgttggtttgattcatatttttttttcgtaatttttaaaatatgagtagtactgtaccgtgttttataaaattatgagtcatattgctactatttttaagaagtaggttcgattttttcatatcatgtgtcgatttatttttatattcgggtttgaatttttataataaaatatttaaattttgttttaaatactataaattatttgtaattttttaaaaaattttataaatatcttaaataactacataatacaatacaataattattaataaaaaatatgctaaaatacttttttttttaatattagaataggcaacaatgaatgtaagaaaatgattattgcgtttggttagagataataaaaaatagaatataaagaaaataatttttattttattatttttattattctaaaattttatttttacaacaatagttaaatttggatccaatctaatttataaaaatttgatgaaaaaataaatttgtctaactaacactcttaagaaagaaaataattattaattttttcattaaatcaaaatatgtgagtagtaattaataaattttaacatttctctaccaaagtttcagaatgacatgactaatttgttctgtctttttatttcaagaactataataatgaataatgaatggatgtatgtatgtatggaaatatattaatttcaaaatgcataatttatgagctttttgtaacatttattacattctgcatgataataagtacaattgtttggggtatacacatataaatatatatatatanntatatttatatatttatatatagaagaatgaaaagaatggtggatatttgtgttaagaatcatgtgttagagaagattttaactggatatttcacacgaaaaaaaagagagtagaaagtgccatcccctccttaacttttcttttgttctcatacctacataaagtagaaatatatatttatatatctatcatatatagagatgcatttttaatgagtattaatagaaataagtaatattaaaacaatttaagtttttatatttaattaaaaaaaaattcattttatattgtacgagttgatattatttcatcaaaaaaataataaaaaaaagtttttttactaaaaaaatataaaaaaaaaattagttttacttaaatattttttatttatgtaaaatttaaaaaatatattttttgatattttatttagctaaatttatgtattaatatttttaaaattaatattatacataaatttatttagtaacctaatattagtagtaatactagttgagagaattgttttatatgtatgaataattttatcacttctaaaatggtcctcatgtactcctatttattttggtattttagagaatttttagttttaattttttatggtcgtctatgttgtagttatttaggacattttgtaaaatttttaaaaattcagaaaaaattaacacgtcaaaaatagagttcaaataatttatttcacacgcatataaataaaagaatctcgtgtgcaacgactctttgaactctcttttctgcatgttaaattttttcgaatcacttaaaatttaacatgatatcttaaataactataacataaataactataaagaaaaaaattgactaatttttttttaaaaaaatatcgaaacaaataaatagtgtatcagtaaacttcttttaaagagtgtattataaaagtatccaataaagatttagtacatgtaaatgtaatgttttaattaatttatttattttgtttgaattattaattgttactattttgatgtgaattttgcagctacacataaattaaaagggacaaaagagcaatgggaaacaccttacttatttatgagtggtggtcccatagagaagacctatgatagagtatagtatacatatatttttggaaatttttatattataaattagaaacttgtcaaatctatcccatataaaattgttttttaatatatattaatatatatacatatatacacatatcttttggcaaattaataatcattcctacgttggatatgattagagacaaattgttcaactacttaaatatgtctttcaatgtgattagtgtcatttctattaactaaaaaagaagtaaaaaaaaattgttaataatgtagttttgtttttattttagttaaatgcaataaaaattaatattttgtaaaaataatatgattaaaaataattcactttcttcaaaattattttaatatattgtggtaatttaggtgatgggtaaatagggatacaaaatatatatatatatatatcctataaatgaaagtgtgtatttcatttaagggtattaataatttaatatgaactttggtttgtttataattatagcgtaaattgcggtataaatacataatatttttgattttatacacttaaatatttaatatttatttttagtggtaaaaatacctaatgttacaat

SEQ ID NO: 19521 - DNA, 8604 bp, Cannabis sativa
  modified_base (8560)..(8566): a, c, t, g, unknown or other
tagttagggtgttacacctaacttgctttcacttgattaacaatgttattatacatcgttgcttccttaccttcgtgtaaattctagggtaataaccctagaccgcatttctattaaacttagggtactaatttaccaactctaatttaattataccttgagtgcataattttttattccaacatatttagtatggcataacacccaaaatctttaattactagggtaataaccctaggccatataactgctctttttagggtaataaccctaattccggttcttaactaatcacaaccatagtataaaacatgagcgccaccacacttaactctatgtaaaaactactgtcttacctgatgtcccatgtacgaggagattctaaatccccgggtgctcctaatcaagtgccggtaatcctagtcacaatttctaatattcacaaatagggttaatccctaaatcactttcaataatcacataattagcattacatttatagattaacatatagagctcaaaacgagctttccaacggtttaaagaacgtccaaaacggagtcctgagtcaaaagttatggccaaaacaaatttagccttcccctgatacagtccaaccggaattcggttggaacagccctgcgccaaccggaattccggttgtctgggcagaaaaaaacacgaaaaatctcaactttaaagcccccataacctactcaaatcttccctaatcatcaccaaactttccagagcatcatcatataatataatgaacatattttacagctcaaacacaataattgcaacaagaatcaaaaagtgtcattgttgagcaagctttgagttcttgaactcaaacttgctcaaccatacaattaaacaatagcaacagctcaattaggtctaacccttcaataaaacataacccaattgacagaaaccaaaactaaatcaaaaatcacaaagtgccacaattactcaaaaattcacgcttgaacttcaaagcttcaaaccttcaagcttaaaactcagaaatccaagcataaaatccataaattcaacctcaatttacagccctaaaatctcccaaaaccatctagatgcataactcaataatttagcaagctcaaacaaacaaaaagctatcaatttatttcaattttccacacatgcatcaagaacacttacaacatataaacatgctcttcaatcaccaattacaacaacaaattcaagaattaaaaatggtagaaagactaccttaagctcttccaaagccaagctccaaaactccacaaatccaacttgattcaaggccaattttttcaagattaacaaattgtaaagatgagataaagagagggagaagggggtcggttttcaggggctgagaaacaagaaaatgcatttcatttactcacaatttcattttgtgcaaaataacccaattaggcaaaatgacaaaaatgcccctagggccacaacataacatatactcaaatcaagggcaagaaagttattttcatcacatacatactcaaataaaaattcaggtcattccaatatcaataaaatgccaatataaaatcccaaaaatgtattttggccccgaactagattcgacctgaaatacacaattgtgactataccgcgctgacttgtcagaaaatacctgcagaaggacaaaacaagtatactatataataatatagtccataagcacgtcataatatttaaattacagttttacccttctcaggtcaaaattacaaaaatacccctggctcaccaacggggtcttaacatgtcatttatcaaattaattcacatataataaattatataataatataattccatataaatatacatttaactagttaaggtttgcttatccgttttactaatgttaggatattacatattatctcgccaatatttaacgggggaatagttattattcttatctcgcatttgcttatgtgacaatgagtttgaatatttctatcaaccataatttattgaaatgagttacttaagttgcattaaataatgcaatttaacactacaattattgagctgattcatattcctcctgaagtacacgtgttagcttctggttgatagctgaattttaggtataacaattgtcccctaaaaagtactttttaattagaaaggactttttaaatgtcttcaagggtattatcgtattttttcatttaaaatttgcatgcttagaatttggcagttcaaaactttgaggcacatcatttctcttttaatgctcagactgttattcttttcttgtacaattcccatccgtttgatcagattacacttaatcgaacggttgccaccttttagatataaattcgaaattatgcaccattttttccattttaatcttacgaaccttcaaggcttcgaaaaaatctcaaccaccttctaatctaaatttgcatgccctctctgtctctcacatttttcttgcaaatctcgtccgattatactcattttcttaaaaatcaccacaacccatcctttcgattataagaaattccatcacgaagttcttttttacgcaaaatatctcatgaaaccagtaagtggtatttctctttactgattttttttatgctttcagtttcaattcttggtatgggtatctcttgtctgcattgttttgatgcttgggtagtttgattttgagtgttggtatttctagggctagaaaatttaaggttatacgattcacagattttttggattttattggtgctctattttttccaggaattggggcattatttttattatcatgtcccaatttatccctgaatttgcaatcccagaatctttagaatcagcttgtcctcaattttatgccatagaatataggcccgaacctcgaggaccccagaccatacttgcaattaatgatgagaaaattaggaatcacctcattaaatccaatcaagaagaaacctctagccgtcataggcaatttttgcaagaagttattgagggtaggcgtcagtatttgcgagaagcagcttggcttgaaccctcaaacttagttgatatacccttagcgaggcctatgtttttacctcaagtcactgttgctttttcgccaggtgacttagactttgagataatggctcagaaagctcgtaaatcaaagacacttcaggaccccacagtcacctttgaagctgagtcaatagagtccaaagttaggtccattggaccttatgttggagatgttttaaggtcatatggaaacaagaatgagcagggatgtcgcattaggtctattgctaagggggagttcagctgttatccccctgaatgtctagtcctagatgaatgttgcaacaccagtgagccttctagaatagacgcttagacctacgaggatataagagttggggcagttcttcctcttaaagactacttcaatgacttctgtaactacctcagtattgccccttctagctggcaccaaactaatgtaggatattggcatgtttaaagtctctctaccatattctgaggtgggagtgtccgaccccactaaaaattctttgttttattactgttaaagcctaccctgcaaggaaacgaggtgcgagaggtttctactatctcaggacccacactaatgatcataagatcgttgtgagattacccaacaaaaaggagttcaacgatgacttcttttgcatcactggtcttttccccatcaacacaataaaatttcaaattatacataagtatagctcttctcaaaaacttaaatttgagttttagttcaatatatattttccatactttactttactaattcctgggatttcacaaatagggttaatctcataattcactttcccataatcatataattagcatttcagttacacataaacatacagagctcagaacgagctttccaacgatatacggaacatcccaaacagagttcggattcaagagttatgaataaaataagtttaacacccaatctacctagaaaaccctaggcgcactgcgacattcacagcccatgccgcgaaacctgggttaaaaacccataaactccaataggcgggtcgcgacatgcaaagtccatgccgcaccatctgggtagaaaacccaaaaataccaattttaagccaaatatcaccccaaactcatttcaaagcattgataaactcaaattcattctaaaaccagtcaattaatcatagagaactcacatcatcagcaattatgctcaaaataccaaatcaaagttcacttaaaaaatatgatcaaacataatcaacataattcctcaacatcacatacttgaataccaagtttcacaccaactataaattccccaaaaaatacagagttaaactcagagttctagcacaaactacaaccctaaaatctcccaaaaatcaagctagaggtaattcacataaacctactagcttaaacaacacaaaaaccactatatttcatcccaattttcatcaagatgcattcaactctaagcaaacaccaaaaacatataaaatcaaactcaagaaacattccaatatcagaatttgaacataaacaaaaaagggtttaaaggcttaccacaaatcacaagcttcaagcacaaaaatcaccaaaaaatcactctaatccaagccttagattctattttaactaattttgaagaagatggtaaagagagataaagagggggtcgactaggggatatacaaccagaaaatggatttctatattttacaaaattgattttcttggtaaaaatattatggatggtcaaatgactaaattgccctcaaggcataataatgacataaacaatccacaaggttaaaattgacttccagtcacaaatataacacttaatttttttcaggtcttctcagttatcccaaaattccaaaattaaatcccaaaaatgtattttgggccccaaatcggttcggcctaaaatacgcggttgtgactgtactacttagacttaataaaaaacacctacaaatagatagaataaatatattatataaaaatatagctcatacgcacgatatatcatacaaattacgattttacccttctcgggtcaaaattacgaaaatacccctggctcaccaacgaggtcttaaaatgtcatttatcagtataattcatgtaataaattatataataatataatttttcattaatacatatttaattagtcagggtttgctaatctaatttcttaatcttaggatattacaatagcgatcacttggagacccgtttcaactcctaagatcgagaaaaggcatagggttctccttggccttccttatggactgggagtggctgatttcctgctacatgagaacaatttgatggcttgtgcccttcttggtggatagcagtctaccaatgatttcaaggtcccaaaattttctaactagtagcaagttccagggcctgccgacgaggagtaccgggactatgtggctcgcagccattatatgaggaatgtgatgcctcgggaagctgaagatggtgcctcctgaggtaataactttagtacttgtggatggtccctaatcgttcttaggattgagcgaacaacactagtttaatttagagatagccaatataacttctacatctagaactgtgtataccttatctctcacaggtttagttggtaccctaaacaccacatgcaattgagctgtaatagttcttattttgggatcgctaactagtacgacactaactttgataggactagacattcagattgggacatgtctccacttaatccctttgaccttttcatgattactagttctttggaatttagtaattattatagctcttcttccttgtctgatgattatggtaatattcttaagtgggagtttaactcaccctattttctgttttaattatacaactgtttgatatttcatcttttatctcgcatatatggatctagattttgaggatgtcttatgcagcccctctggttcctccaagcaaaccaagaagcgcacaacttcatcaaaaactgcctcggggtcaaatttagagcctttgaagagggtaaaaaagtctgccaacaaaaagcgtgccttgacccaacttacaattgacttagagaagaccccagacacttcctctatccctgctgctgtgagctatggtgaacaagccctagggcctgttcaccaagttaaattctctgtatcccaactcgagatggcattcttggagccctcttacccctacccacctttgcaggtattgagggctcacaagtatgctcgctgcatgctactaacagttggcatcattataagacttttcgacaggactactaggatttgatcaataggggtgattttcaaagtctaacagtgaggagtgttgatctcgtgcattcagttagtccccttttatttggaattgatataatatttcttttatgtaccttcccctgatctcgctttttgcaggcatctcttttatcctttgtagctcaacaaaggggcctccagaacatcaaccagcttaacactgagcttcacaaatccaatgatcaacgcaagttttggctagggaatggaatgactctcagtttgagatttctaggttaaagaaggatgttaaagagaaaaagaaagcccacaaggctgagcttgaggctgctcagaaaaaagccaaagatctccttgatgcaaactagaaggcccgggaaacgatggatgaagttaacaagaagctcgagaaagccaaggctgatgctaaggctagagtaaacatgatcgccaagtgatccatttatcgagcttggttagcaaatctcaaaatggacctgagattcttgggagccaaaactgaagagatgcatgctttctatgagcagactaagaaggatgaggtagaaaatgttgaagatgaagaggccaaagaagaagaaggacccactaagtctccaaccatgtagacttagtttttattattttaattcccgaacaatggcctttaagccgagacaatggtttgccccttgtggcatattgtaatatcatttaaactttgctttattggatggccaacattgctatttatatatatatatatttacttttttgccattttatcttgcttttctcgagttattaatgtttgtctattgcgttttcattcacaacaaaatacttttctcgatttagcttgggatattttttagggttacatgtttacttaattaagtgcatgtttgtatactaattagttattaccctgttatttcatatgtgagcatttaatattttgctgtgttatccgcgaacagttaatattctgctaagcttttcgtgagcagttaatactaccatattaagagcaaactttaaatattttgaacagtttctttttttttttttaagaaaaaaaaaactgcttttaaatatttttgattgctcgtatgagtagttaatcccctattcatactttagcttgcatattagtttttaagacacgatagtatctcgtttataatacatgctataatatgtgagctactatttattcagatcacacttagctttttgttattttatgagaaaaaatatcacttacaactgctattttaatttccacttgaagaaaggtttcaagatactagattttataatgtcctaggatagttttttatcaaatatcctttctttcgtaaaaaaaaattaatttctaggttttagcaacctaattttcttttgcatatatttctaggtggaattatacacatgtatgcccccaagtaagtttaaagaaacaaaactttatgattacttgaaatattgaaatctttattaaaaataaagaacaacaattacaaagattaattcaacattacacgataaattactggtaatacgaccgtaaatgctcgctcttccagtggtcttttattagcgagccattaagcaagaaatttgtaaaccccgattctaactatagcttcaataatatatgggctttcccagttcgggttaaacactccagctgttggatcttgcgtatttgcaaatacatgcattaacactaaatctgatactttaaaaagtatttttgaactcttttattaaagtatctggtgatacagtgttgataagcaacattggttacttgtgactctgtgcattttttaaacagatccaaggagatacttagaagttcttaattttgttcttgattgtagaattcacgcatgttggtcacaatgtttacttctatatgtagcattgcttacgagccaaatgccaataaaaatggagtgtgtcttgttgctatttttccccaggtgatgtggaattatacaactactagtcttttcgttacagatcacggggctctaacagttgcagtttgactcatgtcccccttgatctcattttcccctggtagtgaatagatcaacccacataatcgtcacctttaattcacctatttgttgagttttatgccctaaatnnnnnnnatttcaatataatcagatttactgattaatatagatca

SEQ ID NO: 19522 - DNA, 4296 bp, Cannabis sativa
tacccggtgtttccccttacggatcacgggactactaactgtcacacaaatgaatattacaacaattgtattttatctgttcaagtcatgtatttgacaattctaagccttgtttttataatactatgatattgtagtagcaaaactattattcaactaatgtgcaacttaattgcaactaaaaatgttaaatgtgaacgtgtatctgtaagaaactatttgtcagtatttttttttgtcactgatcgataattacgtgtaccttaatagtaatatgtggagaaataactgttagtaaaatgtttataaaattgttatgcaactgttatgaaatattaaaaatcagaacagtattttcacgtacataactctatttacatgtattttcgtgatttaatatgaacaaattcgccattgaaaatttagaaaacagcaaaaatacatcagaataaatattttgctatagtattgatgtaatttttttattatacttgagttggattgtttgggaactccagttcaactttttgagatatgcatttcatggatctgaaaaattgaagtcagcacattagttttatgcgaattaaattgaatttttagttgaattgtagttttgtagtaatttctctacacttttttttcatgaattcaaaacagctcctattttgattgatcctggtcgtcttttcaggtgacgtcgccagaattaatggtggttctctttctggtttatttttatttcggctgtgttgggttgctaggtgattgaccgaaggttgcataacacgaacgtttcaatctcaggaagtgtggaccgtatgtttttttttattgaaaagaaaaaaacctttaataattttcttattattattatcttttacttaaataaagatctaaatgaaaaaacctttcatcaaccactttgcttagtccacacacctatataaagttccctatcttatcataattcttttttaatgaatatgaattacataaataagattaatatcacaattcgtagttaacttagttctagtattgttattatatgtgaagtattaattaactgtatttttatagctagaatctagacagaaatatcaatggagttattaacagtacacaatagcctggcacttcatcatttgcaatttgaaagcaataattcaaaatccaattctttttttaggttgatcactcattacatttcgttcttatatcatcattattgatgttatttgtttttacttatgtattcgtttatatataaatgtacaagaacttagagaagaatcattataatgcaaaaaatatatatatagaataatcttagctggtttcgaatacaagctaagctagattagtcgctctctaatactataagactaattgagtaaataattaaaaataaaaaaactaaattattatgtatattatattagtctaagaacttcaaaatgttaaaacaaataatataaaacatatttatatatataagtacaagtaaaggtcaaattgtaataatttgaaagttaagcctttggggaggtttggtctgctcaatatttgtcgtgactcttagtgtgaaggtcttcatgtgcatagccatgtgagcatgtgcccaatgtcctcctcctctccatgtctgaccccctccataggaccatatggcccaaagccttttataatatatatatatatatagatatatattatatttaactatctgactttttttctcatttgataagatttttttttttttatgttttgatatttagagaaattataacttaattgttgaaaatattatctcacatggactaaaggtaaaaatattgagccatatataaaaacatggggttatttttgttcggatgtcaaacgtttttgcaccatttggatctcgtgcggcttggctaagaattatgaaattctatctcaaaaccaattggcaatgagtaaagtagtccatatttttatatatggctcaatacttttacatttaattcatgtgggacaatgttctccaatattaattatttgtatttatattacagtctacgtatatatataattatagttaggcattttatctggttttgaaaaattttaaataacgtacggaaactaaaatttaaaataataaattgtgttaagaattaaaaaaataaacagtatataactaaatatttgaatttgttttcaatattttaaattattcaaattaaatttttcgaaaatagttgaaatattctataggtacaatgcaatgatgcatgtatgtagtcatgagaaaatttgagttataatttatataggtgctagctaaaagtagacaaaaatagtactgttatatatatgatcattattatttcttgtttactacttaagttatattttagtactcctgaatataaactttggggttttttaagatagaaaaataaccattaggttcatgtacatttgttctgctagtgcatgaattctcttgcttagtccaaaatatagcctttaatttggaagaagatcaaataaatagacaagagatcatgaagttatttcttgtgattgtgcatttagtactgatgtactttaggtttcacagctcattttggccattaaattttaactgtatggaaatcattttcccttaataatttatgacatatatattaatttccaaaatttgttcaactactatattataaatataaatcaattaataattaatatattttttaaaaattctttttattaaactgtttttgtaagccacaatgaactaatatatagtcaataaaaatattgaagtgaatataccataacccatacaatcattgaatttttgagctagctagtggtggataatttttgcagcctattataataatatcaaataatattattgtattggataaggttttctttattatataaatatatatattatgataaaagaagatcataaaatcttaggaagaacctaaatataataaacctctaatttggtaccagatttgcatgtgaaaaggtcatcatggcaaatctatatgcaataagtccatgttagctaggccggggcaagcaaggaacaaaaagagagcaaaatttaattaattaaataacatcgtttaatgatttatatatatgtatatatgaatatatattaagattttagtgtagttatgaaattataaataaatttaatattaaaatgttagattgtttgtagaaaaattgtgtaaaatgttatgatcatatgaacgtttattgaacttataaatgcaaacagtgaattagtgcgtaaaagaatttgattcagtagtttgtttggtaaataaagcattgttgttttataaacaaaagttacgtatattgttattaataataaatatagtacattaaatctcaatatattatgcatattttttttatatatatattttttttgtaatgtgaggaaattttagagcatatattcaagtatatatataataactagggttattaggggacttcatgaagctctctcaatggatcaaaatatttggaataaaattaaaatagaactagatgaaattataaagtgctccgaaagcttaatatataactccatgcatgattgattgtggtgttgaagagacaaagcaatataatgggagagatgcatgaacccaaaattctgaacatgaaggggccatgatttaagtaaatgggatgttggctattcctaaacaatgccatttttgttggttattgaccacttgcaactattttattaatgaaagaatttaaagtagagagagagtagaccacttaatgtgttgaagcaaagtcttggtcaacctaaattacaacttcataaattgatataaattactccaatagtggttcaaccaaaatataacttactctcactcaaataattggttaactgttgaaattgaaattattcttaaaagatgaagaaataaatagtaaaaatgtattttttttgtttttataaaatgtttatgcaaggttgatcaactgagtattttaaagtctagtctagataagaatttaaattttaaatgtatacataaggaaatttgtaatgcaatgaaagatgcaagcataacttcctacaagatttttcttttgaaattaaatattaacttaagagtaatgatatgttcttaaatctgcatcaaaattctacacttagtaatgatatgttaattgtgttagttaattctgttagggctcgtttggaatgtcgtattaggtcgtattgtattgtatttt

SEQ ID NO: 19523 - DNA, 2359 bp, Cannabis sativa
tggatcaatcaggtacacatacctaattattatgtattactattgtgttctatgttatgtacaaattgatcttggggtttatattaatttttctaacagaaaacacacgaaaaagaaattgtaaaaagctcactaattatcattaatgaccactgtatttataaatagagcattaagctcataacagaaagtttaactatcttaactaactaaacacatttaattaacctaagctaacaacaaactaactaaaattagctaatggtgttaacagtgtactctaattttcccaattcaaaagattacacactttataagataaatttagagtatataaaaataagaaaattttgcacctcccttgacggtcctgtccatcactgattttatcattttcgattccaaattttttgtaacacatcaatcaacaatataattagaaaacgatcttccaatagcaaaattaaacaaaagttaacatatgacaacataagctacgagtgttaatgtgggtgcaaccgttagcaatttccctaggcaaaaaaaatcatgtcctcttagccaatgaagctgccatactcattgaagtcgggaaaggacacagtcaagaaaaaatccactctaacagtatctagagatagctttggattactaggactcctaacaatatcatctgcactattgatatatgttttcatgggatattcgagagtatatagacctaaaaaatgactattgaatccttattggtccctccgagacatgtggtagaggctaggggtaagaaatacacggaagggcctattacctcttctgaaagtgttggctcacaaagcacctttgtctgggtatgttgtagcaaacctttctatgatctcctcctcttcggtcaacaggttggggtggcggagtgcccaatccgcattcaggagcatgtcttccttaacagcctcagtcattattttggtgatgtccaaggaaattttttccttcaccttctttgaagcttggctctggcccctaccactcacgttatcaatgctctgaaagtcagcgatcaacccgtgctcatggagtacctttatggtaaccaagccttcaatttatagctccttaacggagaagggcttgtattggccggctacgttcttcttcaattcctccgtgtcaagacttcgaggaacaaattttgccagaaataagaggataaaatcctagttaacacccatactcaagaagtttgcaaacaaaggacaaaaacagtaataaaaatgtttacctgggatttggaagctcaaaggaagggtatcactcgctttactagaaaactaatggaaaagagccaatactcccgaagatctaggaagcttaaggtatagctggtggggcagtatgcatttgagtacctcttaagcttgtaaacacaatctttttacaattggcacgcataggttggggcttcatgccattaaagtacaagatctccgctaggttgggcacttcaaacttttggatcttacaaaagatatattgtccgactaaaagcttgtaagccagaggtatcagttggaaaagagctatccctatcctcacacagagttctataaagtatgtccttaggggaatgtgccccactcactatgtgggcccagctctaagcgctaaacccatttgtactcatggaggctgattcatctgctacagatagcctattgcacataaaccccaaaatgttgcgcactccgacttcgttggcataaagctccatcatgtcgtatgacctgaagctatttattttttgatccatttctcagatggaatcattgtagatgaaaggcgtaggagatacaaccttcgctttcctttttgccttggatttagactctactgcctccctagatggagcagcttctgtagcaaggccttgttgaaagtcctccacgagagtcgtagctaaaaattcctcaacagttgcctccttcgggagagtcaccactgttgtttccttaatctatactaccttgaggctaaattccttgtttagatccatcactggaaaaaaaaaaacagaaagaaagaaccaagtaattatatacccaacatccaaacctcccctaaaatttcttggagaggtccccgctggacccatcacttacaaagacctaccttcaccagacaacagttctaaacgataagtcgagaacccaatagacaattaccagagcatattcaataaatccctaaaatcaaactcctttggagtcctagcaactccaaataggcatgtagcagataaataaacctaattctcatttagaggttcattctacctagttcaagctgttgggttttgtgccct

SEQ ID NO: 19524 - DNA, 4824 bp, Cannabis sativa
agccacaaaaggcggttattacattgacaggtcaagatcatgtaactattcagaactttgactcataattctatgcatatctgaattgaaaatggggtagtctgctaaagtatgacacaagaattaatccttacaagaatgtcactataaaaaggcaaagcaataatatatgaatcaaccaacttttctctagaaacacttttctacatagttgtataatatggaagaggaagaagcatcaaaagatttgtttggcaacttaccagatgaaatcctttgccaaatcatttctttccttcctagcgaaacatcactcgaaaccagcttcatctcgaaaagatggagaggattgtggaacatagtttcagttcaacaatcaacaatagttggcattgacactgctgtcactaaattcctcactcgattcgacaaactcaatcctttaagccatcctaggcggctgcagttacaagatggcgaaaacaaactactcttagctacacttgcagccaacaataaactcagagttgatttttcagctaaggagaaagaatttccaagccattttgatttgaagctgcagctaaatcatcaccataattatgctaaaaatctttgctgttccactactttctatgtcaaaactctacatctcgaatcagttggctttgccaccaaggaggctgtttcttctcttgtcactaaatttcacttccttgagagcttgaaaatcatcaagtgcagtggcttgaaatctctccaaattgagtcaagtagtccaaagattgtaaacttgacaattttggattgtcctcatctagattatcttcaccttaaaacttccaaacttagatcctttcgttatcgaggtaagctcccaaggatttggcctgaatatcattttaatttggcagatgccatgcttgatttcagacaaggtcctagaacagatagtgtcattagtagtagtgactttgaccctgccatgttaaccataaaaaatgctcaagttgttactctctgtaggtggactttcgaggtatgctctcaaaccaacttcaaccttctttttgccttgaatttctctcattacataataatacaaattctaattgaaattgacttgttgcagaccttgatatggccctcactttttcccatgggagagacttttcaattctacaagctgcatgaactttggtggattgattactcagaggaagattacagcacagattccttaatagcctttctgaaactttgtcctgccttggagaggctatttgtaactgtaattttcttttttatttttcatctaaaatttactattatcttactaaccatctaaaataatgtttattattttgttcacttatttgcaggttgatccccaaagctatttggtgccaagaatgagtacagtctcaaagaaatgtactaggcatacagaacttggtcatctcaaagtggtcaaacttgagggttttaagaagcaagaggatgagattacattgattaagaatataaaagagctactcacagtagagccacttattattatatcagcatcagaagtttctactgacggacctactcctaaacatgctcaaatgagtctttgactagtacttaaaattttgtcaaatttatattatagagaggatgcatatgtaataattttgaactatgaatggtgtgataagttgacaagttatgttgtattttgtccaaaaaaatgtcagcataattactagtattaggttttagagtaattagcatgctaaagagataaggttgtaataaaattatgatgatgaggaacaattctatttctttgcttcacagtgtctaagaattggcaactggttcaagattttcagagccatgaacgaaaaaaaatgatgatgaggaacaataaaataaattgttgatttgcaaagtctgtttacaatcagctaagtaagtttttgggggagtgtataaagcctagtgaacacatacatgatacatagactaaaaaagccaaaagccaagaaaaaatataaaataataaaacctttactcaatgatctaaagctaactatttatctatctacctcttggatcgattaactgtgaaaaaacagcactagaagttgcatcagattcttggtcagtactcatgaagtgcagagacatatgacaagtgtcatcagcttctgtttggggaagccattctggaatatcaggaatatagttagcactattctcagctgacacagtctgtacagaagcctcttgaagctgaagagcatactccaaattccacagaacatctcccattgttggcctctcaacaccatattcagccaaacatttctcagctgtttcaccaaactttcgaagagagtcaaggtttattgattcaatcaagtgggggtcaataatcttctccaatcttcctttcttttgccaattcatagcccattctgctatgttaacttgttcccttggaagagtgggatttatggcaggcctagcacacaagacctccattagtactactccaaaagaataaacatctgatttctctgtgagctgctgacggcgatagtactctggatcaagatatccgaagctaccctttactgctgtactcacatgagtttgatcaagagtagggcctagcttggagagtccgaaatcagccactttcgaagtgagattctcatcaagaagtatgtttgttgtcttgacatcgcggtgaataatgatgtctgatgctcctgtatgaaggtaatgcagcccctttgcagctccaatgcagatttctagcctttgtttccaagtaagaggagaaatgttagagccatacaagtgtttcctgagaggaccacctgccatgaactcataaacaagaatcatctcattgagttcctcacagtagcctatgagagaaaccaagtgtctgtggcgaagctttgatagcattagaatttctgttctgaattcattaagtccttgttgtgatctcgggtttcctcgctttacagctacaacagttccattttcaaggacacccttgtaaacttttccaaatcctccaactcctagaagaaagctctcatcaaagttattggtagcttctttgatctcagcgaaagagagaattctccctaaactgaaggaatgcagagttgaagcagagctaccaatggaaacttttgagttggagattcccatgtgagtaggaaatgacaaccatgatgaaaattgacgccttggcttctttggatcaactcgccgcctgtaaaagaagcctgcgaaaagtaacaccaaaactccaaaaccaactaagacagaagaaatagcaagcaccatccacttcttgctgcttgaagacttggaatctataacatcagctgcaaggtttccatctaagcttccagtaggactactcattttcaggatctctaaaccattcaagattgcatttgaagaaaaacctcctaaatttgatggaccaacttggaccaaaatctttttatccgagttcttaggaagatttaccacaaaatcagcataataggctgctgataataactccattgttctgcttgagatatcaaaagtgttcaatgcagattgcttattcacataaacattgaacaccagatttccaagagatatgctgacaacatcacagaaatgcatcctaagaaaataggagaaaccattttgaaccttaaatgaccatgaaatgttgaacttctgattagtgacattcgcatcagccatttcttgagctgtggaataaacccaattcggcgcaatctcaggtgaaactccatctgggaattttactaaactgggatttttagttacattccttgctgaagcagcattgagcaaaaaaggcccatctggttcccatgttctccaaagtgaatcattcttgggggttataagaggaccccccatgttgactctataaaccgtttcgtaagctatctcagaaggaatttcaactgatgcccctaatggaataggtgatgcagtagaaggaaattgcttgtttggaactgaaataacctccactccattaataaatgcaactgaaccattcaatggattcagctttagtaccaattttctccaactttttccactcaaatcaactacatactccttgattaaaggggtggagtatccagagtttgagagagaaaacctgtggagaagagtaatcccattagccacaactgagaaacaagcagatctcaaatcataatgtggattctcaacagggttgaaatgcaatctcagccagtggagaccagcttgcttagtggcaatgttataaacagaagcttcaccaaaaacccgagcagaattgtacagattcatatcatttgaaggactcatctggggctctgaaacaacaacaacagtagagctagttgctacagtcacgtgtggattcccagaatcaggctcaaaaactctgccatcctctagttccatcacctcacttcctccacagttaatgaaaaatctgtcttgaggaagaaaagaagcacatacaaaggtaaggaatgtaacatgtaaaatacaaaaaatgcagataatgtttacttttcttaaattaaacaacattgtgtctctctttagctactacaatatagtagaaacaatactataaaactatatatatatacacacattatacttaaaataacatggtagagagagagagagaaagagagtttggtgaatgttaaaaggaaaaagagggtgttttgaggggtagttgtggttgtgtgggatgaatcatagtgaagaaag

SEQ ID NO: 19525 - DNA, 7033 bp, Cannabis sativa
agacctgtaaccaatttcttaattatatcgataacagtataacacatcgtaatcataatagttctgtgcccactagctagtattaatctttcgattatatctatattttaattaataacatacttttgtacataaagaatcatatatagttccaattttaagattataatttttgttttttttacttcaaaaattattattgacaaaaaatatataattttttatataaaggaatggccaatgaagagtaaacttgatccagagatctatgggccaccagaatcagcaatcaccacagaattgattgaacgtgagatcaaaggattcatgactcttgatgaggtatgcatatacataataataacatatttaatcatttaggtggcgtttgataatgttttttaatcaattttttatttttttaaccagcaattgtgtttggtatatatatactaagtattaataacatacaatgcttgtttgcttaaaattgtattagagttgtaaataataataataaaattaaaagtaatacaattttatgatatttttaaatatataaaatctaatttaattttaaatttatttataaaaaaatatacctaactagttttattaaacaaaaaaaaaaagtaaataagtttaaatattttaaattatataattaagaaatttattatataaagtattagtaattaattgaattataacatctaatgaatatttaaattaagaattatatgaaaaaaataattatctattttttatatttttaatttaaatttaaatatttaaaattagatttatccgtattaattttaacagttaagtttaacgaaaaaaatcgttaaactaaaagtttccgttaattaaccaattaaatatatataaatgcatattcaattaatcaatttatatgctaattataaaactatatatatgtttattacaggccatgagagaaaagaaattgtttatcttagattaccatgatttactactaccatatgtaaagaaagtaagagaaataaaaggaacaacattatatggatcaagaacattgttttttctaactttggaaggaacattaagaccattggccattgagttgactcggccaccaatggatggaaagccacaatggaaggaagtcttttctccttcttggcatgccactggtgtttggctatggaggtttgccaaagctcatgccctagctcatgattctggctatcatcaactcgttagtcattggtatgtatatctattttcattattattgttataatcatgttttaatagaaaaatattattttagatcgtatattttacaaaagttattaataaaattctctattttgttaaacaacaattcagaccctatatttttttttttaaaatgatacaaaataatgttatgacctgacttggaagtgttataaccatactggttatatttttttgagtttgttcttgatagaaattgattttaagttgcttatattaaaaaaaaattgacaaaaattaatctcaaggattattttgtactattttaaaaaatacaggatctaatttgtcatttaacaaaacaaaaaatccaatcaataactttcgtaaaacagaagatctcaaatatgaaatttatcctttcttgaaaaaattaattagatagtgatattgtggtatatgtggatgcataattaattgagttattatattgtatatggaatgatgattaggttaagaacacattgtgtaactgagccatatataatagcagcaaacagacaacttagtgtgatacaccctatctatagattgttacacccacattttcgatacacaatggagattaatgcctagctagagaggcactagtcaatgctggaggcataattgaatcttcattctctcctggaaaatatgccaatgagctatgtgctgatgcctatgacaaacaatggcgattcgatcaacaagccttaccggccgatctcatcaagaggtaataatattgtattatacatataataaattgttggattgataaaataatttctaattattaaaaacctaaatgcatataaaactaattaagtttagagtatgtataatatgtcatcacttgtaggggaatggctgtggaggattcgagtgctccacacggtctaaagttaacaatcgaagattatccttttgccaacgatggtttagctctttgggatataatcaaacaatgggtcaccgactatgtcaactattattacccagagcaaaccctaattgagtctgacctagagctccaatcatggtggacagaaattagaaccgttggtcatggagataaaaaggacgagccttggtggccactcttaaagacaccaaatgacttaataggaattgtcacaacaattgtttgggtgacatccggccaccatgcagctgtcaactttggacaatacacgtatgcaggatatttccctaataggccaacaattgccagaaccaacatgcctactgaggatgctagcgaagaagttttggagaagttctgggctaaacccgaggaagcactgatgcagtgctttccttcacaaataaaagccacaacagtgatggcggtcttggatatattgtcgaatcattcgccagatgaggagtatctaggggagaacattgagccttcgtgggaagaaaatgatgttataaaagcagcttttgagagattcaacgggagattaaaagagttagaaggaattattgatgaaagaaacaccaacaaaaatttgaggaatcggtgtggagttggggttgtgccttaccaacttttaaagccattttcagagcctggtgttactagtaaaggtgttccatatagtatttccatttgagttgtaaatgaaaacacctttgttataaagagatattaaaaattaaatggtattttagagcaaaaaatgagatgaatgatctttaattttaaagaacaaaaagaagaataaataacttccattttctttgtagctagctagtactcaatttcgtattgatcgtatttttataaatttttttattgtttttgtgtttttttaaattatctcttaatacacatagaaatgcataaatacaaatatttatagagtaatttgcgatataaatatttaaatttaacttccggttacaaataaatactttttagcagtcaagtaaactggcacgtagcaattcctaattggttcaggtcatgattttcttatataaaaaattaatttaaatataccaatttgaaaatgatacgtgaataataacttgacatttaaggtatgtaaacttaagtatttatatatttgtaactgagagttgaacttagatatttatatcgcgaattactcatatttatattataaaaggggctaaattcacataaaatatacaaaactataatttggggtaccaccaaaccctacccccaaagtgtgaagcaccccaactaagaggacaacaagacgactcacgagagatccgctaaacatgcatgcatgtcataaattttatcttataattaatgtgtgttcctctaaattaattaatatggtgaaacaatttaacgtgtaaattaatgcttaatttggaatctattatatataattgagaccatgcagactactacatcttaaaaattcattgaatttgcttaggacaaaaattcaaagtcacatgtgaaacccaagattttgaactgaataatgaggctaacaattattttgataaataagctcttcatgacacaaacacacatatatatatatggtccccttataatttttgttatatattatgtacatagtatagtggtccacttatatatgtgtgtgaattcttgttgtaatatcgatatatagccttattcttatcgatcaatttggtacataaaaattgtatatttatctattttttgacttattattggatatgtcatacgtacatattgttaattaattaagaacctacattgatacagagtactccatagtagttatggtgcactccctcacacttgatgtcaaccttctcaatttattggagaatgatttattgttaccattattactttctttgctttttgtgcaattttgttataaagaatattctctttgatttatgtaatgctacttagcaatgtatagaggctattatagtctttggtttatataataaagtctcctgttcagtttcattttgagttgagaaaacacaattatcatttctttaattttttcacttggtatcagagctacagttggcctatatataccatgtatagtgacaattctcaaactcctccttaacctccgacccaatcttgcaacccaaaattctaatggaacaagagctggtattaccaacaactctgctactgtcaccccgaatttctcacagccattcaacaccttaaatcatcctttgtcactcaaactagattagaataagtgcactttatttaaaaccatagtgtcaacaatcattcaaggctaccgatttgatggtttcatcaatggcactcgaatctgtcagaatacatcccaacagccactacaacagatggacaacctggttttggagtcattatgaatccagattatgaacattggataattagtgaccatcttctagtaggttggatctacagttccataattgaatcgattgcaactgaagttatatgatgtgctacttaaacggctctttggcatgctcaggagaatctatttggagcacactcaagaaaaaaaaatagatgaaaccaaaactttgattcagaccactcgaaaagttccaactcctatgattggatatttaaggcaaaaaaaaatatggtctgacagtcttgctctatctggagacacacttaatctctaatgtcacatctagtttgaatgctaaatatttagctattgttgtttaattgaggccagatcattacatggaaggaagttcaagatgtactgcttagttttgacaacaaacttgctaggctattgcatgttgcaggaagcagtaataaagaggaaaactcatttacttctaatccaaactttagcacttctacaaatccagcagctctaatatgggtggaaaaccatagaaatcgtggcaagagaaactaaaattcctatcctaacaatcgtggaggctcatcctcaaacaacaatccacagaggtgaaaaatgaggcaggggcaaatccaaaaactctaggtcaacttgtcaagtttgtggcaagtatgatcatagtacgttccttactgctacagtagatacaatgaaacattcatggggcaagatccaggtgctcaatagaacaaacaatttggtggtcatgcatctttcatagccacaccaaaagaggtggacattaacatgtggtatgctaatagtggaacaagcaaccgtgtcacctcaactgctgctctaaggacaaagtaacaaggagagtgctactccaagagatgcttaaggatagattgtatcagctcaatttacctcaaccaaatctagctttacaattcccctaagggccgtttggtatgcagatttcatttcatgggaataagtttaacattgcttggagagtgatgaaggaaatgataaacctaagaaagcaacattaccgtgttattggttgacattggaatggaatgtgacaactttttttttttacaataataattatttttttttctgtaaaatactaataattcaatattatttttttaccgtgttcaaaataatttttatttattatttttcatataattttataaaaaaaatttaacaatagtaaataattataaagagtagatttatatacaaatggataatatattttataaaataaaatatataaaaaacataagaaaaatacttcatatatcattttttaatttggggaaaataaggaaaataattttaaaatgcaaaagtttgtattaatttgccaatagcattggaaattgcaaaaccacattttcattaggttttccttgccagcttaattaaagcccaccactttcacttagctaacattaaaatattaaaaacctaaccaaacatagtaaactttcaaattctcactcccacttctcctattatcacatactaaacagcccctaagtgacaagtaatccaaatcaatcccaaaaattcattggtgtttcagttttacaaagcaatttatagctcaatttgtcaaacgacgataattttatttcccttaattatattgggcataaaagattaagacatctctctattagagtgttgaatcatcttctagctttaaacaatgtaaaaattccaagtaatgattgttttactaacattgagtactattatgttgctaaaaaaataattagattcataccggttacaaactcaaaactgtaagtacttataatataattatctgtattttcaatgttaataagagattcttttggtgttgctaagtgcatattaatttctactaacaaaataatatcccaaaatatatgtaattttgagtgtcacagtccacgtgacagaaatatgagttagttgatatgtcttcaaaaaattgctttaataaacttgttaatgtaaaggtttattgattcaaaattatagttatcaccgtaaaaaatataggtttggtgtaacaattttgtgatagtgttattgaaattattctagccaatatcatagttgtcattaattttatgaacggatttaatgagaatctttcttattatcaaatatatatctacaaatatagaagtggtccacgtacgatcaatattcacgtgattggttttctcttaactaattaatttcataatttgaaagagattgctatttactatttagcacaagtaactatatatatatatattaatagtaggatttttgccctgaattttgacatgtaccaaatgggaaatttgataaattatgctaaaacattagattatgtgtttaattatacccaattatca

SEQ ID NO: 19526 - DNA, 2973 bp, Cannabis sativa
agagagagagagagagagtaatgtttctaagtcaaatccaacttcagttaaagaagttgcatgggatgctcaatgtaaaaaaagaggcagtcctcgtgaaaatagagagaaacagagctcaaaagtaaaatcaattatcacacaacaaaatttaaaactattcaccagttatgacctcaaaatccaataatctaatatttatacctatcagggtgtttttctctgaaagcatcaaagaaagcgcctccattttccactaacatggatcgaaaccatcttctgaatctacaaggtcagttaatatctgaacattagcctcttccataaaattgtgaaaaaaataaccgtgcaccgctagacagttcaaaacttaatcatgatcacatcggacaccactccatagaatttgtgcagcagcttactcgttgttttcaaaatctggtcctgcttcacagcgatctaaagaagtgggtgcaatgtttagatcaccaacaacaattattctccttcccccacacagcaaagactcccatcttttctaacaaaaaaggaaaatatttcatcagtatcattaaaccaactacataaaactagaactacattacgttaaagatagatgacatactaaatccaataaaatgggattgggaaacacttcagataggaggaacacaatagaaagtaacttaaatgcacgcatataattactcatacaaacacattttctaataatgagatgtattttcacaaacagggaaaagaaaactactcttgccataaattgatacaataaaacggtccacagtacatagtccatacagcctaaattgatctcttctatcataattcaaaaactaaacccagttcagaggttcctcgtacctgcaatatcttgtagaatttgagcttaaattcgttcctttctgcatcatcacattgagctcgaggcccatacaaattgaacagaactgaccaaaaatcacatcataaatcccacatttccacgccataatcaaaatcaagaaacaccctttttttttccttctccctacacatttcatgcttggtagtagtagtagtagcacttaaagcctaactaacgtttaagaatgtgttaaatctaagatttttatttttggtttacattaacggtttaattatttcattaaaatataggttgataaggaattctttctcattttagcctgtatagttagagatctatagttaatgggcttagcatctttgtacgcagaagtgaccagtctaactagatttcgttgctaggttttatttccaactctataaataaatattgtctcgtgataatggtatgtttttggtaatatgtttggttgatctattgatttgctaagacttagtaggtcagtattgcactaccattctatgcaatatagtattcctaacattaaactcaccaaaatgaccatgatcagtcataacacaacgaccttcaccatcaaccttaacaagatcatctttctcaaactcctcgagtccagtagcaaccaaacgaggatttccaagaacaccagtaaaaccttcctctgccgccaatggcaacgccacttcagtactcgaaaacgccgaattcacacggcaaaaagtaacaacacctgaaacaaaacaaaacaaaacaaaaattgagacaatgctctttggtaggttttggctgaggcatttcatcaaacaccttaccggaatagccagttcggcctcgttcggaggttcgagtacaggaaaagaacgactcgtaaccctccgccattaccaaatcggcggtgagttcctgccttcggagcttggtctcctggaagcatatgatgtcggcgtcgaaggagtccagaagtttgagcagagaaccgtattgtgagattcgtggtctcaggccattcacgttataggtgacgatcttcatacacaaatatatgtataatatatactgaatttgtataaactcaacggattaggaattttcaggagcagaggaaagattgaatgggaagactgatccattgttgtagttgttgggagcttttgtcttgtgttcctttctgcgaacttgataccaaaaacgacatgtcgttttagcgtagtggatcactggaatgtttcttttctgtcctcaattacctcattaaacgacgagtcgttctgcattttttttaagtaacacaaaatagatgtcgtttttgtttttgttaaagagacaaaactcgtgtcgttaatgtgttttacttaatcacaaaaaattaatcataatcacaccacaccggacgattcatatttttcggcatttcttgcatggccaaccctgagagtaattgtgtcttgggtagaaacaaaattattgaactcttttaaaagaaatgtggtattttaaaaaattgttaaaaatatatgtaattttaaaattaatttttttattttgggctctttagctgggtggatcctaagctgcgcctagcccaaccttagctcaccccgaccctactttgtagttaagtgaatattctgcttagatattctgagccatgccacgtaatgttaaaattgtttaatactctcaaaaatataatgttaatattggtgtaacttactatcaaattttgtataatttaacgtaataatttttataagttattgtaaaacaattacaagacgggaactctaaataatactaaatggtttctaaaaagaagaaattactctcagtatgtgattttaaaagttgtttacttaaatatgatacttttaggtttgactaatttatatggtattttttttgtttttagatattttaatggtatttttttttgttttttattgttaggtatttttatggtgtttgatatgtcatatatatgtaaggggtaagttggaaaatgcctcttttattaatcaattaaccaaatttgtctctaattttatatttatttgaaacatacctct

SEQ ID NO: 19527 - DNA, 5935 bp, Cannabis sativa
gccagatacctctcttacacttgtgagttattgtctaaatttaaaaaattattgttagtataataccttgtgctattaactttcatgcaaatgccctagcccgattggcctcaactcgagaagcaaaattactcgatgtggttcatgtggacatacttgatcagtcaacaattgatcgggaagaagtcatgtagatagatgttattgagcagaccacttggatgaccccaattattacttacgtgaaaactggcaaacttccagactataaactcaaagctagaagatttttatattgaaccgttggatacgtaatctatgacaaaaagctatattgcagaagttcaatcagccacttttgagatgtgtcaatggtgaagaatgcgattacatcctttgagaggtacacggaggcatatgtggtaattatattggtggaaactctctggctctaaaaatcatgcagcaagactattactggccaactttacgtgtagatgcgattaacttcacaaaaatgtgcgacaaatgtcggcgaattgccacatatgtgaacaaacctccaagaatttaaattctatcatcagcccatggccttttgcactctgtgtatagatttaattggtgaattagcaaaaggtaatggaggagtaaaatatgcagtagtcactgtagattatttcactaagttggttggggctgaatccttagcgacaataacagctgcaaaattatgcgagtttgtgtattgagcaattatctatagatttggcattctttataagttaatctctgataatgggaaacagatcgattgcaaagaaatacaaacattgtgcgatgatttgggaatacaaaaggcctttttagtggtcgcgtatccccaaagcaatggacagactgaagcagtcaataaaataattaaacacaccatcaaatgcaacctcaaagagcgaaaatgtgtttggccaaaagaattactgcaagtcttgtggtcttataatacaaccccttggtcaacaactaatgttatcccctgctcactttcttatgggtgtgaagccatggttcaagtcgaggtaggagctgggtcactgcgacgagatgtttttagcattgaagacaatgagaagaatcaactacttcaattagatctgctagaagaaaggcgtgatcgagctcaaataaaaaatgcagcctatcaacagcgtacagcacattattttaactctaaagtaaaagaaagaattctacgagtaggagatttggtattaccaaaagttatgcccaatacctgcaattctgtgcacagagtttttggcaactgggagggcccctaccttatcgctaaaaagatagggaacgcaacatatcgactctctgatctcaacgactcagtctttgatagagctttgaatagcgagtatatgaagttttattatcagtattacccgcacatatatacttagccaattttttataaaaattacctaagtataggggggatacatatgtatatataccactgcttctttcaataaagattgtactactaattattcaatgaatcgttaaatttttgaattttttattgtctttgcagttatatacttagaaaatataaacaccatggtgctcataaatcgcatcacaccaagctgtgtagaaaagtcacttaaagaaaatagggactaaaaaatatgcatttcaaaagcaccaagttgcatctataaatacataagaagcacaaatcgagagtatgaaaatacttagaaattttgaaaagttatcctcaaaggatatattgttcaaataagtaaatattaaaagtacaaagcatacttgtcttaaaaactaagtacaaaacgtgattacccatgtaccgctcaaaaagagttttaataaaaagaaagtaaggagtatgggcattaagatcctttgcaaccttctcagagccatctacgacttcagcattagttgcagtctcagcttcctcagggaaaagattgtcgcctaggccttgagtctcagtaggagacatggtgcaaaaagcattcaccatctcagtcgcatctggacaaaaacaacaaagtcatagtctggcaatttggtcaggatagtgtagatgtaatcagtcattgcctagtcataagcctttttcttctcatctcgttctttcccaaggccgcgagtaaggtttccaatttgctcctctagtttcttgactttctcttcagcctagttcttagccttgcctaaatcctcaatctatttgtccttggtagctccctctagtttaattttcttcaaaccttcttgaatagcgacattttatttcttcagaagatcaagatctttaaagtttactgcaatggcccgcgagtatacagtcaccaattgagtcatgagataaagtgaacgagacaaaaggtcttcggtaggattcctatcaatttttgtgatgaagccatcgctcacgaacttcttttgtaaagacatgaagtcaggagccttggtcgcaagatccatcatgacctttttccctttgccttggtctgttttcttatgtttctttgataagtcaatcattggagtatttgacaatgtttctctttctcttttgtggcagtgttgaggtagaaggagttgtagtgttcgcctttggcttgtggttaaagattagggctttcttcaagaatgtcatatttggaaaaaagttaaaagcattaaaaaattgcaaacaaccgcaaacattatcagcatatgtgaagatgcatcatttgatacttgtctcagagtttacttggaaagacgcttgtcaattttttctttttgcttcttcgaaggttccttataaactagttctcgctgaaatttggcgtcagatagaattaatttgtgttcttgtagttttgtagaagtacacaaaagacgccaattgcgatcctggattggaagactactcagaacctcaacaatttctacacgatctctagccaaaattgattgagtcggtctacctgggagtgtagataagtgttaacatttatgaaaagtaaataataaattgaattaagtatagagaaatgcaacatacgaggtcgatgattgaagtctattctaattcctgacaatttgaatgcataaaaccactttgatttccaatgccccatattggaaacagtcccttataccctattaacctcagaattggcccatttactgaagtagtaaaagcaattgtcgtggccaatattttttatcataaaaataactaaaattcttgacagcgggttctcctttcgtgtattccatatacatcgcataaaacccaaggattatgcgatagttatttggcgtaagctagaatggaaagacatcatagtgcgtcaagattgcctttacaaaggagagaaagggtagagtgatgccatagagaatgatgagaatcaaaaccaccacgattcgggtaggaatcatcacaaaaattatgaaaggaaggtgaggacgatgcatcgacataggcctcgtggtagtagtgtttattaagtttaatatttcaaacgttgtcaaatcagattttttaacatgcgagactaagtctttgtaagagaatggctcgtccaatggggcattatctactgagtccattttgatcgcctcaccatcatcacgttcaagtccgcaagcaagtagctcgaagtcttcacccatctccttgacctcaacgtttggagaaacttgtggataaataaaactcccttaagctgataccatcgattcgcttcctcgcacttctatggtgataggtggtccatctagttattggaccatgtgacctatattaccagtagatagcgagccttcttagctcctattgtaggaaatttgtctttcgatatcaatgtaggaatgaagctatcatttcttttttatttgtgaaggccctgcattcagactcgtacctttggttttctaataaattgctcatctaaaagataaaagatcttttcagtatggtactagtgtgatttataacaaaaggtgtcctcacccgagtaacaaaaattttaagaaatgtaatagaactaacatttggacctccacaagtggttggatgtgtcgcagtatcttaagggtcatgtaactacatgaacattaggctgctgaggcgccccaaccacttcaagaccaagttagtcctaattgcgacttaatagaaaatgcatatgcataaaagataaccaactccaaggaagaatagagtggttgggggtttcacaatgacctaagggttacccagagaaataagcattaaatcactgtgaaacccccaaccactaccaaattttgacttgaaggcgaatgaacctaaatatgcgagtatgcaaaaagttctaccatggagatgcgaatattcaaagtttgtcatgaaacctgcgagtattcaaattttaggcaagaattttccagagaaagttccatatttttccttatttatcctaaattttgattccctcaataagccttattaatctcatgcaacattcttctactcctaaaaaaggcatgcaaacattcaaaaaagcaaatttacaaaagagaaagaaattactaaccttctgtacgagaattccttttcctggattcaaagttcactctaataagttctttagccttcgtgataacgtctctgaaaattagaaattcaaaacttttgagaggattctcgaacttgaaatattcagagaaagaaagaatgaaaaatgagaaaatagaaaatgggaaggaagtgatgtaggatcaattcgtatttgaggggattaaatacaaacatttcccattcattgggatgcagacttgtggccgaagaatgcctaagatctcccaatccaactgtccacaaagggcacacctacacataccttgaagggtgttgatgatgtggcatcttgggaaaataaaaataataattacagctattttttcgaaaccctcgacaagacaatcaaaggtcaccatctcatgacaataactcgtctgcctctctctaatagtttccctaatgacagttgtcaatcggggaactaggggcatgtgtcatagtgtaaatttttttcctagaaactcgagagcagtctcctataaaattgacatgtggatccaatccctaaggaaaggatgagctgttaattaacgactcttaaagaattaatcttgcttgatctgaactcgtaaaatgatgcgatcttgacaggatctagtcgcatactatgccacgcgtggtataagaaaagcaggaccgagagaatttatataagtcgcgcatgtatcgaaatatatgcgatgactaagttttcttctcccgcgactaagtaaatatcacttctttacataacgattcattcgaatgacaaatcgtgttcgacgactcggcagggactcgtatgtcctatgttgtcaacacgtgagatgtctgtcaatgtattcaaggtgaacacagacatctaagcgataggtccattgtccattcagcaaatatagatcgcacctaaagcttgcaagtttgtgcgagaatatgaatagtcaattcgcgctcgataagttgcatacgttcttgtacttaatacaagaacgtgttcttcatttattcttttacgtttattttgatttaatactatcatctattgtaagaacggtttaaaaatcgatcaaccatgtaaaactaaaaggacacttactttctatataaatgagtgatccaaatcaaataaactaagtaagcataaataaattatttgcaacagtggactaagcagaccgagatctgactgaaccactatatttccttgtatcattatttttaattgttcttttgttttcagtatctcattgttgaatactcgctactttaagtgagtgttcatactttttt

SEQ ID NO: 19528 - DNA, 3046 bp, Cannabis sativa
ttataataatttgtataggaataaaaaagaaagatagagagagtttcaagggttgttgcccttaaaggattggttggcattgaaatggtctaattaattaattttggttttttaaataaataaataaatatctttccatattcaatgtatgattgattatatataaactaacaagttattatttagagaattatttttaaaaaaatttacgatttggattgttttgatggtttttatgtgagttgctgtgtagattttgattgtaatttaagttgctctgttaattgctatataaaaatcctatatagataaaaaaatataaaaaaaaaaaactatttcgaagtataaaaaaaaaaaaaaatcctttattattattagttgatattattaattttgagaactaaaaataagatattgtcaatattagtggaacccaactcaatcaaaaccatatatatgtatgttgaatttaattttattaataataaatatagaataagatataaatgaaaaataatatcttttgagactattctttactatgttatattgttcttgccactactttttggttggaaagtttgtgcctttggtatataatagtactaatctacagctattgtttgctattttgtattatcttaatcaaagaagataatttaatttgcactaattaaaaaaatcctaattagagcttcttttgtattatcttaattatagtattatgtctcactctctatttttgtttatgtattcttttttgacaagttgtaaatgtattcttaaatttcatatatttgattggttaaagaggaacaaaagttctataggttaggctaaagttaaccgaccaactcttacaatataattaattaaattagtttttttagttcctaaaaatttaaaccaccattgtacaaagtacaataatatattgattacatatatattgtttacattattacatggcaatgctataaagcacactaggttatgtcatattgtttttgataaattaaaaaatcatctatggctgaaattcggtctattatgatcggtatttaccaattttataattgattggtcggttactttttttattttatgaactgttgaggaattataatcatctaaaattaaatgtataatttttggcaatttttagtaattttttcgtttttcaattttgaaagtttttggtggttttaaagtttaaccatttttttttcaaaaatcgaaaccgaacgccagatcaaaaaaaccgtaactcaaaccgattacgaaactcaatgatgacgtagaatcgaaaattcaattacagtctagttagttttaatttttactttcaactatcctaaatgcatgaactgtttattgatgaataaccatattagttgtacaacgaatataaataaaaaatatttgggaaaaattagaactattctctaataataatcctaattcattacaaaaaaaaaaataaattagagacacgtaaatcactgttagagactcaaatttaaaagaactaataaatagattaaatgcaaaagaccaatccaattccgcaattacaacaataagatatgtcattttattaccggtacaatttagtaaaatacgagatctaatattcatttacaccaatagcaagataatagttaacctttcatctttacaagttatccaatgtaaaatatacataattaatcaactgtcattgatcaaattccaagttccaatttctcaccaatacctgttaattcctagagaagtaaaattaatttccaagaaaaaaataaattccaaatgaaagatcattgcatttatatttcccaaaacatatcaatcaagaaaaaaaaattgcacaagattttaaaatgttgactaagaacatctccaattgtaagttaaattagtaatttaattctaaattttagtactttttctttaaaatctgtgtcaaattcaacaaaagaactcatcccaattaagtagattagccctaaatatcaaaatttaaccctttttattatgtaaacaattatgagttggtggtaagtgcaattattataattaatatgagaaaaatttttgtatacatttttaaggtttatatgtacatgaaaacaataccctatagatgactaaacatacaaaaaaatctgttgattggatcaaatgcccatttaactatacaaaattgaaattaatgtgttttgattgatcaacagattttgaagcattcaattcatacaaaattgaaaaatacaaagaaaaacacacaagtttggattggacctcagctctttcctttgaatgtgagctgtttgtcagtggccaataatagctagccacctgtcctcctcatcacctgcctaattatgttggaaccatttcctaatagcattgaccaattctcacctgtgattttccaggaaaaaatagctcttattacaatattatacacacaaatttcacaatcaagacaataatgatttttcctatgactatttccaatgcaaaatttttaacaaaattgactaaatattatagtatattgggtaaatagcggtataagtactcttaagtttcaagtttgtaagtggcataaactcaatgtttatttatagcggcataagtacccaaagtttataaaactgtaatttttctctaattttctcaatacaaactgttattgtcttaaacaagacacatataaggcttattttctagatcattgggtttagacaaaaacatgtagtataagttacttctaaatgctttttaaataaattcaaaacagagtcagtactgacgaaactgaatttataccgctaaaaaaaatattgggtacttatgccgctaaaaataaacattgaatttataccgcttataaacttaaaactttaggtacttgtgccgctatttatcctaatatattatatgttatttatttgaaaataaaacatataaaagtctattaaaaaaaatgctaaaggaatcagtgttgcttaatactaccacgaggtgagaatttgttaat

SEQ ID NO: 19529 - DNA, 4745 bp, Cannabis sativa
  modified_base (3715)..(3718): a, c, t, g, unknown or other
aaaaaaaaaaaaaaaaaaacccgtctgtattattgtagaaaacaaaaaaaaaagttttaatcggtaaaagtgatgagaaaactgtaaatatgtcttttgtaaatgtttttgtcatttttgagtatttaggaaagtatctctatacaactagattttgggccagtaggcccaattgcaagaccaaaaaagcccaactcatgttctgtggtcggtggatgtggttgttaggtccaattaaagtcttacacccttcaccgtccattaccgaagctctagagagaagaagaagaagaagaagaagaataagagaagaagagagagaagatctctccagagaattctcagccatggaatcaagaatttctgcctctctagggcttccgtcaccggacccaaacaaccacaacccaaactcaattcatttccccaatctcttcacccatttcgccgccattaacacccaatcccccaagcttttcgactcacttccattcgcctccgcctcttccgctgcacccagatctcaaaattggttcaaacccaccaccaaaaacagccccagagtccaatccctaatgaagagcctcaccgtcttcgagcgtgccgtaataggcgccggcgccggcggcattgccggcgcattcacctacgtctgccttctcccactcgacacaatcaaaacaaagctccagacacgaggtgcctccgaaatgtacaagaacgctttcgacgccgtcgttaaaacttttcaaagcaaaggggttttgggtttctacagcggaatctccgccgtgatcgtcggctcaacagcttcttcggcggtctatttcggtacctgcgagttcggaaaatcgttcctctccaaattccctaaatacccttctgtccttattcctccgacggccggtgcaatgggcaatatcgtctcttcagctataatggtccccaaagagctaattactcagcaaatgcaagccggagcaaaaggccggtcttggcaagttctattgaggataatcgaaaacgacggcgttttgggtctctacgcagggtactctgccacattgctgaggaatttgcctgctggggttcttagctactcttcctttgagtatcttaaagctgcagtcttgaacaagacgaatcagaccaatttggagccttttcagagcgtgttttgtggggctcttgccggagcaatctcggcttctattacaacgccgcttgatgtggttaaaactaggctaatgacccaagtccgagttgggggagcacctaaggtgccttctgcagctgtgtacaatgggttctcaaatacagtgaagcagattttaatggaggaaggttgggttgggttcaccagaggaatggggccaagggttcttcacagtgcttgtttttcagcattgggttactttgcttttgagactgctaggcttactttgttgaatcagtatgtaaaacagaaggaactacaagagttggcttttgaggcttctccctcgagttaagttgttcttgctttgaaaaaaaaaatgcatttttaatctttctttttttggttgttgtgagttttagattcatagggattggtgtataaatattgagaaaatggtctcaaataattgtcattttagtgggatttagtctgcaaattttgtataagatactaatgcaaaatcatggctagtggtagctcatatgatatgatcaatatgtatgtaattttttcccatgttttctatggataataataaggctgttctaattagttattgctctctctatttcataatgtatagtttttattgtctgtataaaaatgattgctatgaaggttggagacataagagaacaacttgaataatggcatattgtctttaagatttgatttgaaactacacaactcagtttattcttttttctctttttcctgaaaactcaatttagctggcaatgttgggattttgatgtatccatgttcaaaacaatgtgtgatttgtgttaattgctattcaatctgcaccacaccaattatttataaattttgattcagtactgttatgttgtaaatttttaacattattttttgatttttcataataagatgttgtatttttattatgttggtgaaattatattatattatttgcttctttagcaatagtgtaaatcttctacactccattgcatttttgcattgtgatttatgctgatttgaggtcttgcgatgctgtgacaagtttagaaaactagaaatgcaatttgatttgagaaaataatcaaaatccatagcgcccgcactggaaaatgctcttactttacatatagtttcagaactttttttttgaaaaagaacttcagttcagaaattagattaaaacattaggattgacaggggcaatccctccccaatacaatttgagtctaggacccttgtctcgcagagataaccaaaacattaacagcagaaatcaagtctcgcatagagaagaaaacaccagtgaggcgaaagtttgagaggtgcttcttctccaaagccaaaacaaccaccaaatagtcagaacaaacaataatagaatcccatcctttctctgcagcccaactcaaagccaagtagattgctttcatttctgcctctaaggcagagtcaccattttcttgaccagacttactcccaaaagacattactgcaatcaatagccataatagccaaatcgcaccaagagtctttgaaagctcgatcagtcactaaaaacagtcactaaaaacgataccttcaatctaggctcatcccttgaaggggacaacgaggatactactagaacatcaatgcttgaaaactctgcaaatcttttatgaatattctcatgcagcatcctcaaatccttacctttacctccatgcaaaatggaatttctctggttccataagacatcaaaaatcagagctgaacacacaagaaatcgtgtcaattcatcacccttaagctccaaacacagagcaaaactggccacaaaaacatcctactcatataagcattcagtttttaaaggaatcggagcactaaaccgaagagttctagccaacggacatccaaaaaacaattggctcagggtttcaacatcacaatgacacagaacacatcctctttccccatcacatgaatacttatttctagtcaaaagagttccacaacaaactctccaaagcatcagactcaatctcgggtggatatttttggacttaatgaacttccaacgcggaagagctagaccaaactgatgctcctgatccaaccaataagttgccttaacactgaatttcccattaacagatcctttccataccatcgtgtcctttttcaactcgttgacaatatcgatcaagacaattctctctcttagatcctctccaaataagtgtcgaacatatctggagttccgctatttatgagatctgtaacattcccacttcaagctgttattgggcccttacaccccacggaatgatggctcttatatacgagtacgtcactttggctgcttcatggaatgatgactgaccctacaaaccaacacgagtgtttccagcatgctttgtcctctcacacactttctgggaaaacttcccaggaggtcacccaccttaaattactccaggtcaagcacgcttaaccgtggaattcttttgtgatgggctaccgaaaaacaannnncaccttgttgatataggtagtatcaatcaatcaatttaagccatcttcaactgtgcagtcccatacctacatagtcttagaatcatcccacttgactttccccaagcgatgtgggattgcacagcttacccgatatttccccttatggatcacgggactactgactgtcacaagatctatccataaggtttgccacattcctcaaatgggaggccttgagtcgaatcatgtccatgatctccctgaattcaccataattgagccagggattccacgactgccaacatataccaacatctattccattccctaagatcatgcaagacccttccaggataagcttataagcttccaaaacccctctctaaatcatagaatcagagcttttagattgaacactccaaaatgagtcccaagaacaatacttggcttggagaactttcacccacgacttattcacattagaagccatctcccaagctaatttcccaatcaacacacgattaaaatcctcaaaccttttaaacccaaatccacctctctgttttggctggcaagattctccaaattcttagtcgccaagaaacgcgttttctcgacaccccttgtccaccaaaatctacgaaccagggaatctaactagttacaaaggatagtcgggatcttaaacgtggacatttaaaccccaatccacctctctgttttggctggcaaagattctctcaattcttagttgccaagaaacgcgttttctcgacatccctagtccatcaaaatctacgaaccagggaattcaactagttacaaagggtaattgggatctttaacgtggacatagattaaagtggggtagcaagagccaccaaattaatagacgcaagtctcccgacatatggcaaagtcttcatctccacccttccaatcttttcttgagtttgtcctttataaaattaaaatcttgtattttttttcttgaaaacacaaaaggattacccaagtactgccctgttggatatattttaccagg

SEQ ID NO: 19530 - DNA, 7570 bp, Cannabis sativa
  modified_base (27)..(35): a, c, t, g, unknown or other
  modified_base (680)..(686): a, c, t, g, unknown or other
  modified_base (769)..(774): a, c, t, g, unknown or other
ttctacttttaaaaacagaaaactgannnnnnnnntgttaccaaacgccaccataatatttaatatatcaacaataattgatgagattcatgtatttaactaaaaaaatataatttaattaataataatctaattaattaaataaccaaatacggttataaatttaaaattatattctttgctttaatataccaattaatcaaaaaaatttgaactcctcgcaccaaattattttaatgcttcataattggctgtctatgggtcatttaatatttaattgaagattttgttaagatttctatcttaatgattgtaaacggcttggttaacttatttctattgattctactcaatgaataatgtgtacatgtaatcaaagactaaatctcatttacctattaatagaaattttatttacctttaaacagttggaagcaacatttttgccatttttaaaataaccatagataattatatagtaccatcaataacatctttatcaatgaagagtaatcaaaaaaatttacaacttgtagaaactgacaaaaaaggagagttttattttcacctcataaaatcatatatacatcccattattaaaaataatatataaacttaaataatttttaaaatttaatctaaatattttttaaagttttttcctcacattattttatgtnnnnnnnaatacttattttgattttattttcttaactttctaactcatgtatatatatttttattatttttctaagaaaattttatatannnnnntattttaatttttttgttataatatttaaaatataattttttttatttgataggtatattttttaagaatatgaattggcagaaaaaaattaaaaaaaaaaacttagtacaattgaatatataaattttatataaaataaaaattattataattgggtgtctttagaaatttttggggtctaaataaaatttcttgacgaaaaatataacttgagtaccctaacaaaaattctaaaccgtcaataaatatattgggtgtgttaaatattattttaacttgcttaaataactcgaataaacttatttatatatttccctactaaaattttctataatattttacataaattatatttaatagttaaattattttatatttaaagtttgtattatatagtgtttaattaaatatttagacttttaattaataattttaattgtatttaaatattaaagttaacatttagaatctacactaattttttgaaagagaaataatttgcttaatactttaatatttattcaatttaggttgtaagatttattaattaatttcatttaaaaaattaggtaggttgggtatttaaagtgaacgcttggagcaaattgtcaaggcccaatataatgagtaaggtgagcttgagcccaatatggcccatcgaaaaccaaagaaccaagttgggtaccatgccatttaaatgaaaaaaataaacaatttgaattattattacatttggggttttgttttggaacattactgggtcttgatttgaaatctgaaatggcccaaaagtttgtaatggctattttcaaaactaaataaatcatgctagttgtacaaactattttaaattttgctatttttggtagaacattgctattgaccactagtaatgtcccataattggttagtgatattattctttaaaagctattatcttaagttatgtgaaactcaatatttaagtacaccaataacagtatgatagggtgtcaagcatcaataacactttttaacaattctcgtttataaataaaaaattcaataccttagtcaccgaaactagtaaacatttggaattatttttgtttttaaagccatttgtgacttcttaccaaaaaaatgccattaataacttatttattaccaatggaattgaattttagtaactatttaattcatagctattaaatttaaaatgttagtaactagttttaccactttgaaactactgattagaatagttttagtctcttttctaaaatatcaacctaaaaagtaaaaatatgtcatgctttgtagatcactttattaatcattgtgtaaatattttttaaaaatatttatgaatataattttcataaaaataatatcaaaattagacaaacattaacaaacgctaatttttcccttattagaaaaagtgaatggattcgtggtaaacaaaatttatattggtaatttaataatactattattattagtattactcctaacactttattaattactttctaacaacaaaccttacctaccaatttttattattattttctttaatcttgataaagctttacctaccaatttaccaccaataatagtcttttttttttggatgccatttttaggatgaaaattccttttttttttttttcacatcaaaataacattttcccacctaatttttcttgtcccacttgtaaattcatccaaattaaaaggtctatttaatttctatgttttggaaaattatattttaattattacgtgccgtcctagctatatatacatatttatatacgatgtaatagaaaactattgtacctattttctctcaataatttttactttatatatattccaattttataaatattcttctcaatttggaccatttatttatatcacatccaactttaaaatttgtgatatataaaagagtcaatctttaatttataattatctttaggatatttgcttcaatgatatatactgattttttttttaaaaaaaataaataatatatactgaaattgttttattaataattgtgttttgataaattttgtttcttctactctatttgccaaacatgcaactttaaaatggcatatatatatatatatattaaaaaaaaataataaccttatttatatataaaacacatacccatgaacataagccatgcaaattaattaatataattacctaattaattacaaaaacagtagtaaaaagtagttatatagagaaagcaaagtttagttgaggttttaattaattaattaattaattagataagattagaaaccaattaacaaggaacaaataataatcatattgaaaatgtttttttttttattatttaatcacctttaatttgtaatgttataaaacatgtaataattaatttaaaaaataattaagaggtgtagtgggtgggtgtgtcacacactattgattgggttaggccatctgtatttttaggtttggcatttatattttgagacacatcttagtgtcattgggcattgaccacgacatctaccaagttttaaaccttgtaataatctaaaataatataccttttaatgatttttaattgattaatatcggctatttaataatactatttgaaatataacttttacggtactaacatggttattttattacattttataataagtgatacataataattgataaatggatcaagatcaaacttgaattttagagggtcatagaaaaaaaaaataatttaggttcttattttaaaaaaaaaatgtggtattttcaaaattaataaaaaatatgtgtatttttagaaatagaaaaaataatttatatttatttttttaagttttttaagattattaaagtacgtaagattaaatactattttagattatgtattttacaaaagttagaaattggatcatctgacttgttaaatgacaaaatgtaccatgtattttccaaaatggtacaaatatgatattgaattgattttttctcaaaataaaacttaataatccgacctagatgtattatgacaaaactaattaaattttttgtatctgttcgtgttaagaattatcttgaagttcgttatatttaaaaaaaattatcgaaaattaagcttagtatcctatttatacaattttaaaaaatacaagatatattttatcatttaacaaaaataaaaggtccaatttataattttagtaaaatacatggtctaaatggtatttaactttaaagtaaaaaaagtaaaagatatttgatttattattcactgtgttactcgttttacaataaaattctaaaattaaatagaatgtaattgaaaaattattttactgtaaaagttatatttcaaaaatattattaccaatattatactataaaggacacaatgtaataatataaaaatttttgagataaaaatactaaatattctattaatatatatgacactttttttactttttctttttttagtgtaataaagcaaacaagaataaaagtattaagtgtggacaatggacctcaaaatgtacgtggatataatatatataagatatctttaatatatatattttttctttccctttttcatttctagggttagaaataaatatcacatgcaatcacctttaaaagtattttggattattgttccaaatataaacatacatttaacaaccgttagattaataatataattatgttgatcgaagtacataaaaaaattaaccaaagtacgtacgttaaataatataaatttataataataaagaatatgcatgaagtccaatacattaaattacgagattcgatctgttttaattttgtgttcttaatttcgttattatttttttttattttaatcccactaaaaaatcttttttaatttttgtttgccaccactactataagggatggctcaccactaccaccaccatatataaatatatatatatttatatatatatatatattaagataagtctattatatactctgagtgtttttaatagatccgttatttgtttcgacatacagattttaacatatttttagatttgctatagggtaagtgtttttaaaaattcttattgaagatgtatcccaagcattttcttcttcatctaaaatgaggaaacaagtactttcagaggagaaacggatcgacctggaggccaaaacaaggacccaacgcctaggttgaactaggtgatgggcctaacacccaaattgacacttttatcaacttgggccatttccatcagcaattcaggagaagtcttctgcgcatattctttattttcatggacaattaatatttgagttcctttgagaaacaaacgaagtagtttggggtcagatttgggacccagtgcccaaattgacactttgtcaactgagtttttctaagaagtcttctagatatatttttcgttttcgccaaagattaaggtacaagtttttctggaaatcaaacggagtcatttggtgtcaaaaaactagacctagcgcctaggttgacacctgacactaggctcgatgcccaggttgacacctggcactatatccaatcaaatttctagaaaagtgctctgggtattttttctgtcataaaaataataaggatgcaagtgatctcaaggagcaaacgagatttcgagggaactagaatagggccctagtgccctgattgacatggcactaggctttgcgcccaggttgacgtgcaaccggattcgcatgttttccctcctcaaatataaattctactatgggtattcttcttaaaatggtcaaaaattaggtaggagacctcatttgcaatatcgaatttcatagaaatatcaaaacgagccctgagaaggcacttgggaagcacccagtacccaggttgacacatgacttggtgcggtgggttttgcttatcaaaattcgattctatttcaaacattcaactattttttcatagtaaaagagagctacaacttgtgagaggttaaattcatactttgatattttaccatttcaacaatgtgaaatatcggcaaaatcaaggagttttaagtcttcctaattttacaaaaaagagacatctccgagaattggtgaataactttaccagagtgcagaatgtgactaagtggtatcaacacatcaattaggtgacaaaagatacaagtctgagacattttttcactcacccgacgtccaattgggtgtcaacctgagcaataacaacctttagtaaaatagacataactcactcaatattgatctgattgactcgatttaatttgtgtttcgaagctatttcagagatatatcaattcatgtctcacacccatgtcgcaatttggaagatttcaaggacacaattcgtcctcaacatagttgcaatattcattactcgaaaacgatgtgacggaggagattcaaactccaaaaattgactattttcaccaagagccaattttcaccatttgatcatcatcaatggccaagatcatcccaaagtgattttttcatatttttttttttgtaatttattattattattattttaataggatctccttccctataaaggagagctcatctagctcatttttcacattcttctaagtctccattaagtaatagcacgtctctctctgtaaattcaagccccacacttggctagttttcttataattctcgtgagaaataaaaactcaaagtattcgtaactctattaccatcgcgtcacagggagtgagctattataaatttattgcatctcttatttatacttaattctcattacattctcactaatctagctagcgggtgcaactagatttctgcgtcaagagtaaccaatcgattacgtgggttcccaatcgacacaaacaaattccaaatttgcatcacacaataagcttatatgtcagtttataactgacacaacaaaagttttttgtactagtgtgatgattaaaatttggctaattaggattttcgttccttgaactttgacttgtaccaaattatgtccctttaatttttcaggtcgttaaaaattcttcataaatcattgaaatagttagatttaaggacttttatctaattttaattaattttgcaaatgtgacaattgtccatatactaaattgtgcccctaaattttgatatcttccaaatcatgcctcttaaactttgacatgtaccaaatcgtgctcccaaaatttttattcatgttagacttttttagtaaaattggacaaaagtcattaaatccaacaatctaaatagttaaagggaacttttcaatgagctaaaaaatttaggggcataatttaatatatgttaaagttcaaggggcaaaaatccaaattaaccttaaagttaactcactattctaatttcccatgaccaacttagaatgttagaactttgctattaggtatattaatagtgttaagcattatcacaatgattattgaattttcataaaattaaaatatataaaaccaaatatagttataatcctaattacggtgttcatgatggtgcttgacactactattacccataacatttttaaaaatattattccactaaatcgtatccaaactcaacaatgtaaaaattaatagtggtccgagaacaattgcaactaccaccttaaataaaaatgagaatttatgtcaaaaataaaatgaaaattcaaattaaaaaaaaacgagaaaatgtacaattaccaagtaccaacaaaagaaaaaatta

SEQ ID NO: 19531 - DNA, 5195 bp, Cannabis sativa
attttaagtgacattttatgcatgtgcatgtttcaggttatgcatctagatgctgaaaaagagatgatgtctcagtgtgttgcacttcttggaaagtttatcgctgtacgagaaccaaacattcgatatcttggtttggtaagttgtttgaaccattgtgacctttctcatcctccactttctcctccgctttactttcttcggttttttccttaataacttgttttgccaaggtacactgtaattgaattttgtgagctgaaagttatatcagctagactctagactgaacatacaagtggttgtttttgttgcttgatggtgtgtaacttgcttttcaatgctctaatgtaggagaatatgacacgtatgttgatggtgacagacgtgcaagaaattattaaaagacaccaagctcagattatcacctcattgaaagatcctgacatcaggttatttcactgtccactacttgttagatatgactacctacttgttactggttctttttctattttttcctatacttcgtttgctagtatggtaagtgtggaagaatacgaagatgagggttttagcctctagaggatgacaatctgaataattattaccaatctattgaagtggttttagtttattgggtaacttagtgtccgcttatcaaaacaagtttatgctaactgatgtcaaattctatcctcagtattcgtaggcgagccctggacttgctatatggtatgtgtgatgtttcaaatgcaaaggacatagtggaagaattattgcaggtacactattgctcaacaattattgtattatcacttgtcctttgtttccatgcaacagtagttttctaagataatataatcttgattcaaatattaagatgccaattactttcgtttgtttctagtatcttagtacagcagaatttgcaatgcgtgaggaattgtcccttaaagctgctattcttgcagaaaagtttgcccctgatctttcgtggtgagcatgatgtgtttgtaaaacttgctgtcaagatggagagcttcaacttataatttaagactttgcacactgacattattccctttatatgtgacctaggtatgttgatgtgatccttcaattgattgacaaggcgggagattttgtgagtgatgatatttggtttcgagttgtgcaatttgttacaaacaatgaagacctacaggtgatttaaagtgtttcttcttttgatagtatatgtgttgattacaggactattaacttagtttatttgatcagtcatatgcagcaataaaagccagagagtatcttgacaagccagcaatacacgagacaatggttaaggtttgtatatgcatttattagtgctaatgcaaataaaataagttaaaccatgtgcatctaatttgaagagctctctctgaatacatattagtatcattagtttttacagtattcactttgatttagatcagtgtgtctactataaatttgagttacggaacaactactttattttgcgtatatatttgattatccatcagttaagtgcaaggagtgtagatgtattacaacacaaccagacacaacaagagtttgaatcatattatctgaaattgttttattgctactaattatcttttatgtgaaggcttatggttatgaatgtcaactcatgtaatgctctaggtatagggactttactttttcagtcagtacttactggaaaggctgacagatgcccaatgttacacttttttgcccatatgcttgtgcacaaaatttaaaaacgaatgtcatggtcattctttccattgattaaaaaatttcaagtatttgcttggtattatgtaatttagtttaataatatccaggagaataatattttaatgatattgtctcaagtttaacaggcattgataaatatgtaacaggtaagtgcatatcttctaggagaatttggccaccttttgtccaggcggcctgggtgtactccaaaggaattgtttagcattatacatgagaagcttcctgctgtatcgtaaggatacttaactatttcttttatagtttgagttgctgaattattatttttattttatcttattcacttttcttttattgcagaacttctacaatacctattcttctttccacttatgctaagatcttgatgcatactcaacctccagatccagaactacagagtcagatttgggcaatatttagcaagtgagaattacatttaacccttttatttttaatgattatgatcaagtaaggttaaaggggccttgttgacacccactggtttcttttagatatgagagctgcattgatgttgagatacaacagagagctgctgaatatttatccttgagtaggaaaggtgcggctctaatggatatattgtctgaaatgcccaagttccctgagcgacaggtagtttttgttttttcgagaaaaagcttatggattttttggtggctaaccattcaatattgattacagtcctcttgaagatttttttactaaatgtaatttttttctcttcaaaatttagtcatctttgataaggaaggctgaggatactgaagttgatactgctgaacaaagtgctctcaagttgcgggcccagcagcaaatgtcaactgctttggttgtaactgaccaacgtcctgcaaatggaactccattcaccggtcagctttctcttgtaaaagttcccagtgcaagcaataatgcggtcagttcttactgtcttttttcccccctgttattttacaattttttgctaatttttgtgattatatgtttcttatgcataatgccgtgaaccggtagcattccctcccttgtagaattcgaatggaagttttgtaaacgtctattaaaatttcagaatatagtgtatatacaaaatacgtaattggattatgatttttagctttaaattcataacaggatgtcagttcagctgatcaaggattgtcccagacgaatggagtcctgactacagttgatcctgaaccgccttcagctgatctccttggtgatctcttgggtcctttggctattgaaggccctcctccatcagataatgaagattctcggcaaaatgtagtcactgggttggaaggtgataatgtagtggatgcctcggctatagtccctgttgatgatcctcagaattccgtagaggtaaatggttactgtgtttaactactaaatatgcaattttttcctttcaaaggtggacataaatgttttctgtgcattgaatcacactattgataggaccagtatttgttactgagttatgtattggttccgagttgtcagtcttctgcttgcacttattttttggttgctggagatattttagcctgtattttcttgcatctatctctttatttgtcagctttttatatgacaaagcctcattaacccacaacgatctgtatctatgctatgctgtttgtgctcatcagtctgacttgacatattgtttctattgtttcttatctcttcatcaatgtcaaaagagttggtcagaaataattcttctgtatcattatatacttgtttggaaggatttaggcttttcagtgttacttcgacatttaagaatttcttcatttttgcagcctataggaaatactgctgaaagatttatggctttgtgcttgaaggatagtggtgttctctacgaagatcctcatattcaggtttttttcttttttctttttttgcattttagaaactcattcctttttatttttattttgggatataagattttcctcataatttttgctggcataattttacaatgcctatttttcactaattgttgttatggtattctagattggtattaaagcagattggcgactatatcaaggccgtcttgttattttcttgggcaacaagaatactactccacttgtttcggttcaagctataattttacctccatcccatttaaagatagaggtctcattagtaccagacactattcctcccagggcacaggtatgctttacaatagtataatctggcttttgatagacacacaggtcactttgtcatctcgtattttaattcggctgcataggtacaatgccctcttgaagttgtgaatctccgcccaagcagggatgtagcagttctggacttctcctacaagtttggtaacaatatggtattaacatcctcattttctgaatcttttttgttgcctacccggaagctaggttatgtgtgattattatcttataattttccttttataggccaatgtaaagcttcgtctcccagtcgtattgaataaattctttcagcctataatggtgtctgcagaagagtttttccctcaatggagatcactttcagggccacctttgaagctccaagaagtggtatgttttcagcatttaatgacatctgcttctcagggtccactgctggttccattgtattatgctcaggaagtaagctatgatatttttgatgatttatcccggtttatttatccaggttagaggcgtaagaccactatccctccaggaaatgaccaatttatttaatagtttccggctaatggtttgtccagggcttgtaagtacatatatccctctcttacctttttttcttcttcttagtggaatttcagttgtgtagagttactcactgttacattgtctgtttttaggatccaaatcctaataatctcgttgcaagcacaacgtattattcagaaagtacacaggccatgctttgcttggtaagaacggtttgcttgtttcttctttagtgcttcatcgatgattatacaaaccatctgttgagtgcataaaattgtgactgaaatgaattaatatctgtcatcatgtgtttttggttgtttgaaattaatactgtataattagaggaaaaaatcctgcctatctgtactgcatagttttatttcccgggaacagatgatatagcacttcttttgacaagtttcggcttcattaatttcatctgtcacaagcttttggaatacgtgacacaaaattgtttttgatgtaatccaggttagaattgaaacagatccagctgataggactcagttgcgtatgacacttgcctcaggagaccctgcactgacattcgagtatgtataagtgttgtcgatcactgacaca

SEQ ID NO: 19532 - DNA, 3907 bp, Cannabis sativa
cgagttagaaaacattttgagctaagagtatgggttactgtgtcagatgagtttgatatttcaaagataacaagagagatctttgagggggtcacttccaacaaatgtgatatcgagaacccagtggaaatacgaagaaaattgaaggaagcattgcaggggaagaagtttatgtttgtccatgatgatgtttggaacgagtcctattctttgtggaacactttgaagagttgttttgcatgtggagcaagtggaagtaaaattgttgtgacaacccggagcgaaactgtcgccactactatggccaccgagaaaattcatcagctacacacattgttagatgaagattgttggcaattatttgtcaaacatgcttttagaaacaaggatgagcttcttaattacgaagatttggaggtactgggtagacaaatagtggacaagtgcaaaggccttcctttagcaataatagctctcggtggactattgcgctctgaaagaaattccaagaaatgggaagacatacttaggagtgacacatggggggagttgtacaagaaggagggttccattcttccagctttatggttgagctatcgtcacttacctggacatctcaagcaatgttttgcttattgttctatattccctaaagattatgaatttgaaagaaaagaattgattttgctgtggatggctgaaggttttttgtcacttgataaaaaaggtaaaaagatggaggaatatggggaggaataccttgaggaacttttatcaaggtcattgtttcaatattcaaataaagaaaaatcattgctccaaatgcatgacctgctacatgatttggccatattcgtatcaaatgacttttgctttaggttggatttgagtaatgatttgcttgaacttccagcaaatacacgacacttgtcatttttgaagaaggcaaattacaaagtccacaaaggcaagggattacatgaagccaagggcttgcgtacctttctagcaatatcattccaatcaaataggtattactggagtatggagtgtgatatgtttcttacatgtggaagttgtttaagagttctttctttaagtcaacgttatatggagaagctacctcattccattggtaatctaaagcatttgaggtacctggacttgtctgacacttcaattagagaattacctgattcagtttgtaatttatacaatttacagactttattattatttgggtgtaattttcttcgtcaattacccaagaagataggaaggttaatcaacttgcgatatctagatattgatcgtgtacctctgaaagagcctcctcaagaacttagtagcataaaacacttgtattttttatcccatgtcactttgagtggtgatagaaatagcggaggatttaaaatgaataaggttggagaacttgggaatttacggtgcatttctggtttggaaactatcaaggatgcaagagaagcttcagaggctaatatgaaggataagaagtgcctttctaaactgactttgaggtgggatgataatggcagtgtagctgatgattcagtaaaagaaaaagaaaaggacatacttgatgcacttcggccacatacaaacttggagcatcttgagattgaatgttacaaaggtacaacattctctgactggattgtagactctgcattttctaagttagtatcagtcagctttattgattgtaagaattgttgtattttacccccacttgggaagctggcatttctcaaagatctcacaattaagggatgtgatagtgtgatctcaataggtgatgagattcctcatgatcaaggtcttcttctattcagatgtctagaatcattaaggattgcagatatgatggagtggaaaaattggtcatttgctattcttgaagaagaaggtcaaatattattccctcttcttaaatcacttcatttgaagaattgtccaaagcttaaagttgggttacctggttatctttcatccttggaatgtctgagtatcagtaattgtgaacaaatggtgggtttggtcccgagaactactcaacagaccgtcataggcacaaccctttcctctcttgcctatctatggataaggggttgtccaatgttggaatcacttctagactggggatcactctccaaagtaaagatgattgaattatgtaagtgcaaaaggctctttgagaaccgtaagcaatgggatctgcatagactctcctctttggaatccttagttatcaagggttgggaagatgattcttttctagatgaggggttccttccgaccactctgaagaaacttgaattttcggattgtagtaagcttgaaagcctaaatggcaaggcctttcaacaactcacatcccttactttcttatatattattaattgtgaaaggctgcggtgcttgcccgaagaactcctacctacttccctttctgaattaagaatatggaaatgtcctttgctaaagcaacggtgtaagaaaagaggagaagattggcctaagattcaacacattggatatgtgacattggattctgcagtgatgtctgtaggtatgtaaggtacattattctctttcttcttttgcttgattcttttatttattaaattcactaatgtcatgtgttggattataatcatgcaactaagttctcaactcatatctccataggctttctccatttattaatagcttcatctattccagctttatatgcagtagcttatgattatatattaatagacctttgttactacaattttcctctgccaaaagtgggaacactctaagacaagtgacctctatcacttttttctgaaaaaaaacaaaaaaagtaattttagcatcataatattcaaaagtatatatgtttgatgtgagttttatcctttatttccgattttagctacagctctaaataatcttctcatatcgatttccattgcctttgcctttttcaatgatgctcaggacaagcaacttcgagatgacaatgtcaagcaatggcttttcaagcttcaagatgtcatattagataaattaataataaactcgaagatcaatttgtatataatatagaatacaataataatatattataattaggtatgcgtacctgattgatacatagcaattatctcaattcgatccatagcaattacttcaatttgatagtgcaatactatcaactaagtcttcctccctagatctcttaatcagaagcagtttatttatcttatcatcaaaacgtatacaattgtgatgagacaatatgtatttatagagttaaggaggggacttagctacataatcctagttggactggacttgctcatcaaagatttgagttaactagaaaagtccatacttctgcttcacctagactttacacacagatgctaagccgattaactagtgatcaccaacaatatgggctaacataacaaagaactatccaatcaatccaaattttaataaatgcccaaataaaaagtctaacaatatatcccaaacataacaatttcttctgccatatgtctgtgcaggctccttatttaattattcaccagaaaaatggactcttaagattgtattccgtacagtcagattttatggggctgatattaggaatcttgtcgatgaagcagcaactatgtcagagagtaaaaacaattacatttgagtaaacattttcccaactaggtgtgaacattttcactttaataccttgaaatcacagcggaatttgtactttttatttgagcagttgaagtatttgtcttagatagcccaaagtcttgagagttagccctttaattagtcttctcgtaaagaaaacagtattgatgaagtcattttgtttgtt

SEQ ID NO: 19533 - DNA, 3401 bp, Cannabis sativa
  modified_base (3337)..(3346): a, c, t, g, unknown or other
gttactttagttctagaatttccagcaaaaaaattatgtccgatacccaaataggaccattgtatgggaaatattggatgcatgatcctttggatttcgggatattaagatatgatgaacactcctcgagccgcgagcactacagagcttggtcaggaatcttgaggaactttggttattggtaaaaatactactcctcttgcttctaatcttgttggaggtggtgctagttccttggacagtcagaagaggaaagctctatctacattagtgggcttgagccataagaagaggtttcgtagaaaaccaggtcagggtggccttggaggtcactctaaaagcatcatctaggagagtgtaattgtaagacatgtttccagtgcagtttggtaaggcactgtaagagagactacccacatctgcagaaggtggaactagaacaatagacaaaacccacttcatgtttggatgttgatcactaccaaaaccaatactgaagatagttcttcaatggtgtcatatcagtttctagccaactattttacttttctctatgttaattgattttggagctatgaattaatatgtggtagtctgaataattgataaattgggtaggccttaagatagatatggaaaaagggtttggaaccctattacctagcagggaattacttatctccaaaaggttgtttaggtctatgctaattggagttgaggacagaaagttgaacactgatctcgtagctttaggtatagtagagtttaagatattgtatggaatggaagtagtgtccaagtaagctgctagtattgaatgcaaagaggaaatggtaattttttttcaattaaagaagaaggatcgttcgtgttatggtattggctcgaggtacttaaactccaagtaccatgatgataaagttagagacctattgcagcatggaagcagagaatcccttgtagtggtattatataccacctagccaaggtagttcgccctatggatattagagtggtacaagagttcttggatgtatttccagaagaacttttaggattactgccacattaaagatagactttgctgttattttggtaattggagtagaggtgggttctagggcacccaacaaaatggctccaactgaatttaaggaattaaagttatgatttcaggggatgctcaatatagggtttattgccatggaaagttctggtattgttcattaagaagaaatatggttcgcttcatatgtgcatttgttatcaagaactaaataagttgaaaatcaagagtaagtaccctctattaggattgacggttgggttgatcatttcaaagaaatatagtcttctccaagaccgatcttctccagggctatcattcgttaagaatgcgagtacaggaaatcttaagggctacctatcatattaggttgatcattatgaatttctagttatgtctttagggactaactaatgttctagtagctcttgaggatttgatattcaaagtactcaaggatttcctcgataggtgtgttatagtaaatatcgatgatatcattgtgtactttaaattagaagcaaactatgagcaacatttatagatggtcttgtagcggttatgggagcatggattgtatatatcaaaattaagaagtacgaattttgtttactttgagtgtctttcctagggcaagttattaataaagatggattacggtttatttgggaaagaattaatctgataggaattggccaaggtcaaagacaatcatcaaggttagaactttcaaggttcaactattactaccattgcccgtgcaagcatttcaaagatctatatgcccacatcagagctaaccaagaagaatcaacagttagcatgggtagatggatgtgaattagattcgagagctaaagcaatgattgattacgattctagtgttatcataggcatcaaatgaagaaaattcatggtctattgtgaggcatccaaactggatctggggtgtgttctgatgcaagttgatagtgttcttgctaattcttctcattatttgaagaagtataagtgatcttacccaatttattacgtagaacttgtgacagtagttttattcttaagatttggtaaaactatctctatagagaaaagtgtgaaatatttattatctgaagagactggaatatgagataaaggtgaaggtcaaagttagccaaagattaagattgtgaagctttctattaccccggagagaccaatctagtggaagaaaccctaggtaggagatgtcctgggtgggtctcagtacaaccatgatttctcctcagccagtgattgtcatgatcaggttaagtttggagtttgtaatgggtaaacagaaaaagttaacacttcaaactagatttatcagataaaaataaaagtgcttagttggtgtagaatgcaaaaggatgtggtagattatgtatttagatgcttaattgacagtacattaagattaaccatcagagacttgaaaggtattatgatttactaaatttaccgaatgaaataggaagaggttattagaaattttgtaattagagtactttaaactgcaagcatgttttcttttatatgattaaatatgaattagagtactattttggtataagaactaataaggaaaagtatttaagggagatagtatgaccttatgtgactctaaagtctatttttttggataggaaacggaagttcacttctaatttttaatagtctatagagggctatgagtacgaagtttaagtttagtacaactttctacccttagacagatggtcaatatgaaagttatgttgcaagattacgtgatgaatttcaagaattcatggaacaagtatctacttttgttaagtttatatgcatgcgaaaagcagttatcaaagtatgatagagatggttccctataagatgtggaatagtatgaaatgtcatttttgaaactcaagacagaaaatacctagttttcagagttagttcagtagataagtaaggctttagagaagattatggcaaaggtgcttacttctcaaaacaaatagtaaaagatatatagatctgaagttcagaaatgctgagatcccaagcagaggataaatcatgtcctcctatgaatatcatcagtgaaagtagtaaaatatttctgaggcaaggggaagatatgccctaggttgctaaaactttaagagcttctcgagaaattagaataataatttctcgtctagctttatgatttgcattcctaacacacatgatgttgtatgttgttgttgggttttgtgcccnnnnnnnnnntctatttcaatgtaatcttctatattcatttatcaataaagaaatagatatattt

SEQ ID NO: 19534 - DNA, 1678 bp, Cannabis sativa
cattgtatttgcattctcaagacaatgtagtgaagtccaagaactcgagtacttctgtatcatgacccattttcctctttacttactcgatggatgtattctcgatatatctaggatatatatagagttaggcagtgagcttatatttttctatgctggaatttccctcaagaaagacaactagagtataattgaagattggttaatttaggtagtttatttcttgtgttgcatccataaaacgatataaaaattcatatgacagaacatgttctgttgggcagttttcattatttaatttttactaccattatgttttccccttcagatgtatgacgaggtgcgtaaagagatttggtaccgaccagacatgttcttttaccgagatatgctgatgatgcttgcaagaaacaaaaaggtgaatgaagcaatgaaggtttggcaagatttaaagagtgaaaacgttgtgtttgatcagcatacatatggggacattgttagagtgtttctagacaatggattaccatcagaggccatgtacatatacaatgagatgacatcttcccctgaccccccactctctctaccatttcgagttattctaaaggggctcctgccttacccggaattgagagagaaagtgaaagaggatttcttgaggatttttccggggatgatcgtgtatgacctacctgaagacttgtttgatagtcatgacaggagtacagatagtgaagaagatgagtagaagaaaggaatatttgaatgtttgaactgagagagcattaactaactgctctaaccatgttagctggatttagtttgtgaacaacttgtatatatattgatttctggattaatgaaacactttacggattttccctttaaaaaaccttgcatgagttttttttttctgtactaaccaacatgttctttcatctaattaagaaatagaactcatctcatttttagacacaagttcaaaatattatgattgtctaagttattttattgaagtaacaagagtaggttacaagtgaagcttataactttgggaatgaaaaacaacaacaatggaaagaaaaaaagcaaaaagcacagcacagcacacattagtagagaaatcaaagctttttggtaggaaatgaagccattttgtagataccacagatgccttctggtttaccaatgtttctcttcatccttatgtaacctttctctccccactttgatccccatgagtttcttactatgatgtaatctcctcctttggatgttccatatcccactgctgcaactccatgatcaagatcagttccgcaacgcccgttaaacactccctgaaaaatcccaattgtagtcaagaattttatatatagagagagagagaaaaagtaatgtgttttaacaagagcttaccccactgtagaactggaaagctctgtcagaagcatcaatggctacactaataggttggtgagccaatgccttgagaagactttgttcatcatttgctggcacatcttgataaccactaatggtcactctttccatctcaccctgccacaaaaatgattagatagcaatacaagaaactaccattgtttatggctaaaatgaatgatcttaattttgatcatcagtaccttcttcccttcacaggtaccttcctccataa

SEQ ID NO: 19535 - DNA, 6099 bp, Cannabis sativa
gtattagattcatgcccatttccgccatggattcaactagctccgatttcgaaaacaacaaagtattcctctcttctggggggttttaataacaaaggattaggcatagtatttagttattatggagccctaggtttcaatgttttgtctgtacaaattcagtttctgtacctttttaataagagggaaaagtttaataggaaaggacagagactgaggctagctcagtggtgtggacagtgagggggagaggtaaggtggaggcctcaagtttgaacctaggacctctttattatgcggcctactggaaatgatactaagtagtgttgtaagttgtaacatacttttccaattcaacaagtggtaatttaattgggctttgatacataaacaaattcgtttgaaataacaattttctttggttttaaataaaacatttgcaaggatgatgacagccagtttaggtttaatcataggagtttactaaaacatgccttatttttttttttttgttattattatggttgctatagcttatgaggacttttattttatttatttcttgtatagtctttgactaaagtaatttatatatatatgtattattatttgaagttgttgaaaattgctgtttaattttaaattttgtgtctttctagtgaaatttacccttttctgaagagtttatgtcttgaggggactcgtttgcagtcaaaatttgctgtttcagcaattgcaacattaattgatacatcaaaggagacagaattatgcaaggtacaatagttgagacgtaattatgtagttgcaatttgcaaactaatgtctgcaacgtcgttcttaatatatcttggaatattatgtgcttatatgtctgccaaaggataacttcttagtaaatcccaaattccttattttaaaaactgcggtaaaaatcatttgggctgtgtgatattgttagttcatgtttccttcaaccattcttgttgatcacaatggaatactaaatttttaatgtgaactaaagctaacttaagcaggacaagcagtgtaaacaagatgaaaagaaagtacattaatgataacccatactatacctccgcggctctgcccattctctcttaggcaactactggtctgctggggccaataagtctgacagcataataatttaatctttctcatcttgcaaaccacaagccagtcaaactgcatactattgcacagaaccttgatattcttttttttattttgcaaactaaacgtcttaacttgaattatagattgggaaaatatacaactgtcattccctaattaaatcggaatgtaaaattcttttatattatgtaaccattgctgtctaatgttttattttgtcccataaaaactcaaactctttaaatattgtgtttcctaaagccagagagaaactacaatgtaggaaaatgtgattagttgtgtcctcatgttgtttgcacaaaaaacaccatcctggagatagcactcgaatgggatcttttttacttttttctgcagaattgcatgtttatacaatttatatataacaaccaaacaaaaatctgtacttccttgggattgggcattcccataaaggttttttttccctctctttttgtaggataattctgaatgttattgacttacacaaaaaagctttgttaacatatcgggggtggggctagtctaagacaaaggcctcgttctctttttcagaaaaaaaaaagctttgttaaatccctccaacgtctgcattacttcagtcaactcttctatccgtgttaactccctccactgtctgcattaattcagtcaactcgggtacttcaacatcgttgaggtttcttacaaaatggaaaattccattccctactacttccacttgctccaaaaaatctgctattcagccattctccttaaaataaatacttcccaaacctaggaaaacatttttaaagcagcagggttgttttccatttagaaaagatggattgttaagatatgtcaagaagctatgccttggacaaaaaatagattttagtgaaccctcaacatggattgatttatatatctttccatggatggcttggtttctcaatcaacatcttctgactacacattgtttttgtttcttgatcaataacatcttctgaaaatacgttttttgatcattggataagatcagctaacagatcaggaatgtgcatgcaatttttttttttcatgtaatttcttagttgtataaaatattttttaccagtcattatcaactatggcctctatctgtacaggaacttgtggaatctttacattgtggaaggaatacttccactgtgctgcagtctttgggctgtcttgcacaacattctgtttcaacatttgaagctcatgatggagagatcactccatttatttatgagaagattttacaggtaaaagtattcttgtttgtttgattttgttgtgtctgcaatagtatctctctcaggtcatcaaccggtggaattatttttgttagtttttgttcttcaggtgcttgttgaattttgttcatgtaatatttataaaatttatgtaggtggactcaacagaaacttctagctcatctgatgatagtcttggctgtagtgattcttgcaaattaaaggtaaatattattttcagaaaactgtttccttgaatgtatttgttaattgcactttaaccattgtcatggggttatgttcttgtgtcgtacccaccatatgtatgtgtggttttagagaattatgttttactttaaaatggacaaacacagggtatatctccaacctcctctcatgataagttgcaatactcttttttagctcatgtattagtgaaagctttctagccatgccaacatattattaacttaccatgtgcaaattggatttggcgactattgtacttttcagttttcagctgagatatattttcctataaccttcttgagtcatttttctcctctttctgtagatatgtgggctgaaaacacttgtcaagagttttttgccacaccgcggagctaaagtcagacggaatattaaagaattgttggacagattgttgattataatgagaaataatgacacatgcaggtatatgtgttattcaacatagtaaaattattttattgtacttttgtgtgtcaatttcacatctaggttgctttcagttttgttatcatcggttgctgtacatttcctgcttttacgcagaatttgggaagatgaggattgagtggtttagtgttttagtttgctatcctcatagtcacctatatgatggataaccctaagtcatatgatctttcccaaaatttttagagttatgtgggggtcaattttcttaccgatgtcagtaattgggtttagggattttcgggatttcaactcgtgtaggaagatttagttgatatagttgcttgatatcaatgatttgctcaatttgcttagtttattatattattagcattttatgtggcatgggttatatggtggggatctaattcctatgtagtgttttgatatcagtttaatattcgtgatactgtcttcctgttcaccgaaaagtaatttctagttttaattgcgtacccttttcctaattacttcttaccctaagatatttttgagttgtggtggggttacacttcctcatggaggattatttttatgattcagaaaatttaaattgttttttttttgcattgtaaactcaagctgtgtatcaattttacaaatgctgttgtctgtttgttatcttcatcaattttatgagtcatttatgtagttgccagttagggtgagcaaagtagtagcattgtttcccttcctcaagggatagcttaagcggtggagtccacatttggaaccatgaggcctagggtacacttttcaggctttatattaagagactaagtttactatttgcttgttgacgttgtgtaatgcagtgaaagaaatgagtcttttttgagactagccgctgcaaagtctgttctccgactctctcaaagatgggatttctatatttctccagaaatatttagctcaacaatttcaatggcaaaggtatactatgcatgactatatagaaatagccaagttgttgaagcaagactaattatgaaagattgaaatatcgcttcaaatagttgttgaacctacattagtatacatacactgtctttgaagaatacccttgaaggaaagattgttctaatttttttttttttttgcgttataatattcttggattcttaacatctgggaagattttgcatatttaatgttcctcttggtacgttggccttttttgcattgcattaaaagttcatagatacaaatttgactattttctccatgaaattccaggatggctcatattctgttagaaggtcttttcttgataaaacacacacaatgttgaagaagcgtgctgtaccaagtagatatgcatgtatttatgcattggcctcctgccttgaggatctacgagaggatgtatgctagggtctactttaaagcatctcttatcattttggtttgtttgatttgaatttttacttattttgttttattgatttttctgtttagtcatataaatatatggcagagtttgtcaaagagtatggcagagaagctcgtcaaacaactggtgacactgacaaaaagggattaattactgacttccctgcatacatagtagtcttcttaattcattttcttgcacatgataaagagtttcctcttgaagattgtcgaaatgaagacttatatgctcatttttgcaggtatgtatatttttggatttattgccttccatgaattaattcaccaatcataatttctcgttgcagtccactgttttcagtattgcaggcattactcaatgctattaattttgatgatgacgtgaatgaagttaaagccactgtctcgtacttggtttatattttccgagctatcaagagagttgaggatgctgtcaatattaaaaataccagtgtaagaattttctctttaaagattaatacttatctttaattatgtgctctattacgagtgacaaagattgttttgtaaattgcagaagcttcatattctagcagatatcgggctcgctttcgtcattgcagtaaatcaaagtggaatctcagtctcgtcatctcatattttgctaccatcatctttatacagagtaagtcatggcaaaaagaactattaggaagaaaaggctttaaatttgtcaaaagatgtcgaacatgattttgatttcctattttgtttattgtgtgcaggctaatacaggatatgttgctcaatcctgccttgatgaagactttgtcaaaagagtgattgataagtttaagtcccatagctctttggtatgcatgtaaaatttttcttttatttatttaattaggtgatattatataagataatctctttaagcacatttgttgaaaattaatatgttttcttgctatataggtgcatgagactaatccttctaaacgtggccgaaagcataaaggggattgctcacaatcagctgttatcagggacagaaatttgaactttcctctttctaaaataggagatttacccatttctaaatcagcagagactgaacaaactgtgaagcaaggcactgccacgggaggtaggcgaaaacaggctgcctccatgaatggttctgggtcagctcaactgcatgagtgttctaaaattgatcatcacattgatgcttcgggaaaatcagaatctaatctggaaacagaacatataatatcctctagtggttctgtgccagtaaaaccacctgtggctggatcacgtatttcaacccgaaacatgaaaagaaatgctgcttctttaaaagtaagtggtggggggagcagcaatagtggttctgaagattccaaattgaaccaagctaagctcaaagacacttgcagcttgaaagtaattatgaatttaattgagcctatctggattactttcaaattcttattctttaattattcatcaaaatatcctaatatatatgaattat

SEQ ID NO: 19536 - DNA, 7733 bp, Cannabis sativa
ctaaaaacattggatgtgatccaatgaacacccctagtatttcgacttttctcaaatcgaagaaaaatggttgagcgacaccacggatactgacgtgtccaaaattggtggttatgtagaggattactattttgtcaagggcatgtggaccaatcacaccaatttttagcacatcccttcgttctaccggcctccttttacacaggaactcaagaagagggctcaagatatactctgaagtccttcaaaggctcagaatatttcacttttggctattgaggccaacttcattaagtataaactttacccatctaatgatagtcataggatcaagtaggttatagagggggttatgtatgatcatgaggaggaagttgcacccaatcaagaagcaccaaagaaaaagaaataggagaaggctttccaagatgaccaagtacctattgagcggcctatcaagatcagagatggtcctgaagaagctactcgtccttctgcccaagtggaaggaaagggaaaggcaatggtagtcaaagaagaagaggactcttctgatgaggatgctttgtccttactttttttggagggtgcccctatgcatgtgcagggtagactattttctcttagttttgtttatccttacttggtttatgcttttttgacatatatttcctttatttgtgtgcagttatgtctcaaaggatactgtgtgcactaaagaagaggtcgggtgatgcctctgaccagaaatctccaataaaatgtcctaaggtggacgacatgatgtcgaagagcatagttacgaggaccaagacccctcaggtgatttctaaaaggagttatgctatttcatcctcagatgcacttgaggtggtggcccttaattctgccgctttggccaagaagaactccaaatcttaagcagtagctgcccagaccaagggttctaaaggggtgaacactgaagggctcggactaccaaagcctcaaggcactccttcttattgaatccagagacagagaagggaaaggagacgctcatgttctatcaggaccgtgtgctgcccgaggtgaacgaccaactggctggggcagaatatatgtccatggagttactcgtgggcggtatactaaaggaggctacccaaaaagtatctttccttctattttttctatacaggccttaaactatacatgctttaacttagtcttatcgtgtagctcaatttgaagatagcatacacatactcccgtgctaagtctgtggctttaaaagtcataaccaccaccaataatctgaatgaagaggtggaggaggccaggaaggaaactgagcttaagagtcttcaattaggtgaagttaataagaaactccttgctactaataagctcattgaagacttgaagaaggagatcaacaacatgccatccactgcttagctcgaggcagacaatgaggcattggcaaaagatgtaaactctgttaaggatgagagggaaaatctctgtactcttctcaccaatctggagaccaaggtcaatgattcgactgaggagaagagggtcttacaggagacccttgattctaagtagatatcttttattactgaatggaaggttcttcaaaaggaggtggacaatttagagtcagttggtttggacgtcttctatgagttttggaaggctaacccagaggctaactttgattacctcaatgagaataaggaggcttatcttggtttttaggaagctcaaaaagccaaagaagatgtcgaagcaaccaacaccaatacttccactaacaaagagactgaaaaccatgtcgttgaagaatcatctgattagtacatagtgatgcggtgcttaggtaagttccctttttatttctctttgatgtcacattggagacaatgtgtcaactaagttcgggcggtgaacttaaaatttttagcctttagtttttttttagttttcattttagttttagtttttggttgtttttgtgttgttatgagtcaatttgctaaatgtgagtcaacttgaaagtaggtagatagcatagtttgaaaatttcatttattttttcaaaaaatccgtatgcatggtgatattacattcttgactaatttcaattttgtgctttaaaagaacatggaatcataaaaggtaaatttttagcaattgaattggtttatgtaagctaactgtgaaatgtggaaagttctgtgaaaaaatctagaacatgcttgcttgctatttgagacgaaataataaattttacataactaggaaagtgatttaggtattttttttggatcgattgtgcctttcaagtcatccttgtaattttatcttagttaccctttttgagccttaacttgattctttgtttctacatagttggagcctacacaaaataaacccgttaatctctataatttgaccataatcataccataagtggatctttagtgtaggggaatttagatgagaagttgtaaatgtgtatgggaatgagggtgaaaattgagggaatgtgagaaaaaaatttatttattagcaacaacttggaaataaagaaaagaaaaaaaaaataaaaattaagttgtggcaatattgtggaataaaattctctcatggaataagaaaaatgggatatgagattgtttgtgagaaaaatattgggtgacatgattggagaagcttctggtatagacaagcctaaatgaccattttaactacccatacataagcctaacattacaagcctagaaagacattttaattcttagttgggcattgatttatattagtggagaatagtaagtattgcaagcatatgaaatattttggattagtggattgatggttgtaattggcatgcataaattgtttcaattgttacttaagtgcttattatggtttcgtgagctgagtgaaaaaaaaatttaaagtgtgtcaagggtgtgattgaactaaaattctagattattatgcataggtgaaatttttcataatcatgttatttagtctacttgaaagttgctcaagttatgtggattgacttatttaggttgtgtgttttttgttttactgttttactcgaggacgagtgaaagcttagtttgggagaatttgttaggtttttattagtactattttttgattgattttagtgtattttcaaataagttttactctattttttttgaacaagaggaaactttattaaaaaacaagcaagtacaagcaaaaggcacaaagccacaacaacactccacggcagcagctactacagacagcagccacaaaacaccaccactaccaacttttaattacattaagtaaatacaagtttttttggcaagctttaaaaggacccttgctcataattctaagctgaacaattttcctaacttccaagctcaaacatctaggggaagcacaagacaaatcaaatatgcatcttttcctattcttccaaaaatgatacaaagttgcaaccataacaatatttgtgatttggctttggaaatgctgagtcaagttcctgcatctgtcaagtagttcaacaaatcgaatctgaccactgtatatctccaagccaagagttaatatctacaaaaacctgcttatagtacatacaattgaaaaaatgatgatcatgagtctccacttctgcctcacaaataggacaaataatgtttagaatagtcataaaccgattcaagtaatcccaagtaagaagttgggaatttgatatctgtcagtagaagaacctgtgtttaggcacaattagtttatcccaaatatctccagcatagtcagccatgtcctcctccacaagcagattatgttagcttttggcacggaatttgttgccttccacagcaaggctaagtttagcttcattcgtattatctctaagacccaaattttcttgaagtaccagctaacatccacattctttggacaattccagatgtcatgatctctcaaataaattgatttgatccatttgacccataagcaatcttgcttactagcaagagcccaaagaaacttagccaaaagagccttattccattttttccttctcaaaaaccaattcctccaagattttagagaggcagacctgttccccataagaaatctcgacaactcttgtcaatgacaaccattatcttgaaagaaatgatgaaaatgctcatccaaaaattcctaattccaagcaacactgagtgaatcaattgtgcatggccagcaaaaggacatatttctactagcccagcaattaaggttcttgttcaatttatccaagataactccacagtctggggctttccatttggtaggccgaacatttacccctaagtatttgaggggaaaacaaccttcttcaatttggattaaatcaaggatcttggatttgacctcttcactaaccccttaaagtaaatatgagacttcaaggtgttagcagacaaacctgtggcattgcagaacttcatgaaggcttcatgggtaagtctcatcgagttgatgttaccttcacaagataactaagtcatcagcaaaacacaagttagtcaagcgaaggtgcttgcataaaggatggaaaccaaagccctttttaccaaaatagtagctaagcaaccttgtaaggtattccattatcaaaacaaagagtaatggggacattggctctccttgacagaggccttttttgcctttgaagctaccttgaattcttccatttaaaagcaaatggtagtttgttcctttcagacaagtcattatccacatgataaatcgagaaaaaaagtagagcaacctgagtaagtcttccacaaactcccagtcaactgtgtcgtaagccttgctgagatcaattttcatgatgcacctagatgaaatattctttcgtgtattacccttcaggaggtcttgaaaaatcatgatataatgagccaacagtctatttttaataaacgcaccttggttattgttgacaatagtggggagcacttctgaaagtctagaacagatcatcttcgagatgcatttgtagactgtgttgcaacaagcaacgggtctataatactttgcaaaagaggggttagccactttgggaataaagaaatgacagtctcattcaagtttttaggcaaacgaccactagcaaagaaatccaaaaccgcaatagagacatcatctccaattttgctccataaatccttataaaagccagattcgaaacaatctaatcctgggatcttggaagaatgaatgctggaaagagctttcttaacatctcccttgttaaaagacccaatcaagttaacttgctgctccaaatccaaacatttaccctacttaaaacaggcctcatctattgtgcttgaagttgaacttttactgcccataaagttttcaaaatgctaaacaaagtgttttaccacttactcaaagtcatcaacaattgtgtccccattcatgaaagtggtgattctgttttccagtcttcttttactcataactgcatgaaaatagcttgtattttcatcacaacacttgatccaattaaccttgctttgctgtttgagaacctgagcaaatctgtcctttgctgccaaaaaacctaatgcatttcagagactgcctcttcttaaatgttacaatacatctccttagcatttttataatccatagctacttcccccacttcatgcctgttgaaaatttttaaggcatgcttgactctaaacaaactctgcactaaactttcaagaccaaaaccagcaacagttttattccaacactccataactgtctgagcatagcctggataggaaggccaatgattcccaaatctaaaaggtttaacccctatattattgtgctcacgattttggattaaacagaggcaatgatctgaaataacctctcatttaaaataagcatcaaaattaggaaaatcattcagccagatattgtttataaaaactctatctagtttggaaaagattatatccccaacctcatgtttgtttgtccaggtgaagaaagaacccgggcttttgaattcttcaacttgacccaaggcaagccaagattgagcatccagtatgtctttattctgaattggtcttccaccacttctatcttgaaagttgaacatagagttgaagtctccaaaaatcaccaaaggctcattcagtttcccaaagctcgcaagtttatcacaaagacttttacgaacctccattgagttacttccatagactttcgtgacaaagaaggcctatttttcccacaaaaattcaccttacagtgcaccagctatgcaaaatcactaataatatccacctgaacatacttagcttgccaaattaacaagattctctcagaaatgacattactagaataaaaattctaattaggaaaattattcatcatgtcatggattttctcgtgtttcaacttactctcaaataaagctctaaagccgattatattcaacctacaaacatcaagaatcgcattttgcttttcttttttattcatgcctctcacattccaccctatcatattacttgcttccatcaagaattagattagagttgggaatcacaacctcatcagctgcttacgacttgtagaacaacatatccgttactggaacttaccatttttggagcttcctttgacatattagctttattctgtctgagagctcttcgtttgggagtaatccatttgctaccagtatcaaaactagctatttccctctccatggtaacctcctgagcaccagacaattcctgatcagcagctaaatcctctactttaggcttattttttgtcaaattaactttccctagaatatcccatgtgccctgattgagttgatcatttttcttttccatctttgtctcttttccagcaatcggtttcttcttccaaacaactttcttctccttattatagttggaaactgtatgccccaagtttgcacaagctgaacatctagaagggagccattcgtattcaatcatttgctccaccagttgtttcctttcattgataaatgaaatagtttttggtggatcattcgaaatctcaattttcacaaggtcacaggaaaatttcaccattgttcgttcttaagtcaccttgtcaatcataataggcttgccagttgtgctcactaaggcactaagattattcttaccccaatattgcaatcctaactcattcaaacaaatccaaactggcacagaattgaccattctaacagagtcaagatcttttgtccatggcctaagaaccacatgttttttttatcaaagtgaatgactccagcttcaaggataaggtcatgggtagcttcatctctaaaattaacaagtgtgcaaccagagtgcattcttacaaccttatttactcccaaatttccccatatcctcttaacaaatccctccaacaccttaaaaggaggtttagcacccagaacaatacaaactataacattttttctagtatgatgcctctacctcaatctcctctaggtcaagtttagccacgagttgatcgtcaactctgataggttgagtataagagagtctagaagaaggagatggtacctggttcgacttgaacttactccataaatgcctagcatggattggaaatcttcttgcttgacttcctcagcccagcagactggtttc

SEQ ID NO: 19537 - DNA, 4615 bp, Cannabis sativa
taataatagtacaaatcgcaaaaattacagcgcaccagtttttattgtaatttcttagtttcgcaatgcgggtacagtttaaaaaattaaaaaaaccacatgtgcaaattaatttaaaaaaatgatcaaaaactacaccttcaccgaaaccatccctaactcaggtcaagactggtgtcaagaaaagaaaccgttacgtcgttaactaacaaattaaaccgtaacatatatataataactaaacgcgaaccatataagagtcctcagttggatttcctcactcgttttggctttcctatttctgagagaagtgaataagagaaattgaatccaagaaaagcaaaccatcgaactagagaagcgagatgagagaggtgttggttcttgataatggtgtcttcttctgtttcttcatggttatggggtttctatgtatcggttctcatggccaaaggattccattattccccgcaaggagaaatgtctctgctttgtacgtacttggggattcttcggtcgattgtggaaccaacactcttttctattctcgccttcatcgaaatctctccctaattccttgcaatggcgctgatggcaatcttcttcctcatcttcttggtattaactctctttctcttactcggtttctttgtttcttctttaatcttggataattaattggctgtttttctattaaggtcaaattctttagtccaaatgcaacaaacccattagaacatttctttgtagtttgttatttaatcgaataaaacaattggttttacaattctaattgttgctatttttatgatcaagacagctgagaagatgggcttgccatatgcattgtcattctacactcaaaatggttcaattggagacctaatgacaggactcaattttggctctgcacaagccacaataatgaaccccagcagccaaggctaccaatctcttaaccaacagcttcgccaagttttcgagatgatggagctcttgcagcttcagctcagcccgaacatggcgcttcggtttgtaagatcctccgtttactacctttcatttggcaaagatgactacattaacttctacctgagtagtaatagtaacagtggttcttctgttggagcaccaaagtacagtaaccatgaatttgctcacattttggtatctgaaatgatcaatgttgtgaggagtcttcatgatatgaaaatcaggaagatcatatgccaggggatattgcctttgggttgcactcctagaatggcgtttgaatcatttgactttgaagctagtcaacacaggagaagaggatgttgggaaaaggttaatagaatggttcttgagttcaatataatgttggaggagaaaattatagagcttaatgaagaaatgcctgatgcccatatactcttctttgatgtttatcaagggatcaaagagatcatagctaaaccagagcactatggtaatgaaatctatttgttatattatctgaatggcagtcatgcatttctggtatagaatttgatgggacactaatctcaaagtgtttgtggatttgcaggatttgatgatgtgaagagtgcttgttgtggactggggttgtacggtgcatcaattgggtgtctatctttggagatggcttgcaacaacactagaagccatgtgtggtgggacctatacaaccccaccaaagcagtcaactccttgttggctgattctgcttggtctggccaccccttttctggcctctcccgcccaatgaatatccaagatttgctcctctgacaaactagtatacttacatcttacttaaatacatacatatacatacaacaacttcatttttggaatttctgaccataaacattagttaaatgattcatagacctcaaaagtagtttcatagaggaatcaaatatgaaattgtttggatgtatacattgcatacaatattattcttttactcagctagtgtaagcatgtgacaccctcgtaaaataatttctcgagtaaaacaaacataaaatattcaaatatgctttcaaatcatcgaaacctttttctttttcttttcgaaccaaataaataaaagtaaacaaaccatttcattttcaaaaacattggcattttctcactcaagctcttcactcccaaaccctaactaatccaccatgatggcggcacaagccggcttttcactctcgcttcaaacccaccgccctcgcatggcggcttccaactcggtgaagctgccatcgatctccggccgtaagcttcgagtcgctgtgatcggtggtggtccggctggatcttcagccgccgaagctcttgcctccggtggcattgagacattcctcttagaacgagctccttccgccgccaagccttgcggtggtgcaatccctctatgtatgctcgacgagtttcagatcccatctcaccttatcgaccgccgcgtcacccgaatgaaaatcatctcaccttcaaacctcgtcgttgacttcggtcaaaccctgctccccaacgagtacatagcaatgctccgtcgcgaggtcctcgattcgtttctccgctcacgcgccgagtcagccggcgcgtcccttatctccggtctcgtcacgagtctcgaggttccgacctcgaagaacgcgccgtacgtcataaactacgtagccaccggcgaggctcgccgggagcggctctcggtggacgtcgtcattggagccgacggtgcaaatagccgagtcgcgaagtcgatcggtgccggtgattacgtcagcgccattgcgttccaggagaggatcagattgccggacaataaaatggagtattatgagaactgtgctgagatgtatttgggaaacgacgtgtcgcccgacttttacgcttgggtattccccaaatgcgaccacgtggcagtaggtacgggtaccgtgcgggccaagaaagatatcatggcctatcaaagggctattagggaaagggccagccccaagattagtggtggcaaggttataaaggtggaggcccacccgatccccgagcaccctcgaccggtgagagtacgcggtcgagtggcgctcgtgggcgatgcggcgggggacgtgactaaatgttccggagaaggaatttattttgctgcgaaatcgggaagaatgtgtggagaaggaattgttagggcatcagaacgcggtcaaaagatgattgaagaagaagatttgaaaaggaattatttgaaggaatgggatagacaatatgtaacaacatttaggtttttggatttgttgcaaagagtgttttatggtaataatgctgcaagggaggctttggtagagctttgtggggatgagtatgtgcaaagaatgacgtttgagagttatttgtataagaaattagccgatggtaataaatggaaggacgctaaaatgttagttaatacagttggaagtttgatgaggtgtagtattatggggaggaatatggaggttttaagtttatagaattatatttggtgttgtattttgtggattttatttttggttaaagatgaaatttgcttactcaaaataatgtgtgtttatgatttgtaagtgtgatcataatattcctcattaattataaaaagaagggaaataaaaaagtttaacatgggttcgagttcgtataagaaaacaagcttgtataatttttggtaaaaatggttcgcctaagtaaaaatgacatgaattcgataatgacaaaaattttaggtctattctaagaaataatttggcacacaatagaacttatattgttttatggcctgataatgctactcatatatttgtagattttttaaaggaggactgttatcgtgctactcatataatgcttctctgggttcgaaaatatgtattagaattatttttttatgacaatatttggtatgattataacatcatcccagtaaattttatttttgaatattcgtggtagattgaaagatcataaactctatttttagtactgtaaactattcataatttttcaaaaatttacagaaataatattataactataacgcataccgctatacaaaaaaaattgaaaaaaagtattcctgcatgtgatttcaggcctgcagattgattaggaggttgtaattaacaccactcttttcaatatatatggattgaatcatcttgatatgcatatatttacaactctaagaataactaagcacaattttttttttttgataatttaactaagcataattgattgagaaaaaaaaaatgaaagatattaatagtaattgttatactcaattttcgagaaattaaaatagtcaaacttacaactttgatcaagacttacaaaagctaaataaattaggatatcctatttgagggccccatggcacctctagaaaacttatgagaacactaaccaaccatttggtgtcaggacctacacccaagtgtgcttggcctaggacttgacttatttaggcataaaaatatttgaacttgtacataaagttaaaattgcacaaggagaccactcaacaatgcatggtcgattactgccataagaagatggcagcactctctcttttggagagtaccgc

SEQ ID NO: 19538 - DNA, 4166 bp, Cannabis sativa
  modified_base (3659)..(3682): a, c, t, g, unknown or other
ctaaaaaatagtacatgtcacatgtcaaagtttagagtttagagaaaaaaattactaattaacctaaatttatgttgcctcttataatgttttgcatcttaaggttaaagtgtcttatagcatttatcaatttgtaaatggccctgtcaatatttaagaataataaattatttataatatatggctgcgaatattccgtttattaccacctgcctaaagcagaaaccctatcttttgctactcttcaacttgcctaatttgaagagaagtgatcaatcgaagaccttctcactaaattaatcactttttattaattgtggggccaaccaataagaccaattcaaactcaagctatgtccaaagtgttaacatgcatgagtacaactactatataattagctagtacctcataacaaattattgacatttattttaattaattaacagatgatgatcatatgtccccatgtggtgttgagaggagatattaataaattaaaaaaaaataagggtagaaattatcatctaatcacaatcaccaacaaatttaagtgctaaagaactatatctttggtaagaaagacacaaacaagtacatatcattatgtcatggttagttttatttattcatattatatactctaatcaaatttataatcataaaatatattttattttagcattgttattgtgtaccaatagtgtctaataccacctaaaggtattaacgtcgtacaattagttagcaatattctctaaaattattaccttaagttaaaacatgatacttaattatactaatagcgatatgtaaagacggacccacatgtattaatgtgggctatagccccactaacaaaaatattgtcttttaaaaaattaaatgcattcttttaatttgataattatagatcaaaatagtagaaaaagtccccacaaaattaaataaatttagtaagagtaattataatataggtataaatattttttgatgataaataagctcccacacagtaaaaattttagatctgtcactgacgatatgacaatgagaaaggtgttaggacatatttttatttgtagaatatgtataatccctttaattttcttcttcaaattatatgggtaaaaaaagaaaaagtcttcttgatgaattataattgggatgacctagtgggaggcctttgtcattaaaaaaattgatgacatggcacgatatgtaaaggctactttgtccatagcacaattgttctctatttaagccaactttctcaaccctattaatgcatgaaaaacacccaactttattattagagctaagtctaaattaagtacttcttcactttcttttataagactaattaatagtatttttattatggacacaatagatcaatcagtttctagaggtatgagtggtcgtgacacaaatgaactgacctctagtttgaatcccaaacctcaagctgaggataacacttcaggtttctgggctctatataaggaccacttcgaacctggtctttttagaaaggtatatatataaattgacataactaataaatgctatatatatttttctacgtacgtaactttggccacatgagccatgcacatgcatcatcatcgagtacttaatatgtagatgttggctgaggtggtatcaacgttcctgctggtgttcatgacatgtgctgcggctgccattaatggaagcgatgaacggagaatatcgcaactgggagcatcggttgccggtggtcttatcgtgacggtgatgatttactctgttggtcacatctccggtgcacatatgaaccctgctgttactattggttttgcatcttttctccgcttcccatggaaacaggtatatattttataattatatatatttttatataattagttagctgatccattctaattgtttatgtttctatttgaattaatcattttattgtattgtttcttttaaattacgtaagcttatttgaaaatttgccctcgatcgctactgaaaaagtcgtcactttgctttcagttgcgactttgttatcgttgcgaggactttcaaatgtgcttgctaacaatgtgttagctcgtcgttgaaagtatgtcgttgttgcattgcgaggactttcaatgtatttgctaacaatgttttagattatcgttgaaagtttgttgttgatgcctggcaaggactttcaatgtactagctaacattgcgttagatcatcgttgaaagtttgtcgttgttgcatatcgagaactttcaatgtacaactaatattgtgttagctcatcgttgaaagtttgtcgttgttgcattgcgagaaactttcaatgtacagctaacattgtgttagctcatcgttgaaagtttgtcgttgttgaatagcgagaactttcaatgtacaactaatattgtgttaactcatcgttaaaagtttgtcgttgttgcatagcgagaactttcaatcatgtacaactaatattgtgttagctcatcgttaaaagtttgtcgttgttgcatagcgagaactttcaatgtacttgctaacagtgtgttagcatatcgtacgttgaaagtttgttgttgcaaagcgagaactttcaatgtacttgctaataatgtgttggctcattgttaaaagtttgttagagcttttagtgtacctgctaacattgtgttagcttaattatcgttgaatgtttatcgttgttgcttgttagcgagggcatttgtgcttactaacggtgcgttagctcgtcgttgaaagttgttgtcgttacttggaaagaattttgactgtacttgttaataatataagatttactcactatatataagtttgttgataattttcttaattatacaagaagttattagtactagcaagaacagtactcttacgaaattaaaatttttctatggaaaatattcaatctgatgataatttgaagatttatgatactaattactagaataaatcaaatttgtcccccctaaaattttgacccttctatagagttgtcactaaattgtttttttttttttttttgcaaaaatttccccactataaaaatgttattacctataactcatgaactaatatataaccaaattggtttaaataatgaaatgtaacaatttatattgttagaaggcaattttgtaataaagaatagcttatgggacggaatttaggagtactgaaaaatttttatttattctaattactatgtatgaaaaatactagtatatctgtataatcatattttattttttgatgaactggaatattttattacaccaaaattattttttacaaactaaagagattttataattagcctcaaaatactttctatacaagattgtaatttgtgcatgttttttatagactattatggaagatcgatcattttacatatacgttattacactaaaaaaaagaaaaaaaaaaacactacttttagtgacaatattttagtcacaacataaatttttttactaaatttgagttttagttacaacaaaaaattactaaaaatacattttgccacaataaattgtgaattttgtgactaattcctttagttacggacttttagttacaacataaaaatattaatttataattagtcacaannnnnnnnnnnnnnnnnnnnnnnnttgttgtgactaaaaataaaaaatttagtaaaaagatgagagtttagaaaatgatctcacaacttaccatacatgtcataaaagatactatgtcgggatgaaaactagtcgataaaggtcttccttgtatatttagggatgaaaactcattatagaaaattattaattattttacatctcaacaaacaagggtgtggcaaagttttaagcatatgtaggataaaaactatttttgtacaacaataatatctacataagacttccaaaatagttggagctgccacattcatcaattaaattcaaattgatatcatatagtaacattcatatatattaataaaaatgttgttatatgatattaaagtgttttacaatttaataatatcttttaaatactttattaatgtgattgtgaagtacactttatgtggtggtgatatataatttatatattaatgactacaactagagctttttcaaaaaa

SEQ ID NO: 19539 - DNA, 3874 bp, Cannabis sativa
  modified_base (602)..(618): a, c, t, g, unknown or other
  modified_base (2865)..(2881): a, c, t, g, unknown or other
atatgacaataaaatcatgtgtattttgataagttacatatatatctattcacacaaataatttattttggggctatataggataattaaaaagattaacaataataataataattaaacattttggtacccttatcatgtaaaaattctcaacaaaatgataaggagataatgatacaaaactatgcttatattaatgttaattatttacttatttattttattttaaaaaatgtactcttagtgtcatcattgttctaagtttcacttagaatgtactcatctaattccaatatgtgtcttttaagtcttttcaaattaagtaaacaattaatattcccatttaataaaagaggtaaaaaaaaagtgattacttccaactttagtcaattagaaaatgttttaatgttcctttctctatactcaaaggttgcaagtaaaaaaacaatattttttgaagtttaactctcgattgtaaattaatacttaaatttaatttttgatagtaataatattttagttatatttctagaacttctacaagtatttaaccgttaagtatcaaattattattcacgtgttattttttattggtatatttnnnnnnnnnnnnnnnnnaaaataaaaatttaataatttggaccaatcaggaactaccacgtgactattgacttgacagttccagaaatataacttaagtattattaccgtaaaaaatttaacttaaatatttatttaccgccaaaagataaatttaaatatttataccattaattattctaaaaaaaaaaaatatccaaaagactttgtaattagtggtaaaacaaataagttgatattatctcttctcatatattatataccaacccaagttatatattattagaaaaaaaggcaaatgggttcttgaattgaaagaaagagacataaagacataaagggatagtgtggtgttataagagtggaccttgatagaaaatttgacagcctggtaaatggacccatctcaaatgataaattaaccattaccccacaaattcaataacaaataacaaacacattccatccatctttcttaatcacacactctcccttctcactccaaaggcccattttttagtttctcatttaattccatattttattattattattattatttggatagaatgaatgcttattcatccattggcatgattgttatagagaattttttttgaaaaaaaaaatgcaaaatggtcattatattgttgttgatattattataattgagttacttgaatatgctattacatttaagacaaataattcaaagaattatattcttaatatatttaagaaacaatatgagtttgattattttagtcttgtctatgtgatatagttttattttgttttattattgattcttctttatttttcaatgactcatcatcaacttgttgttagtggttgggattaataagatctccgcaactcaagggattgttagtagtgcagttatttatattgcacaataattaagtgttcaagctataatgttgaataaacaagttgcaatagtttcgactgttatatcttatgagcggtaaatgaaactgaatataggtgttcttaagataaactgtgatgctgcaatctttttcatcgtattttattttttagtttctttgtcaaacgatctgtgaattaaacggctgattatttgactcatttttttaattttaatcttagtcgcgtctccaattaaaaaatattccgattgaattacatgctattattttaactaaaagctattaataaaattacatgctttattaaaataaactctatgctaaaacccttatagtataaaatataaatttctttagttagttctctcttttcttccttttctccattaccattttgcctttctatgatgttataattctctaaacctagtaaaagctatatttgatctctttctttcttagtaataaataatgatatgataataaaggtatattagtgactattagtgtttagcttactaaacaatattcaccaccactacattgaaaccaaaatgagtaaatatataataacaaaattaactcatatatattttttgataattaaaattatataggcatgctatttaaatttagtagtgaatgtttgacttattcttaattatgtttcatgtgatgcattgaatttgatgaattagtgtgaagataatcactaacattaagttggttcacccatttaagatattgtaagatttagttcttaattacaaactatattacttatatattttgttctttgcatctagcaaagcatgccctcttaatgtttatttctattgagattattattattattattattattattattattatttattagaacaatgaactttcattcaatataattagagtttaatatattacagaagaatggaggaaaatcatacatctaaactagcttgtcatttatcctaagttcacgaattgttaattcatatgcagtcatgttagccaaacgaaaaacatgaattagagatgcttttattattaattttattattatagaagaaaatattgcatttcattaataaataaattcaaattgattaattattatgagtgattttaaaaattgcgatacattttctttcaagattcgtactcataacataaatagctattacatgcagagctacaccaaaaagttgaaaatattattattattattattattattattatgcaatttactcacaaaaagttgtttaagagtaaatcagtgtttttaagaaacaaaaagttataagttaaggatgatgatggttttcttaataataataataataannnnnnnnnnnnnnnnnataataataataataataagttgttgtatatattaatttttctactaattttgtatcttgcattatttaattatgacatgattttagaggagactaactcttaattagtttattatagttgcttttttgattgtttttatataataattcaaggttcattataagctgagtcttttcattataaacatggtcaactttagatgattacaaaataaattatttacataatttttcatacaaaattaggaaatattttttttcaaaaaggaaaataaaaatattatcttttaaatcaacaatttttaaaaaaaaatcaatttaaaattatacattgcttccaattttaataataataaaaataaacatgatttaaatggtaacaatgtacaattttgatggaaattgaaagtatgtaatatgtatctataagttttttttttatataagatatatattataaaaattaatgtaaagaaataaatcaaacaatattataatacattgttcaatttttgtctatagggatgctttatttttagtatttacaaaaataataacagacactttacatattttggaatttagaataattaacagtgtcataaataaatttaaaacatttagttgcactcatgcacaatattttagtgttataaattattagaatttttttaaaaataaatgaaatatttcctgtaactataatataataaatcgtcatataaaaataaattaaattacaatatctcttatacaatcatgaccattcatttcatgattgatgattatgataaatagtataatttattgagtaatttatgagtaaatacttaaatttaaatttcgattgtagataaatatataagtttaatctttgacgataataatacttaagttatatttttaaaattttggtagatacctggccattaagtgtcaaatcattatccacgtgtcattttgtcattgatatatttatattaattttaaata

SEQ ID NO: 19540 - DNA, 2868 bp, Cannabis sativa
  modified_base (27)..(35): a, c, t, g, unknown or other
gttaaaccaagaaatgccgttagatannnnnnnnnaatatataaagatatatatatacttaatttatagttgttattaaatatttttgttgattatgtaaatatttaataacttgtttgagccactttatggttgaattttcttgcacgaatctgttgattttaagattgattcatttgcgtgttccaaattgttgattaatagaataaattgataatgatgtgaatttgtacttaaatgctcaatcaaaccaaaactaatcaagtgttcttttaattgatccaaaattgacaatatgtgaatgtagtaataatgacaaactagaaaggaatttgtagtagattatagatagatttgttcatcaaacaaaatcacttttttattttttatttttttgaattactagctggaaattttattacataatttctcaaaaagagtaactcaagacatttattacaaaaaggaaaaaaaaagattaaccaattaataatataataatagtaatattattgagtaataatagctcaataatgaattatctcatgaagttgtagtagtagtagatgctttaggcattatttttcacttcttgtcactcactccaagtgtgctcttcacagtttccatagcaccctgagtcatgctcatcatttgctctccagtctgttcagttcatagcaagttttgtttcaatattagttattaatcattcaatatcaatctaatcattaatcgaaccaaaaagattattagtacctgttggaggaatccggcgctttgatcctttccatgttggatagaatcagttgctgagtcagttgctgaatgagcagcatcagtggtcttatccttggcttcgtttgctgagtcagttgctgaatgagcagcatcagcagtcctttccttgacttcgctggctgagtccttagcgcattgtgacatctcttcggccttagcctacgaaacataataaaaagtaaattgtcaaattaaccatgtacaatactaaaatttgtaaaataatctcacttaatttaatctaagtgataatggtcgcacagtatatatctatagtcaatttataattataataattatttatgatcgcagtataattaatagtggtatgcaactatttattatgctaataaattttaatagaattttttattaaagctatttttacaatacactctaaataaataataataataataaaacaattatagcaatagaaaaagaaaatgtttgatcacaatgtgaaagtatatacctgagccttagcttgggtttcctgcatgctagacatattgattttccgggaaaatttggaaagaaaataagatgtgtttggatgattctttcttttggttgtgctttgtttttcacttaatttgtttgtgagaataaagcatttgaagttacatataaatactagttatggcaacacaaattagtgacacgtggaaataggattggtggatgttgtgacacgtggcagtggaataggtttgtagatccggttgtttctgccatggaatttggtttggggttataattaattgaatggctaaattaagattagtattagcataagaaagacttggtcttgtagaaagagaatgttaattttacaccaatcttacacttgaaatagtctttggttttcaaaaaatataataaaataaaaatgagaacatatttgtccacttatataccactagatacacaaatacttccatttcaaaaaatatatatatactaatacttcaccttggaaaaggaaaatttaataaaagagttttttttaagttaaaacatcaaaactatcaatttacttactaaggctgttcccgatgcgggaagtgcagtttttaattatttttttaaaccaactcgcacatataattttctcaatttttcaaatcgtacccgcaccgcaaaactgaaaacccgtagaaactgcaccacaaaaaatagtgcggtgcagtgcgatttctgcagtttggactatcactaaataattaaactatcacaaatacaacaaaccttgagcaaatttgtcaaaataccataaggcttgaaaataaatatataaaaaaaaattaagtgtcaacaacacaataattagtggactttgagttgtacattcacatattggacctgaataaatataaaaattgatatttttataatgtgcggtgcagtgcggtttgaaccgcatattaacaatttaaaactgcaaaccgcatcgcgcgatttaaaaaaaattcaaaccgcactgaaccgcaaaaaatttcaaactacactttttttgcagtgtggtgcggtgcgggcggtttaagcggtttgatgaatacccctaacacttacagttagacatctctaatgaatgatgtatatattgagttaaatttaatccaaaatataccacaaaactatatttgatccaatttttatatttgtactctaatgtagaaagtgcaaattaattataaaatcaataatatcattaatattcattaaaaatatacaaacaattaactttatttatattattttaataacttataaatacaaaatatttttttattaatgaatagtattaatgagtggcaaataggtaattaaaaaatgtgacatttattgtgagttaaaatttagcacatgttatattttgtgctaaatttggcacaatttttaacttaagctaaatttaacacacattttacatcaccattggagttgatacttaacaaaatattttaaaaatggcaatacaccacatttatagctctcccttgctcttaactaagttcaaattttgatggtaaaaccctctaaactactgaactgttagcaaat

SEQ ID NO: 19541 - DNA, 9805 bp, Cannabis sativa
tatttccttaattagaaatattctaatattatatagctcaagctcttagtacaaaaccagtaattgaaaacagttataaagctagtcaactagctcaacacataacagtcaactaactaactaaactaccttcccgaactaacttcaaactcttgataatcctcctcaagatggagagctaatgctcattaatctcatcttgtctttgaagctattaaactgagtagggaagagagctttggtgaaaacattttgatgaaacatgactagttttaataattccctgctgcacttttttccgaactaagtgacaatctatttcaatatgcttggctctttcgtgaaaaattggactagcatctatatgttgtgttgttgttttatcacagtacaacatggcaggtccttggtgttcaatgttgagctctttaaggactgataacagccatacacgttcacatgttgtatttgtcatggccttatattcaacctctgcagaagacctggaaatggtctgttgtttcttacgtttccaagatattaaggaatcttcaagaaaaatacaaaaactagtagtagattttttgttgtttgggcaagcagtccaatctgcatcagtataagccttgagtttcacttcaaaatttgtaggaaagaataacccatgtccaggacagtgtttgacatactgtagcaccctttgtgctgccttaagatgcttagattgaggtgtggacagaaattatcttagtttatttacataaaacgatatatctgatctggtaatggttaggtattaaagcttaccaacaatctttctgtacaactaaggatcagccaacttttctttcttatcttgacttaatttcagattggcttccattggtgtattaactggtttgcaacctaagtgtccaagatcttcaagtaattacaaagcatagggtctttgggatatgaaaatcccttttgcatatctggccacctccaaacctaagaaatacttgagttttcttaggtctttgagctaaaatctgctgttgaacttgacctataaggcttccaattcatccaagctattacttgcccttatgacatcatccacatagatgaggagaatgaagaaattctccccaacttgtctcataaacaaagaatgatttgtggctgaatggtgaaatccttcttcaactaatgcactagaaaacttttcaaacccttgtcttgaggcttgtttcaagccatacaaagatttgttgagtttacatactgaatgaggtggaaactcccccttaggactataccttggagtcatatacacatcttcatgtaagttactatgtaaaaatgcattattgacattgagttgatgaagatgccatccatttatggctgcaagtgctagaacaagcttgacagtaaccaacttagttaccggagcaaatgtataagtgtagtctaggcctctttctgattgtacctctttgccacaagtctgaccttaaatctctctatagaaccatcatcattataatttatcttgtagacccatttgtatccaatagcataatgtctagcaggcaaggttaccactattcaggagtaatttttcttagagcatcaatttcactaaccatggcattgtcccattctggtatgccttgtgcttgattaaaaaaactcaggttcatgatggctagaaatggccaaaaaaagcagcacgaaaaatggggtgctaacttgctataatcaagaacttgtgaaatggaatatggagtaacagaggaagaatcctgtgacaaaccagatggattagcagtggcaataaaacaatgataatcttacaaatatgaaggctttttggaggttcaaataagattggtatgagaagaaaaaacatcaaaaaaattagtatgttaaatatcagatgtacgatgatcagtatattgaatatcaagagtatgagaaattgaataatgattagaagaaaaaaaaatcattatatgcatcaggaaaatgatcagtagtatgaaagggaaaaattatttcatgaaactgaacatctctagaacaaaagactttgtttgaattaagatccaaaagtttgtatgccttcataccagtgggctatcctaaaatatgcaaggggttgctctaggtgagaacttagttctagatgaaaataaggtggaagcatatgcaagacacctaaaagccctcaaatggtcatatgtgggaggtttggatttaagaacctcgaaaggggaagcattttgtaaatttggtgtgggtggtttgctgattacatatgcagcagtagtaacacactcattataataatttaaaggaatgtaagactgaaataaaagggccctagctacatttagtaagtgttgatattttctttcaacaacagaattttgttgaggtctatgaatgcaagaatgataatgcacaatttcaagggaactaaacaaatcaacaaattacaattcttttgcaatatcacacctaacacctttgatggtcttttggtgctgagttttaacaaactgaataaaattgggaatggcagtttgttcttcagacttggttttgataaagtgaactgaagtgtacctagaatgatcatcaataatggtgataaaatacttatgtcccccaatattaagagtattgtatggtccgtataagtcaatgtgaatcaagtctaaacattctttagcaatcttttgattggaaacaaaaggaagtttcctttgtttggcataatgacaaatagaaaaatagaaattaggacaagaatcatgtatgaaagattatgacttgagtatcttgtatgaaactaaattgaatcttataaagtcccttgatgaactccttactcgcaagtgcattcattaaagacaaaagtctagaatcgattggcttaaagatggtgatagatgtactcgatatcactttattactacatgtatctggaggaggagaaattttgtggattgtataaagactgttcgtggtgcgtggttatctaatgagcatcttattggtatggagtttcttgactacttcaaaagattatttactaagaagaattttgttgtcctacttgattttggtcatttagctagatcgttgttcattgctaatcttcacatgaatttgattcacattcccagccatgatgatattagggatcaaagctatattttccatgggaagtttcaaggccctaggcccgtattcttctcctcttttacaaacttattgggaaactatgggtgagagtttctacaatgctatttctgccttcttccactctagggtcatgcacaaaggttaaattattctaatctagtcctcatccctaaggtggagaggttacccaatttagacacattgctttatgcaacgtcttttacaaggtaatctcaaaaattacggcggacagtattcaacctctcttgcctaatctcattttcttaatgtaaactgcttttgtcccaggcattccattcaataataatgttcttttataggaggtcattcattcattcaagaggaaaaaaggaaaatgaggtattttttctcttaaaattgatcttgttaaagcttatgataatttgttcctcgataggccccctccacaagttcttgagttttggagagcttccaaatgatagggcagccaccagaagattcagtaccaagctccgagatatgtgctccttgatggaaagttatactaaagagggttatgggtaccataactgaggtgtatatatctggaaccgaaataagtgttgtaatccatgaagtgcacgaaagtttctttggagatcatacattcagaccaagtttgaccaagaagatcatctggcaaggatacttcttgccaaccatgaagaaggattgtatcaattatgtctagaaatgtgaacagtgccagcataattcaaaggttccaagggcttcaccaacagaaatatcattgatgaacagtccgtggccttttgctatatgtggaattgacttaataggctctcttccaatcagaaaaggaggtgtcaaattcttcatcgttgctgttgactacttcaccaaaacggttcaagcaaaacctatgaatatcgacacctccaaaaaggctctagactttgtcatcaaagaaatagtatgttgttatggacatccacataagatagtgtctgacaatagaaaacaatttgatagtgatcacttcactaattttggtgtcaagcatggaatcataaagagtttttcagttgtggctagaccacaagcaaacagacatgtagaagctgtaaataaaatcttaaagaccacgttgaagaaaaagcttcaggcatccaaagctcactggctaaaagaacttccaagagttctttgggtataccagaccacataaagaaccttaatggggcacactttgtattaaatggcctacgaatgtgaagttgtaatcccagtagaaaacactgtttcttttcacataagagatacttatgatcccaccggaaccatgctttactttagaaatcgttagatttaatcaaagaactctgggaaaaattataagtccagcttaaaatgtaccaaaacaaaatttctcgacacttcaactcaaaagttaaaagccggaagtttaatgttggtgaccttgtcttaagaagagtgtttccaacatctcaggagccaggaatgggggtcctcgaacctaactgtgaatggacacatgaaatacaacatgaagtgcgtgatagaatgtacgaactcaaaagacttgatggattggaatttccacgagcatggaatgcggaccacctgcactgatactattagtaaactgggggtggccagatcttcttatttatctacattttattttttcctcttttccatgtacgcctcaaggcaagaaatatttaaataaaagcagaggaagttttaaagtaaatttaaagtcttttgtaattttttgttgtattgtaataagtgaccaagagcctagactctcagatcactggggggtagcatgtattatgtatctctctaaattacaaaatgtgaatcaacattaattagtatgagagtagaaagcattgactaaaatcggagcctcagggaactagaagtaagccacttatcttaccatacctaagattaataaatccactaagtcaattaattagtatgggagtagaaagtattgcctaaaactggaacctccgggaactggaataaggcgctatcttaccatacttaagattaataattaagtcaatccaggttgactaatcataaagaagtccaggcttcaaaaaagaaaacaaagttgaaacccaagaggtttaggcccttggaaccaaaaccttaaggaatctgtaagtaagcaaatttttgtttatgttaataataaagatattgaaatctcaaggtccaagtcgttggagccagaaccttagggaatccagaagtaaactagcttagcaaataaaaaatcattcaagtagtaataatatgcttaatgaatttaaatgaaagcgatatgataaataaaagcagtttacacctccataaaattaaaggctaaatattaacatgtcaaaaggcccctacagtaagcgcacagggaaattgtctctgcgtaaataaaaagagggacccttgtccccctaaagaaaagttaaaaataaagaaaaaagttcatatttggcagatatgtctccctgagcagatgaatcaggctggatggttttatcttgaaatgcagacgaatcagtagctcgatctacgttgaaagccagaagagaaggttccactggtggttcattagccagaagaattgttccagatctggaatctacagttttttctttagagagattttccaacctctcgatctctaggatcttagggcgacatttttccttttcttccctaagaatctccacaaaattgggatatccctttgctaaagcagatagagagtagttataagggcatgagataattcttcaactcttttagccttggtcttagctagttcctctctggtttcaatcagctcctcttccacctacctcttctcttccccaagttttagctgggcttccagctccgccttcaccttgctctcgactcttttagatcgtgctccacttaagaaagcttgactgaaaatttagattccaccatagccatcttgtttttaagatcaattttggcatccaccgcaagatttcgaagactggttagatgctcattactcttctccagtgtatgaattttgatgattttctcatcaatcactccacccaatcgatctacttcttatgaaggggcattgatcttcctctccaagtcttgaactatcagctttggctcttccacctgactcttcagcactccgacctgagattgagatttttggtattgctctttatagtcatctgtacttctctactgcctcttggcttcatccttatagctggccacatcattgttgaggtttgcctcaacccttgccttgactcgctgctccactaacttgtcaacttgggcttgggcttccttcatcgtagccatggcctcttccttctttgagtcagaagcggctcacgccctcctaagagtctctaactccatagacatcttggtcatgactgcagagcacctctccgccaataagttcccctggaagaatggaaagtgattaaatacaagacaagtgttaaaaaaaagtcattgttaagtaaagttaaaaatacttaccccaacttggttgtgtcgaagacagtcaacaagaatgatcaaatcttcactggccaccatagcccatctctccacacaaagtctacggtaggtgttattggtttgatccagaagatctactacaaatgtagctagatcactgccaatcctagttcaaagcctctctatgattgcctgacggtcaaagaccggaagggacgcttcagatctaactgccaaatcatccaactcaacattctgcctagtggaaatcatagttgtgcgcttctaaacttcagccccctcagcctcaaacttcttctggaaaaattggctcgacacctccaactggatgcactccgcttttgataactctagtggggaacaggaaaactcagagaataatctgggagtggaggaaggtttgtcctctcagattggttttgaatatttgtactggaagttggttgcatattttgtgactcaaggtacgaagcttccttccaactacgggagctcttcctaggttctagtacaccttgaggctccacctccttctgtacgacaacctcttttctctgcttctgacgagcagccaactgctggagagcctccttagctttcttcttgctctctctaccaaggttagaccctaaccttttttagttcttaaagacaagtccctcagcgtcttgttttttgtcttcctcatcaacatcaattggcaccttctacaaaggaaccactgaaagggtagttattgtaattgctccttgagattgggtttccaccatgacctatgttggctaagattcaggaacaaattcttgaatagaagcttccacaacaaccacagaagcctgagatctcggaacagattccgaagtaggaacctgaggaacgacctcttacccttttgtcaaaggtgctagttctttagttcttgccgaggaagatgatccaaaccttcccttcccattggaagtcttggcagcttccgtagcctccgtagtcctgttggaaatgctccctatgaaattatttaggagacccatctggacagtttgaggattctgtgcaaaaaatatgaaagagttagtcacgcagaagtaatcaataaaaaatataccataaccaaatgaaaagctcaagtttggttctaaccattaacactattatacttggaatccccacaataaaatgaggagatatcctccctgcctaagaagctaccatactagaagaacccagaatactttattaaaaggaatgggtctactgaccatctcatctatcctattgaggcatcgaatcatgagatatctatgatgatctaactccaagaagtatgggtcaaagccccttgatcaactcgattcaagtctgctagacttggatcacagattaaacggaagggagaattacctcttctagatgtacttgctctcagagtgcctccatccagaaaaatcaccttaaagcaaacctcaagctctgtttcttcgctcatcgctccaaatgaagtcaggaccattcttccagccatctctggttttttttttttatggtttttcatgcttcatcaacaactatctctgtaataacctctttaagatctggagagtcaccatgaacgaagtatttgacgtgaaaggcatctatgctctgatgaggagcaagcaaaccaacttgcctaaggttggctgtagtaacaagcttttccacctacaagtattcaggaggaaagccctagtataaatcttgtctggactccaagaaaggggtggctgttctagaaataaagaggcaaaatgatcctaattagagactaaaaagaaggatggggagaggaatcaaataagagagtaagttcacttacttgcaatacaaaaatctaaagagggggttggaaccctatttaacgagatacccatagtgaaaaactaattgtctcggaagtcgtgtgtgtgcctcatgaaacttgttggatagatcaaagacttgaagtgcttctcaagccggtagaagactattttgctcttgttcttctgcataggttgaggttttacttgataaaaatagaaaatctcttctagagtagggacctccatcttcttggcttttcaaagcacaaaccaaccctcaagcagtttttaaatttggggaatgaattagaaaggggaaatgcctactactgcaaataagttggcgacgtagctcttaagtggaaaatgggattccatctcaacataggcccaactccagacgtcgaagtcgtccgcacatttatagggtgactccttaaggatggagagcctattccagaacaaacttggaacactttggaggcgatggttcgtctcgtacttccagagattgtcataattccaaaaattatttgcgtactaatccatctcccaaggagaggaattgtacgcctctttgggagcagcaatttcttcctccaaaacttcaacttcctcgtgctggtcaacttttgccatggtagaagctggaaaagaataagaaagaaaacaaccaagcagttagacacccgtactaaagaagatagtagggacacgagtgagtcgtcccctaaaactacttggagaggtccccaccagaccctacacctagaagtaaacttctaaaagaatgttatatccatacgatcagaccgggaacacagatggccaatcgaaattacaaatgatgtatcaccccaaaccataagggtcctagacagaggaagaaatttcagtcatccctattgctaaaatgtggatatttcaaattaaatattcaaacaaaaagggcaaaattttgcagaacccactcaagactacaaatgatatgtgcaaaatgtcctatttctacaaaacatttagaaccactccaaagcctaaaatcctattcatcaaaaattcaaggcaaacatgcaaagattgaaagagaattccaaaccctgacagtaattaaaattctagaaaggtaaaaggaacattactgaagaggagctggaaaaaga

SEQ ID NO: 19542 - DNA, 3039 bp, Cannabis sativa
gagagagagagagagaagggtagagtacttgatctttttacttatgtttatctaatgcgatacccttaatttcttttattaaaccttaggtaataaaatgaattaaaacattagaaagttctaccactaccactaaaaacaaaaccaacctcttaggcaaaatgaccaatttgccccttgtttctcacttaggtaatcttaaggcctagggataaaatagtccattaccataaccccgattaatcctgatattttcaatatcaaataagtatacccttctaaaaaaggttctataccatacccatgtatctctaatggccaaacagtcgcatttctatcgttaccgaacaaaaatcataaaaatactaaattgcacatatatcaaatataatacaccaagagtttaataaaatatctaaaattgagaaattataaccctaatacctatttcttaaaaatagggcccaccatatatgatatataaaataatcacatataatcatataatatagctaattagtgctaatttccctactaatctttattttaagtatgcaatcattacaatcatcagtctattatatcgcgacaagtgacctctggggtctgtcctgcctttgtataagtccatttagggcatgcggaagagtgtaggtagcgacgcttttaaaatccttttgattcatggctccaggttctcatcatgagagtgagaacagtgccactttacttgcgaaccagctggtccatgatcttggttaaggcgatgatttgattctccagccttctggtgttatcatctgggatatcacgttcccgcatttggtcattgatattatttttaaggtctccttcatgaggcctggctttttcacatcttactttttcccttttcgcatacaaacggtccatgaggtccgttgttgacatgttgtctttgagatttaagtcttccacttcgacgatttggttaacaaaattactggggcagtttttccttccactaatgttaggctccgatacttgaataccatgtctatcgttctgctcaactttgctccatatcaattggatggtctagccctagggctcaagcggtcctctctttctgcaagagtgggttgaccataattatgttgttcctaggagcgctttgtgtgggccttggaagatagctcttcttcagtggtaaagatttagatgaatatcaatgtgataagaattttgatgaatttataaattaaacaaatgttcaggaaataaacatgtgaaccatatgaaataaatctatttctttatttataaatgaatattcaagattacattgaaatagagttttagttagggcacaaaacccaacatccacttcgtttgtagcctagctagctactccgtcacactgagacgcttcatctcattcatggttgaggtgcttcgtcatcgcatcaaccacatcacctcaacaccgcatgacatgagctaagcactttatgcaaaccaccttgtccaatcaccttgaccaatgtctggtcgcatctcgtcaggcccatgccgaggtgcatcgtcatttcatcaaaaataaataattaatatgaaaataaattcaattcacttgataaattagttaggctatgttaattaaaataaattggacaaaaactaatttaattgcataaattagataaaaattaaattttattaaataaaattagaaaattttaattttattaaattaaattggaaaaaatttaatttaattaactagctaaattaattttattaaagagaatatttaatattttagtatttaaaggaattacttaaaaaaaaaagaatatcaaagttttcttattgagaaagttgagaatttgtaattatttatggaaaaagagataagtttcaaaggttgtttcagaaagctattattggtaaaatagaaagagcatatgtaagtgtcacatggtccatgagtatgttgagtttaagaaggactaaggtggtgcaactagggatcaaatcgcctcaaattccatcaattgccaagtttatgcatgaggcgtgaggagctccaagaggctcgagcctcatgctcttggaggccccaacaattgcctaaatgcacttagttttcgagagagactgaggcacccaactcctaaaccttgctagctatcaaggccttatggcctcccatactgccttacctactcaggcacctgttcctcactagctactaagccaccgaggcgctggagcctcacctgctgcccgaccgagctccatgagcatgttggcctgctccgcgcgtcaaacaacgtgcatgtatataatgctaaaagtgttagagcacatggatcatgtacatgaaccacctcagcaccaaggtcaataccacatccccttagcaccacctcgtcggtcccagaccaagctactttatcaccatttcaacgtgaccaatatgaccaacctagtatgaccaacataattaacatgaccaacgtgaccaatacgacaagcttgtaggggctatccttaaagaagcactttcgtgctagccacgttaagcacttttgtgaagaagtactttcgtgctagtcatgtgtgctaggatttataaaacacttaagaaatataaatatcacagatctaaatatattcctaaaagttctttaatatagaaaatcctaaatcataaatttatagaacctttgctaaattaaagaagaagatgatgataaaagataagcaaaagcactaacctgaagtcattgttggaggttgcagagaatgttttgatcttccaagaatacactatttcttaggtattttctcttatagggaaagagagaatacagaaaccctagtgttttttggggaacactacctatttatagactaatcttagaatgagttttgaatatttataatttggtccctcatcaaattataaattaacttatggtatctacacattatttccataataatttaatatcattttgatacccataacataattagtcacttaattttgta

SEQ ID NO: 19543 - DNA, 5593 bp, Cannabis sativa
actgaaacttgtttttttttttttgaggtaaacactgaaacttgttccttctgtacaaaaggtaaagagtgagactttttaagaaatcaaaataaacatggagaaacgcacaccaactattctaacacacacttcttcaagacatcgatttgtccatgcacttgtcacatcaacatatgacatgtcacatcatctccacctaccacctatcttaggctagcccaatgaggaagcaacctattattagtcaataaccacatgtgaattacctcattagggttcaagcttaattaattagtgattgagcctctgctgatccagctcaattgtgatgctttgcctataaatatagtctcgccccattgtagaggggatccctcttttagtttttaagccaaaacacagctgaatttgagaaaatcgacattgttgtaagccttaacaacattaattatattgactcgtgaactatggtttgttaacacacgaatcacgtaaaaattatcatcttacacctttcttcagctctttaagactacatttttgcacatttatttagttgtcaaaaatctcgacaacacaaaaattaaaaggcaaactgctaacattttataattttgtcacaatcattgttcttattcttttttaaacgatcataattaatttagagaaattttatggtgcatcttctacaaatagatatatcaatgcttcctttcgcattatcgataactagatagtttgtcttaattttttatatgacaatgtacgttgtaattatttaacacatcttacaaatttgtgaaaaatttaaaataatttaacatgttgagaatctgttataaatatgcttaacttattttatacacatgtaaaatgtttatttgaacattatttttgtattataaattattccaatttattcaaaaaaaatcaaaatatcttaaataactaaaatatacaacatcatataaaaattataactattcaagtatcaaaaatacgaattgggcatcgctacacccgagcgcgatgcgcccatttatttatattcttcaagaaatagtgaaactacacccaaaaaatcaacctgctatatccatttttaatatattttaagtcctactcaaatccgtaaatcacaagacaattagataaaaaaagactgcaaaggatgggtgattcagtggagccccaaaatttgcacatgaaattctaaaatatggggcaaagactcacataaatattggtttgtgtaactagtcaacagtgttgcagttgcagaagctagctcttgctctttagttttttctttgaaaaaagtaagatagagattcaagttaagttgtaaactgccatgaaaggcatcagaacacttcctatccataattttccatccttttcctcaacttcactaacagctttgacaaccttcccttggctgtcttctaatatctctaagagcttcccttctgggctatacttggccactactccatgtggccagcctccaatgtgaaacatgaattgcattttagcagaaatcgggaacttaagcaggaacatccttacctttgggtacaaagcagttaggtgagaatagattgtcctgtgacagtggattgctacccaaaattcacccttttcgttggtcctgacattatcaggaaatccagagagaagggcgaatacatctgtggttcctgccttttcccctttcaaccaatatctacttaacctgcattattacaacaactttgaatcagaatataattctttcatgagaaatattaccacagtattaaaatagctcccaggttctttttaaggtatataaccagcagaatgttcaaaacctgtacaatactcaccctggtttaacaagacaaatttataatagataatacagttctgtccaaaattttgtttttatgttagaagttctcttttagtattgaatgaaggtaatgtgcccacaatcaagttaagcccacaactatattttccaagcaatttgtcaattttcagatatttacctaaaagattttgccaggatagaagtgtgattatgggcaatgaaaatgtaataaaaatccaccatgcaacacttagattctaaagtggatggcaatgaatctttcatttaaacaggttagcatttcaaatccaattttattagtcagataaaacctgtttttcttgtttgctaaaatcctctaaaatttacattggtccttcaatttgttccatttgacatgctgtatttgtaaactgagaagctgtgtgcatgtatagcgtaacaaaagataaatggaactacatatgaaagcgaatttacctgcccaaagatccctcggcgaagataaagaaagaaccatccttgcttaaggtcaaaccatttggaaattggatattccgtacaagtacagtagttttctttgtttctggattgtactttagaactctgccagaatcgtctccagagaaaaccaactgcaagaagttcctggacagattgtatcatgttagaaagaaaacaagacattatatcttctgattagacttacaataagaaaaaaggaaaatggaaaccaaacagaactcagaagagaaatataatgaattcaatgccaacatgttaaaggggcaacgttaaacacttgctttacattttaactatcttccactttaatgactgcatatagtagactcaatctaaggcctcttctttttctcaatttgtcaaatggaatattgagatggagaattatgttcctcattggaaggataactcgagggatcaaacaaactatgcttcttttttgcaagactttactcatagtccaattcaaaaaatgcatccacataatttccattttctcaatttctttcgaaaatcattattgaaaataattgctgcctgttttgaaaatatttcccttcctgactcttcaccaaataataaagtaaatgtgtgaaatgttctggtagattttcttgtaaataatcttttagtgttcttgaccaacctagataatctccctaattttgagtcttttagttttatttggaaatcatctgttcttacatgaataaaggtctttgctaggctctttaatacgagaatgattaatacttatgatttaattcggaggaaaaggcctcatttgactctattttcttcacagtgtctgatgtgtaataaaggacatgacctaataaaggatcatctaattttgcattgcaagttcctctggtgtaatgtgttcatgattaagaaaataaattggttttggtgaatctatgaatgcacccattatgcagaattgtgtgaaagctactagatttgcattcctgtggtaaaagttaaattatcatccctttgagcttatgtggtaaaggaattcaaggaattctctatttcctaatcattataggatggaaaaattacttgctttaggcagattttttttttttggttattgatgtattgtgttacttaatgttttactttatcttggtctgtaatagatatatccaatcaataaaggttttgttttttcttttatcaaatatttatatatacacatatcactttcagatattgatgtgaaaatacaagtacaatcccgtaatgagatcttgctcatttaaggcatcacatatctctcatatgtatataatgaaataaagagtgattttttatgcagttctaaacagacacaacagaattgaagatgccaattattctctttcatgcaattgtatgtaacacatggatacttagtttcagcaatgcccattgggcttcacatgttaaccttcagagtagaactaattcaaaccacctactgttagcatcttaaaagaaatagcaaaagaagcttacctcctctggtacttggtgctgctatctgtgaaatagacattcccttcttcatcaatgtctagatcattagtaaaacctaatggcactccttccgcctcagttgtaagtggtgttgcgagtccaccttcaggtcccaccttgagtagcccaagataggcatctgcaatgtataaatctcccgttttcttgtcaaaccggagcccaagaggccgaccacagatgtgctcatttgcaatgtaactcaaaggtgatggtttgggatcacatatttctgatctgaatccacacagacatcaaacaaagcaaaatagaagttttaatataaacaaaagaacagtcaaataatagctttgaaataaaattaacaaaacaagagcatgacttcatggaaccacataaaagccagtatttctaacattcatgttaaggttgtgagttaaatttgctttggtgatcatgttaaggatattacccaacatatacacatacaaacctacagcatctacagtattctacatgatcagaagtaatctcccctcaattgagaagtaaagaatttcacactgaatatcaacaaaatggctatgtttcatctattcataacaacatatctgtacatatcctttttcacaggaaaaataattgatactaacaaagctacacaaatggcatatattctcctaacaacaccagactacttagcaacgaaagtacatcattatgcatataatttactcataattcaaaatcaaccgttcatttgaaatacaaaaaagaatgaaaccccacatatatacatttatatataaaatctgacctatcgggcgatgtataggcgaaatcagtccaagagtggccattccagaagagaattctaccatcggcgacaccagtgtaaggtccacggccaagagaatcaaaggtgacactctcaggaccctgaacaaggttcaaaaacttaatctccgagttttggagcaaattttggcggtctctgtgggttggaatttcggaccaagaggagatatttatgtagtgagcttgaaagccggggaaatcggagatggcgctgtgcttaaatgggtcagtggcacagtagagagctaggaggaggaagagtaaggcgagaactcgggtggtgaaggccattgagaattgagaaagaagaaagaggaatgagagtttagctatggctatggctactgcatatgcattatatatgtttattattattatattgaatgggaaatgaaagagtaagagtagttgtaatgtaggtaggtgaacacacttcttgttattgttaatatcggtagaaactagataattgccaactttcactttttccaactaccaacgtgtctaactctcattcctttaataataaaatttatttatcggtattcgtattttgcaaaagttacaaattgaattcagtgattcgttcaataataatttagatatgtttttcaaaatagtataaaataagtttaatttatgttaaatgaaaaacttcataatagcttaacatagaggtattatgatataaataattacattttttttgtatttatttaggctagagagtgacttcatgtttggttatattagaaagaaaaattaacgaaaattgaattcacggtctattttgtactattttgaaaaatattggactgcgaattgttatttaacaaaacagagggt

SEQ ID NO: 19544 - DNA, 2343 bp, Cannabis sativa
agaaaaaagaattaagcagtagcaatatataacagtacaccagcagacaggggaatacgcaattttcttaacaaacagagggtccaattgataacttttgcaaaacacaagatccaaaatggtatttactcataagaaaatagatttttaaaatttttaaactacacatgtggtgctattttggcaatgatacatcagccatgttagcattttttttaccatataagataaaacttacaaaaactctatgtttcagcactaagaatagttcggtagaattattctcggacaaaaaattttaggagacattttgatagtatgagagcaaaaatcttaaatagccaatcttttgcatggtgccaactttgtatatattacgggaagccatttttctttgccttttcagtcatgcctctatttaggcatatcatatgctcacattggtttaaacaatagagggcctccaatctggcaatggcacggagaggaaggacaaacaacaaatggaaacccaaagcagtcaacatataacacccatatgatacataaacgtgtaatataggaattccagaagtacataccttcttcacattattattgttcaaggaaagcgactttaagtgggtaagattgcagatagaatcaggaagatcgtcgataagattatctggaaagtcattcagaatgatgaatctgtgagtgcactaatcattaaccggattctattatttcacatagaaaatgtttgtcttaacacaactatgggctctgtgcaaaggagatgcatatacacaatgtgcagtgtacacttcataataaaggggttcacatcagatatgtattttaaaaaatttcaaacaaaaaacaaataaataaaattactacaaaaacaggaggcgtgatgacttcaaatacatctaatttctgattccagaaatatctctgatggttacacaagtaagagcttgaaaatgaggaaattctgcataaatttgaaccgtagaaatttaataaatattcacaagagaagtttaccattagcttgtagttcttccaaagagaaacagctcccaattgattctggaagagactttaatttgttatttgagacatctaaaagttgcaactgcatttgaagagaaaggaataaagcctagatttttcataataatgaagaaaacatcacaatatcccacatggaaacttttttatgatgaaattaaattcccatgcatgcatattctgttcaaagtcacatctgatcaacaggtatcatagtcacaatttaaccctatctcacccactcaaattctagatcatctaaaaaacaaaccctaactccaacccttctaattaaatatacataatctagccccttaaggaaaataaaacccttagtagcagttgcagcattctgtgaagaaaataaaagaggacacacccttatgttcggatgaaagaattcatatcagcaaacataataataactagaaaatccaacacttgacagcaaaaaaccaacatccttatttggtttctcttctacaaatcatacccctttacccaatacttttaggaagaagaaatccaatgggtcctgattttcatgagatcaactccacaagtacattgggtatgatgatacttagacatataggcaacatgaattgtcacacgcaaacaaccaaataagcacaatcattcagaagctaaaaattgtgagaaaagcacttacatttcgcaagctgccaatagtttcaggcaaatattctaaggagttccttgagatggacagtcgttcaagcctcactagctgcccaactgagcacagtatatatgcatatagtaaagaaaccacgaaacactttgcaagaaacaaaacccaataggttcacagacagggacatcaaaaaaggaagaaaaaaaaaactccatctattaaaagatcttcttacatatttagagaagaaaattacattcatcaggcaaggaagaaattcgatttccatcaagtgtcataacttttagagactgcagtttccccaaatttattggcagagactgaataagattatcagctaaaacctgacaacatgaataccaaagatgaatcatttctctagctaaataatgttttttacagggataaaaacaacaagtagatggtccagagtcaaagcgaagattagtaacacattatcagtaatcactttgatgtgagaaataagactaaatggttgagtactctgacaagatgagcagtgaattgtaatttagccaagatacggaacttcgggtaatgatagtcacaggaacttaaacaaacaagtgcacataatgtgt

SEQ ID NO: 19545 - DNA, 2566 bp, Cannabis sativa
agagagagagagagagagctagttcatagtttctgccaactatgtgggtatatatatatacaagtgagaggtctctgttgagcaagttatccagatatacacataaaaataatccaaaagaagacaaatgtattttaaaacgaaatttgagtaaggataataaaatgacaaaaaaaaagttcctcacgagtacacctttgattattttaaattgaacttgaaagcttgcgtttgagtgattttgttgtatgacttatgtatccatatatatccggccagggatatttacatacctacatagcgggataggaatatttaacggttttttatattatttattaaattagaatataaatcacaacaaggtgaaatttaattcagataccagtggtggcatatatataataaataatatatatatatatatttgtgtcattcgaagtacatatatacggacgtagggtggcatatatgtcttatttttctgagaagcttatgttcagaccaatttgaccactgtaccaaaacagaaaaatgtaaataaattccaactgatccctcgtgcgtggttaaatttgaattaggtaatcaactaactaacagtagttagtaacattttgtactgagtatcttacttatataacacattttattttaattaagtagtatatataattgaactttttatcggtctgtacataatatattactacgtacgtatcatggtcagttaatcagcacttataatatgtttactgatttgtatgatgaggttaatattattaattatactttagcgcatgaattgatcttatttatgtattatataaatatatatatatgcaatatataatttaagctaattttggcttttcaatagtaattgcatcacactctcaattcctatatacatataaacctagcaaagagtaggttaaacaagctgcctttgccggcaaattttttttgtctaatctctatactgatcatgatggaataattaattattaaggaatgcactttgtgacaaaaccaaattttatatttaactaattaattatattcttaagttgttgatgattaagttcagagtttgatggtcaccattcattctgatcatgtcacattacgatatctatgagagagatcaacttggttgcttgtgccaacccatgccactagataagacaatttagacctcttctccccaaaaaaagacatacaaagaatatttatttaatgacaatttttttatctatacatttatattaatctctatatatttggttagaaataagttaaaacccattggttattgtctgatactataagtcattttctctataattctgattaaaataattatatatagtacgtagtatgcatgcaaatacaaaaataaaaataagaaaatttgaatttttatataattttaattttttttttttctaatcttatataatacccaatatttatagcatatgcaaacatttgtattatccccaaaatatcatctccattacatcacctccctctattactacaaaaaacacttttggttcagtttcggtatcatttaatttaaaaaactgacaccatagagtagctcaattttaatgtgtcggtttataactgacacttaaaaaaggcaatggtgtcagttaattaattgagactaaagcctaaactgaaattaaaagagctgaaaaaaaccaaatgcctctatggtatcagttaataactgagacttaaaagtttaaaaaccccttaactctcagttataaaccgagaccaaaaaggtattatataccaaaataaaaaatataacaaagtcccgcctttatggtgtcagttaataactgaaatttaaaagtttaaaaacacctttagtctcagttataaaccaaggccaaaaaggtattatataccaaaatgaaaataacaaagccccgcctctatcacttttcatctcctgcctctattattttttttttctcttgaaataaaaaaaaacccagttgccctaaaaaaacccatcagctctaaaaaacccatcagccagcccattatacaaaaccaatcccatgcacgaaccaatctcattctcatctcgtcggaggcatcgcccaaccccgatttgttccctctccggccatgacgacgaccacgaagcatctccgcacataaatctgttcgtgctacgaagaggttagcatttgttcccaacttatctatgctaattattctgagttaaaatttttcacagtgtggaattctttgattttttttgtatttgagattttctataataaaaaaatatatatattatcaaacttagctttttagtaaagttaaaatagaaattgaaatgcccagaaccatattcttatttatacataaaaatgagatgtttacagatcttgtttcctttttttctttcataataaaaaagaacaaaaaaagaaaagacagacttttttggcgcaaaaacagagctctctcttctctctttccctctttctgtctaatgcccaagcactcgtccaccaccacaaagaaacaaaat

SEQ ID NO: 19546 - DNA, 2589 bp, Cannabis sativa
gtaaaggaatttcgtaaatacatacatatacaaggagttgaataacactggagatggagtaccaaagtagaatccctccaaacacaatgtagccagaaaaaacatactgaactttgaagatggaaatcatccaaaatataatgagcacaaaaaggaacatgaaatggtacatcaacaagtaaacaattttgaaaaaaacaagtaaacaatttatttttaaaaaaaaaaaaacaagtaaacaattttttttttgttatgtcttttagactatttttactattgaacccaatcaccataagaaagagtaaacggaaataaaagggaggatccaggaggcccttgccagcttctctactctctcctctaattctacagggagctcccactgaaagccagtctttgaaggtgaaatcgcctttcattgccgacaatgccagagattagaaagaatttctatttacaacaaatggttcaattggaatacatgagaagacaccatcttctgttaccaaggccacacaacatagtttctattactacaagttttaacccagttcatcaaagggaacaagaacgaaacggaacaacattttcaacaacttagaaaacacattagaaatacaactgcctacaatttgtggcatctatatcagatggacagtatgggcacttgaaagttctcgtactgttctttgacatcttggtgatagattgcttgcaaagcacatgaccacatgacatcaacattgacggattatcttcggtggattgctccttagagactggacatacaaaaatagaatggaactgaaactccttgtccagctcaaccggcacgggcaactgcttcatagattgccattccagcttctttcctgtcattacagtcatgaacttcagaagagggggtagcgcctggccccctgctgatattgttacagtcaatggactttcacaagactgcccctgaagattgcagaactgcctagttagctcctcggcaactttttcccaattagttggtgataataactgcgcgtatggtgaacgatcaagccttccagtccacaagatacaaatcacaagcttttgaatttcagccatatgatcagaagcaaatgaagaaaggtaagttctagcatactggagagcttcatctctgctttggttttgcagtatttctatgaattgcaggctgtgaagtttcagtaataggtctgagccactttgtttgagtttatcagagttggcagcagcccaattcagcgcaggctgtacattccgacatttcatggcatcaagtatctgaaacatttcctgaaatagtattttcattgagcgcgctgattctggttccttggtctcttccacaaaacagtcaccaacctcaaataagccatgcctgtagaaatgactggctattatctcatttactgtgtgagtatcaaattcaacgtttctataagcctttgatatatctggactgaaggatttttcaagaagctttggatacttgctggctgcagcattcacttctttatttgtgctttccagctgacttagtggggccatttcttttaacttgattttaagttcagcaagaacagacacataatcaagttgggagttttggccatttgccgattgtagtttttgtaatgcctgttctatttcttggtcaatctggtcaataacttcttgaatcttagagcaggatagtttctgcttctttgtaacacgatcaaatgcatctttaatggaattcaactccattagcaatcacacaaaatgttggtttacagatcaacacagctgcaaaatatgaaacaaaacgaaaataagtgtttaaatttcatactggaatcaacttcattgctcaagaatcccatttgtttccaaaagacaaacatcaaaacatgtcacctcatttcgcaaaatgaaaaagaaaaaaaaaactaatgtgaagcttccaacagacaaacatcagaacattcatttaaaatcatgccacatcgttcttgcaaaataaataaatgaataaatcatgccatataagtggaaatctactttataaatgatgtgatatcaattgtaaattaaactgatcaacaaagaaagcaatatggagatcagtataaagctatacaagcatagcattgactactattattcctgatggaatgggcatcttaacatgtgtagccacagtaaacgattatagcatagcatgtggtcataaaatcacaatcgattcagggaaatattctgaacaataaaccaataagtcttatactcttgcaatcagaaaaaagatatgaagggcagtgccttgtcatcttgcttctcaactcgaccaaatctcaaaattatagtgtcactcgacctgagtacaaggttacatcgacatagatattacagtatcaacaaacctctctccttacagatctttaagttgttaatttatgttatgtccagaggtatgaaagaatgattcatttaaaacaggaattaagggagacactgggacaacttgaatgtaataaagcacctactggaacttgcaatcaaatgctaataaaaagttttaaa

SEQ ID NO: 19547 - DNA, 7396 bp, Cannabis sativa
ttacataaaaatattgcataaaatacaattcaatataatattatacaatacaatacggtgtaatacgatgtaccaaacacaccctgaaaatctaaaataagtgatagcataagaaattttattattaaataacaaaataggtaaatattgataactacttacaagttattttgcttgctaatgagccatgatggcatttccccactaagtaagttacttgtaaaatacctattcaaagtgaaaacacaatgaaattttaagatagcacttcacaaagaagaaaaagtgttatgaaagggaacaagttagttttgagagcttttagtgtgtttggttagaagtaggagtggcaatcgagtagagtcaggatcagttctgacccggtatcaacccgccctgacccgatagtaatatgacccgacccagctcgacctaacagctctcttgaattgggccaaagtaggcgtgactcaggttaaacgggttggatctgacccgaccagcctcctttttttcccttttcttttttatgctaacacttactaaaaattatatatatatacatattacattataattatattaaaactaaatgtgatttcttaacaaaattactgatattttgtgtctaatatacatatatatatgcacaaatttatatatatttatgtaagcattataattattattataactagttgaagaagaatatgagtagagaagatgaagaagataaattatttttgcaatgaatatttgaactggggtaggtaggcgccaacccaaaaaaaactgagttaggccaaagacccagatagtgacccggggtcagaaccctaacccgactcgcaaaaatagctcatttttctatccctagttagaattaacgattgaaatggaaataaattgatttttattctatttctttgtttgtgttacattgaaatgatttttccacaattaaattttactccatttcttattttcattctcattcttatttatctgttttcattattatttcttctacattacttacatttttgacaagtgagctaaattatcaagatttggaagttccccttgtagtttattaaagctaagatccctgccaaaataaataaagtgcaaagtgttaaaattccaacaaaatggttcacacaagtataatattagataagttgattgatcaagaattacaagacaactagcttttcaaaagtgttaatatgtgtaggaatgtttcctctaagattacaactcctcatcatcctgcaatttcaaacatatgatcttataagttcaacttttcaaatattgagttgatcttagtcacaaaattatacatagagaactcacaatttctttaaatttgtcatgtttctcaagtctgggaagtttgagctattttggccatttaagtcagtaatccttctgcaaagaagatatcattataaaataacactagtaaacgcaaagatatcaataatattttaaggtgttcaacatcgtactgatgtaacactgatttataattagttagcgaattcttatattatttattaaataaaaataggatctgttagttagttggtccagtcatcaagttcaaatactgttggtccaagtcagcgaggtagttagataggtttcctatcccattcgacctataaatagaaacttcaacctcaagctggatatgcattgtttctatctagattttttgactgaattcttttattcttgtaaatctgtaaatagagaaagattgagagagctctaatactcttgagaggattttcatgaatgaaataaagtggctatctttagataaatctgaatgtgtgtgagattcatatgtgttcattgtctattgcattcgaattgattttagttcttgtttcatcactagtttcagatcacattgggatatattatcttgctagagttttgtggtgagatttctagtttgattcctaacaaattggtgcagtgagcatggagtcaagccatgggattgacgaagtatgatgtgtagaaatttagaggataaaataattttggattgtggcaattagagatgaaggctcttctggttcaaccgagtcttgaagatgctctgaaaggagatgaaggtctcaacattaagcttgaatacaaggacaagaagatgattcttggtaaggctcatagtgcaattatattgagtcttggagataaaatgttgagacaggtattcaaagagaaatctgcagtagggatttggtaaaagctcgagagcctctacatgaaaaagtctcttttaaatcacctctatttaaaccatactttatattcatttgaaatggaagaagataaatttgttgaataaaaactaaataccttcaacaaactaattctttatttggagaatataaatgtaactataagtgaagaagatcaagctctactacgattatgttctttattacctagatcttatggtcattttcaaagaaacattgttgtatgtaagggagtccttgacccttgaagaagttcaagctactctaaattaaagagaattgaatgaaatgaaggaatctaagtccaatgtcaatggtgaagggctaatagttagaggtagaaatcaaaagagggaacatctaaatgacaagaagatgtcaaaatcaagaagtggtaatgggaatggtggaggaaatgtcccaaacaaaaagtgctaccactatcgaaaagaatgtcacattagaagattttatcctgatagacagaaagggaactacagaaatgataaagaaggtaaattagggaatgctgctattgcacgtgatggttatgagtcatcgaaagccttgatggtttctagcaagagtttgaccatgaatggataatggactcaagttgttctttccatatgactccaaacagaatttacactttgaggagtttcaagaaatggaaggtggttctgtgcttcttggcaatagtcaatactgcaagaacacaagaattggggccatcatattcaaattcaatgatggaattgagagattacttgaagatgtcagacatgtacctaatttgaagagaaatttgctctccttgggagagctggataagaaaggatatgtgttcgaaggagataatgatatcttgaaagttgtgaatggttctatggctgttatgagagggatcaaacaaaatggtctctattccctagatgcatatgtggtagttggatctgcagccattgttacatagatgaaaatgtcaaaaactaagatttggtataggagattaggacatgtaagtgagaagggtctattggaactggacaaatagtagtttttagggaaagacaagttagaaaaactaagcttttgtgaaaactgtgtctgcagaaaagctaaatttaggtcaacaaaggactaggagaactcttgattatgtccattcaaacatgtggggacctagacatgctctcattctggtgcaaggtactttatgtccattattgatgactactccaagaaattatgggtattcatccaaaaaacaaaagatgaaaatattggagactcaaactgtaagaaagattaaaagactcaaaactgataatgaactagagtattgttgtgatatcttctcttactttcgcaaaaaggaaggaataacaagacataagataattataaagaatcctcaacaaaatggcattgctaaaagattcaacaaaaccattttgaaaatggtgagatgtttgctattaagtaaaaacatgcctaagatttttttgggtagaatcagttgttattgttgtgtatttgttaaaaaggtgccacttcactgccgttggaaaaaacacctaaagaaatgtgttctagatacccactaaatctcagcaagttgagagttttttggcatgtcctgcctatgctcatataaggcaagaaaaattggaaccaagagcattgaagtgcatgtttttgggatatccagagggtatgaaagaatacacgttatggtgttttggaacctagactcaaggaatgcttgataagcatagatattttgttcaatgaggttgaaatggcttacaaggataagacaaatgtgacaaactcagaactagttcataaagctgcctttgaactagatgagttgaattttgaggtggagttggttgacaagtatcaggaagatcatgatgatgatgagccacaagaagaaactaaggaacatggagaggatgagtatcttctagtaagagacagaactaaaagacaaattagagctcaagagaggtatggataagaagatttaatggctttctcccttgttgtagatagtgaagtcttagaagaagagccttcaagctataaggcagtactgaaaggtagatacaaggaaaaatggctcaaatccatgagtgaggagatgaagtcttttcatgcaaactatacatgagttctgatcaaaaggcctaaagcatctaagagtataagttgtaaatgggtactcaaagtgaaagagggtattctaggtgttgaactagccatattaaaagctagtcttgtagctcaaggtttcacctaaatagagggaatagacttcaatgatgtattcccaatagtattcaaacacagatcaattagaattttgttagctgtggtagctgagcatgatctagaactagaataagtggatctaaatactgccttcttgtatgacaaactttatgagacaattttgatgacacaaccaaaaagattcataggaaagggtaaagaagactatgtgtggaaactaaataggtctttatacggttcgaagaaatatcctaggcagtggaataggagatttgataaattcatgacaaaaatcaagttcacaagttagttagacaattgtgtgtactttaagttcccgtctaacaacgactttttcatattgctattgtatgttgatgaaatcctaataactagtaatagcaagtcaaaactgacaaagttcgagaaacaacttagccaggaatttaaaatgaaggatttaggtgctactacgaaaattcttgggatatagatcaagagagatagacaaatgacaaaattgttcttatctcaggaggagtatcccaggaaagttttgaacaagtttggaatgtcaaatgtaaaacttgttgtcacatccttatctaaacagttcatgatgagcagacatacatggagagcataccatatgcaaatgaagttggctcattaatgtatgcaatggtatgcactcggccttatatagcatatgcagtcagtttggtgagtagatttatggaaaatcctagaaaagctcattagcatccactaaagtggatttaaggtacattagagggtcacttaagatttctagtttatgatagagccaaaggaagaaataagcatgctacaattgagggctttgtggattcagactatataggctgcctagacactctaaaatcattcacaagctatgtcttaattgcttttggaaatactatcagttgggaagctaacttacagaaggttgtagctttgccaactactaaattgaagcacagtacattgcactcacagattctgtaaaagaagctttatggttagaagggataactcgagagttgaatatgcaagagaatgtcatcactgtccactatgatatccaaagtgcaattcatctttccaaaaacaaagtacatcatgaaaggacaaagcatgtagacattaagctacactttgtcccaaaaataatttcaaatggatcagtgatcatgaagaaggtttcaactgatcataactcttctagtataatcaccaaagtgctacttagcaacaagttctttcactacttaaacatgatccatctgttgggagatcatattgatctcactgctcaaaaagtattctcacatcaaacttgacaatgaactaaggtggagtattgttagttagttggtccaatcatcaagtccaaatactatcggtccaagtcagcgagttagttaggcaggtttcctattctgtttggggtaattagtagttgaatacctataaatagaaactttaacaatgagctggctatgcattgtttttcacgtaaacttttgaatgaatttctagttcgattcctaacaagatctaaaattgaaatgtatcaataacaatatattacctcttgtatcatttgacaccttaaactcttaacatttttcgcctttaattagtgcaaaataacttacatttctgttaagttgttcaagctagaaagactagaaggaatcggcccgtcgaaaccacttgcttccatctctctgttgaaagtagtagcatttacaacaacatcaattagtataaataaattgatcatatttttttactaaccaaataagatcaacaagtacttacaaatactgaagttgtttccaaccaccaaactcaggcatttttcctgtgaagtagttactactgatcctactgtaatgagaaagaaaaattcacattgaatgagtagtcaagattaacatgacataattaatcgtaaaacgttcattaatttcagttaggatccatttttagtaagtagtattaaattgtatagtattgtataatattatattatattttaatataagtcaaaattaaatatggttatataaaaatattatgtaatacaactcaatacaattagtacgatataatacggagtactgaacaaatccttaatgaagttattacagtgttgttaacttggggagattagtgagagccaaagggaactgtccagtgagattgtttgcattaagattcctgcagccacaccaatattattttcaattaacaagacttagttaattaacattagggttaatactattttgaactctgagttatataaatttagactctgtgtttttcaaaatagtaaaaaattgaccctgaactcaatttttatcaatttattttttaaattaatataacaaacttgaaactagtttctaacacgaatagatgtaaaaaaatgtaatcaatctgatcaagttactaataagttttagttttacaaaaattaagctcaaagtctattttgtactattttgaaaaatatagaattgaattattatttaacaaaatagaaagtccaatcaataatttttataaaatacaagatttaaaatagtatttacctttaatattattatgtaactaattatttcgaatcaaagattagactttagagcaagcaagctactcacaaatattccaagttcaccaaatttccaagttctgagggaatagttccaaaaagcatgttagtctccatgcctctgatgaaagaaatgaagactataaatattaaaggatga

SEQ ID NO: 19548 - DNA, 2653 bp, Cannabis sativa
attattttgtaggagatgatttgttattgtttttaagtttcttttagattgatgcaatgtattaattcacatattaaaatgagggattttagtttaactaattataaaatatgatatttttttagttgatattaaggtttttttttttttgcattaagctgaataagtgatttattaattttcttattgagtcatattaaaataaacatatatgttgttgattttttgttattctttagttaatattgaattgatatgcaaatattttgaagtatacttttattttaattttttaattttcataattaaaaatattatgataaatttttcgaaaaaaataaatattgtgataagattctcgatgttattttctaattgtttattttgagttgtgtttgagcttattaattacaaagaatgtaaatatgcatattgacacaaggttaaggttggttaaggcggactagaccagacttagagtccactcacccaattgagtccaaaaaaaaaaatatatattttaaaataacacgtattattattaacttgttgatacctaaacccaattaatatggaaccatttcatattgtgctaaattaaaggaaagcaaacataacattttgaaccattatgtaccaaatgaaatcaaatccaacaacatacaacactagacacttaattaagctatgtccacactccacaccacaccaccatatttaccaacacgtcctagaaagtagaaacaaagatttgcaatttttttttacttttctttttttcctttttaaatttttttatataaacatctaaagaacctagttaattccaattacaacacacatgaccaaccttgttcttcctctaacctccttcctcctcaattgaattgatcaatccattacatttcacagcatctttagtacccaaaattccttctttttctttctccaataatttctcttcttcctccttagccttaatctttttagccttctcaagtgcttcaaccaaattcttcatacactcatctaagtcttcctcttcagaattcaccatcaaattctcagccacatcagcaggagtcatttcagtttcacccaacaaacactcaatcttagaaaacaaatcatgtgactcaacatctaagtagttcttggcaagaaccttaaaagccccaaaaccacaataggaaagctctatgtgcttgtccattcttcctctcctaataagagcaggatcaagtttgtcaaaataattagtagtaaacacaataagcctctcaccaccacaagctgaccaaatcccatcaacgaaattcaaaagcccagaaagagtcaccttactataatcatctattgaatcttcattaacagggtcactactattactactctgtactccatctttctttttcttattcttcttctttcgttgaccagttagatcaagagaacagtcaatatcttcaatcacaattatggacttactcgaactgtcaatcaacagtttcctcagttcagtgttgtccttaacagaagtgagttccaaatcataaacatcataatcaagaaaattagccatagcagagatcatggttgattttcctgtccctggaggaccataaagaagataccctcttttccaaggcttaccaactttggtatagtaatcctttccgtttttgaacttaaggaggtctttcataatgtctttctttaacttggggtccaaggcaagtgtttcgaaacttgcagggtgctcgaaatccacactgatccacttacttgatttaccacttcgataaatgtcagtagagccattggtgtaaagctttctcttgcgattcttgagggctattcgttttccctcctccaagacgtggcggagataagcggtggtgatgagttcgcggtggcgtctatggaaggagagtgtgaagtaccttttgtcgtccgaatttggataaccccacctatcgaaacgcaaatattatcaacagtggcggattcagaatttaagttgtgtatttttttatttttttttttgaaggaatccttttgttttctttatagtataatatgcttaaaaaatgggttaaatgcaaaattgtattttgatagtattaaagatgatttaaagtaaaaatgtaactaaatataagttttattattagggatttcaaattgtttgaacctttttggtgtattattctatatgagaatgagaagctagaaatgtttggggtatcaaagttccatatcgagagaatagataaaatttgtcgtgagagtttaggtccaaaacagataatattgtatgcaggaatcaaagtgagatagcggtccaacaaacggggcaaacaaaaaagtatataccagaaatattatagacttaaaaataatgtttgtaataggttttcttatttcaaaaagagacaagtagatttgataagaattggttattgagttctttttagctcaactctttgcttggggctttggttagttgtaaatggtattcatgaactgtaaaatcaaactaacgaaatcacatttaattataaattcatattataactaactaaaatacatttatatattttttttttattattattaacacatactaatttaacaagtgagagattttatt

SEQ ID NO: 19549 - DNA, 2760 bp, Cannabis sativa
tggggagaagccacataagattatagtagcatgtacataaaccttcccataaagttatatgacggcataaaacatcctaaagttcacaaaatagcacatcagacatcatcccttgaaagcagagaaagaatatccaaactaaagcattgtgattaatggcataacctggtacttttctatactgttgtatgctatcaaaagcctggaataaaagggacggcacagactaggctaccggaaatgctggaccaaaacaaacactgtccaagcatagtctgtatattctagcacacaaaaatgaaacccaccatcaccgtacaacctcaaatccttctgaatagataaagtgtaatctgttcctgaaacacaataatttattaggaaaagcagaaacagaaaaaagttcagtaggtctatcaacaagtgggtgcataccaagtgtaacatctacaaaacaaattatagcaagaaaactcaggaggagaaatataagagtacagtaaaaaaattacccatctttgaagaataaaatgtatatgaagcttttatcacccaagttttcagcagaagttatcatgtggcacttcattgttcgtccttatacaagtttcacctcatcgaatgagaataacatgtccaattcatagcattttaatgttgcccaaccatagtagaactaatcacactttgtaaacacaacatttcataacaaaaatagggtctaatctgtatgtagaaacatataaaacagtttatcacattaaaataggttcactaattgacatcatgaggagttaagtcataggaatgactcacggacttggagaatgaattgcattagatatattttgtgtcacatgatcaggcaccaggcccttttgaatcatatcataaagtagcgcaagagcaacatctattttttcagccttaatgtagcttttaaccaatgtgttgtaagaaatcatatcgggtagaacaccctttgatgtcatttcttcaaggatcttcttcgcttgatccacttcacgtttcatacaatgtccttttattaatatattgtaagtgaactgatcaggctctccaccaagttcaattattcgatcaaataatttgtgtgccttgtccatccatccttttttagaataagcatctataagcacattaagagtaataatatgaggataaacgttttggctcaccatatattcaaacaaattcttggccttttccaattgacctaccaaacacaacccattaagcagagaggtgtaagtgacaatgtttggctttatatctctttgggtcattagatcaaacatctgaatagcctcttccatccttctctccttacaaagtgcatctacaaggataccaaatgatatcacatctggtgagatattttgatccttcatctcatcaaataactttatggcttccttccattggcctgaatggcaaaatccatagattaatgaattgtaggtgataatattaggcaacactcctctatcaatcattaattccaagatatcaagtgcttctttggttcttcctttcctgcacatagtatctaaaacgatattataggtaaaaatatcaggagataatccacgattggtcatataatctatgagttgatctgcttcttctaatcgatcagacttgcacaaaacagagattagagggttgattgtgacaacattaggttcaaagccttctctagtcatcaaatcaagtaacaaaaatgcttcttgagttcttccttccttgcatagagaatccattagagcgctataagtgtgtaaatcaaatgaaatcccacgatcactcatgtcaattagaagtgtcttggcttctccccatagacccaattttcgcaatccgtgaatcaaacaattgtaagtgatgacatccggcagcacaccatggttgatcatgtctcgaaacaagctcaaggcctcatccactcgttcttctttacaaaggccatcaaggattggattaaaacagtccacagaaggttgaatgctcttatcatcatcaccatcatacattctcttgagtaactcaagtgccttctttgtcttcccaaccttgcacaacccattaatgacagtcccataagtgatttcatcacgtgggtgtttcttctctacaatttcctggaacaactccattgctgcaaccatggagccttgagcgcagaggccgtgcaggagagtgttcagagtaagagcatcaagtccaaggccatgcttatagaaagttgccaaaacagagaaacccaagtcagcttttttcaaacgacacaaacatttgatcacaatcctcaaggtacccgcctcaggtcgaaaaccagcacaacccattatctgtttgtacatagatacaacagtggaaaagtggttcatcttggagagagccccaattaaatgattgaatgcccaaatggaagataaaggacgcatcttcgtaagagaatcaaaataacccaaagcctctttcactttaaggttcccagatttacatctggcttgaatcaaattatccaatcttcgttgttgatcattgttagtgacagaataattatttttagaatgaaattggtttccgaaaagggtgaagaagagatgaggattaccagtaggtcttgtggtcatcatcatcagtggctgggctttcatggttgtgacacttttctcgccccctccttatacgagcattctgtcatatagttacatggagcattgaccaaaatga

SEQ ID NO: 19550 - DNA, 5342 bp, Cannabis sativa
atttataataataattgcggttcaaaccgcaccgtactatatatatattacaaagttaccaattttttaatacgatttttattctttttttttatataagaataaatgtatataatatatgtgtatattacattattttttagagaatccaatataattatttgattattaatatatatgttatgatgttaaaattttaataatatttttattttgtattattgaaactttattattagattgatttttaaattttcattataatgttcgataataataatagtgtaaatcgctcaaaactgcattgcaccaaattaaaactgtattttcgcagtgtgatttttgcggttttaaaatctcatggtgcggttgcagtttgagaaattacaaaaactgcatatgcagtttagtttgaaaaattaaagactaaaacctcactatccgcaccacgaacaccaatgttatttaatttgtttttatatgatatcttgatgtgatgagctaatcataatagagtttgtcatgaagatggtgcaaaatgcaaatgaccccaaatttgaagcaccatcaaaccaagttcgaaactacaaaattaaaaaggaacgaaatgaacacattattacatatttaacaaaacattaatacggattaaacaagaaagactattattgtgtgaaaaaacatgaactactactatataacacaacaagatctaattaagtaaaaatagagaattgagaatcaatctctctagtgagatcttcatgacatcctttattagtttgggctctcgttttctttttcttcatcttcttattccaaaagtcatcgctaaccagttttgctttcttgcagaaacaattctttcgatgaaaaatccaattaagaatccacatccatatcctactgccacaactttccaaccaaattgaaaaattgagcttttgaatcttcttcttcttcttcatcagatgatggtagttccaacggcttcgattgtccacatgagttttgcaatggaataccacataatcccaaattgccttcgtaacaactattatcaaatgtgttgagatgggattgtggtataggtcctgagaggttgttgtgagaaacattaaagtattgaaggaaagagagttgatccaattcacttgggatgtgtcctgaaatctcattttgagaaaggtctaaggattcaagctttcttagattccttagcgatgaaggtatgccacctttgagacgattgtttgacaaatcaagagaatagagccctttcaagtttccaatgatttcaggaatttctccatcaaatttgttattggaaaagtttatgactgcaataatattttggatctccttatagtagatagacttgcctttgattggtattgtaatgtggtaaaaataaagcacattcaaagtaccaccatttgatgattttattttgaaaggtattgaccttaagtaataaaaatcttcaatgtttgtacttctcatggccttccaactttggatgtatttcaaaggcaatttcccaataaaattattgtaagaaagattgattattcttaattttgggaaatggaggctacttctataaggatcaccaataactccatgcaattcattattttgcaactcaagaacttccaactcttgaagaaaccctaaccaataagggaaaacatcattgagcttattactttccatgttcaagtaaccaagcatgctacaatttgtaagtgattttgatagtttcccttcaaacatattgtaacccaaatcgatggatctcaattcgattccttctctaaactcaggaatatcgcctgagaaagtgttgtttcgaagacttaatatcgataatgacttactaaactcaccgaaacaaggaggaagcttaccacctaacttattatcagaaaaatctagaatttgaagagaactaagattgcatattgttcgtggaacctcccccatcaaagagttttcggaaaggtacaatatggacaaagtgtctctacttatgctcaacatccaatccggtatttgaccactaatatggttaccagtaagcttcaactccacaatttggttttgatacctaagaaaatcaggaaattttcttagattacaatgggacaattcaagtgttgtgaattgaggaaatgtttcatttttcccagaattaacaaacattagtgtgagtttgttatgagataaaccaaaggcattgaggttttttagggcaataaacatttcaaaatttacaataccactcaaattattatcatccaaaaaaagggtttgtaaatttatgagtttggacaatgacaaaggaacttgaccactaaattgattagagtttagacttaattcagtgagttgagttaggtttccaaaaaaagaagggatttttcctataaatttattttgagaaaggtctagaaaagtgagttggttcaacttttccattgaagctggaatttttcctgaaaagttgcaagcacaaacatctaacccaatcaaagaagaggaaagtactgaaggtaaacttccactaagataatcattcaacttcacactaagaaattgcaaatttggcagatgaaaaatgttggctgggaattcacctttcaagtcacattctcttaggagtagagttgttaaggaagaaaaatttgccaatgattttggaattgttgatgatatcacaacatggctaagacaaagttcctcgagctttgttagattcgaaatcagggtctgaaaattaggattctcgagtttcagtaaatattttaaagaaactaaatcaagattaccacacaaataaagatgtgacaatttggataactctgaaatttgtgaaggaatttgaccaaaaaagaaagagtctgctaggttaagataggtaagtttggaaagtctattgatagaagtgggaatttgagagtaattgaaattgttgtcttcaagattaagactttggagatgaattaagttgaagagactactatttgagtcaagagagccatagagatagctactactgagatcaaggctaatgatatgacctgtaatctcatcacactcaacaccatcccacatgcaacaatcttctttcttgctccacaaggcaatcttcgaataagcacccgaatcaccagaagcagacttgtccataacaaagctttctttaaactgtaaaagagaaaacctttcatcatcatggcaaatgggctgcgaggaagttaaacataacaacattagaaacaatatgaaatatgtgagatgacaaagaaaagtagtgaaaatgaagcaaggcattgaattagatcccataagatagttcataagattatagttaataataaatatttgttgtgtgtttataatgtgatttatatagtatgagaaatgctaaaagtatgtgagattaatttgatgagctttgctactacttataggggtagaaaatctttaattaatatatatcttatcatgtcacataaaaaaggtagcttaaataatgcccactgaatttatttatatgttgattgttattttgtttttatttattattttttctaaaagggaagataatgataaattaagtggccacccccacaaagatttttttgtgtacgtgtggtcaacacccaatatatttgtgttgagttttcttgggcaaggcatgtgagaaagtagaaacactaagaaaattaagccaactaaagtctattattgttgctagggccccaccactaaaaaaaacttttagaaaaatggagagagatgaaatcaaagttcaaatggcactacaaaaatttatatttttcatcacaacactgaaaaagttatcaataattatataaatcattattcttacgttgtaactaaaaagttcgtacgtgactaaaagttttcagcacaaaagttacaatttattataactaaatgtatttttagtcacaatacttattgtgactaagactaaattaatgacaacttgtatcttaaatgctatgttttagtaataaataaaattagtcacaaaaatttatattataactaagaaaattatcactaaagataactgttttttatagagtgagcctgtgtgtgaaatgcttcatttatattagtcgtatattgccaattctaagccctgattttttccatgataatattttactagcacaattattaggcaactgatatacaacgtaagtgcaactatgtatgaacaattatgtaattggatatcattaagaaaaaatttaacaaaattttattgcactgatgaataataacttgtacgttaagaatattttatgaaaaaacaatagtaagtacaatgtaaaccaatgtgtgatatcaatcaatgttaaaatatgaacatactaaccatattagaaatattttttctctacaactaacataattgtagcagtactatcagtttgtaattattaatacatcaattatcgaagagttaataaaacgaacgaccaactgtattgcaactatatatatataaaataatgtttccaaatctgtgttgaaaaataaatgatgaatgaaatcagaattcaataaatttagtattgaaatttcgaaagaaaaaaaaaacattaatgtaacacttataatattgtagtgatatatatttaatcattatacctgatttagattgattagaaacttgaaatttatttcttatagatttatattttatgaatctataaattgaatttagaagtattagttttatgaaatttgaattataaatcaatgttgaattgatcgatgtttcataccagctttttcgtaaactatttttctgtcagttatgattgttttccgatttgagtttattcttcttttcgggtgacatcactagaattaacggtgcttcctcgtctgccatagttttttcatcattgccgaccctcattgcatcgcatgaaggttttcaatcccaggaagtttaaatcgtgtaagttgaaggtgtgtaagaggtatttgtgtattttctgttattggattgtatatttatttatttatttggccggtccaattttttttaaaaaaatattattacttttttgttataacttacaaaaatacccatcttataattaatataagattctcttttctcaccataacaaataatgccaaacttgttacattatattccttgaaagacttttggcgttgggggaccaatagcagctataatagacttttggctgagtttactaattgtactctctcttcattccattcaaatattcttaatgaactattaccgtacctgaaatatggaa

SEQ ID NO: 19551 - DNA, 2617 bp, Cannabis sativa
tttttttttttttcatatttcttctttatgttactcaatttgggttttaatgaaaagtgaaaacaatgatttgtaacactaggggctctgtctgcaattttttacgagtatttcttattaattaaagtattatttgcggttaaatattcgttacaattccaaacactggattatgttaaaaaaaaaaaaaaaaaaatctcggtgtgaattaaaagaaaaagtgtaatttgagacgaaatctccttatgttttaatttgtatacacttaatcttcttattttttttttgtggcaaaatttttttatgttttaattttaatacacttaactctcttaatttattttttttgcaaaatccccttgtgttttaatttttatacacttaaattttttattttttattttggtggcagaattcttttaattttttttttttttgtaaatttaaagttttagttagataatactgttaaatactaattggattactactgtatcgacttcgagattttaccgctacatatacataggtgcatatagtggtcatccaattgatatttaacggtaatatttaactgcgtgtcaaatttgcaaagaaaaataagcataaagagattttgccaccaaaataaaaaataaaggggttaagtgtataaaagttaaaacataaaaaggttttaccaaaaaaaaaaaaaaaaagagttatgtgtataaaaattaagagataagagagttttgcggtaaattgctcaaagaaaaatgtttggaattagtgccctagcaattttctttaattattgatgaaaactattgattccaggtgcaaaaattcatggttgtaaatcataggtcttatcatcaaactattcatcataaaaatccaactcacagttgctgtagcttgtgtttctttctctttcttgtgtcttctttgtctatttataagctaagaaaaatgaatgctattcttaagactattaggaaagctataattttaaagcatcgaaaccttacctcaccaaccaaaagtacagttgtgggctgtcctaccgttatttttcagttgcattttaatgaatatttatctattattatctattatagcaactcaaaagaaaaagaaaataaccattatagtatttcccattttttaaatattttttatggctaactgattttgattctgctgtcaatttttcctataagaaaaattattataggaattggacatgaaaactataagaaattattatacacattgaaatgagacaaatgttttcagcagctgttgagattttatttgaaattggctgccactcactaaataggtgcttatataaccctgaaaaagaaaagaataagtgcttacagtattaaaactattggctaatgatgaaaagatgaattttatgtactataaatgtggcaccaaagcataattattcttgtattaaataacatttgagagcatatatagttttgtgggtcttaattcttatcattgtggcttattttgtggagtggggattgggctagctaggtacgatccaaacattttttaaagaaaaatatatacatatatttttttttaaaaataatagcttaacaatgttttcaatcccttactagttacttttaggaccctctataagtaaatataatttagggtgtttattagaccacattcaatgtttttatgtctatccagattcgatccaattatatattagatgttagattttaccatttgatatgattcaattaatttcagtcattcgatcgatctaacatctaatagatcggttctatccgttggatgtattatatatatatttattggtttaatttagatttatccaatattttaaacctattattttttagatcggatcaggtccatccaatattgtaagtctagtatgtattggattagattggatctatctaataatgttaatttttatttttacatatgtattttacgtatagcaatgtaaaatctaattactcatcaaaactaaatgaaaatactaattagttcgattagatattaaatgtattaaatttttagacaccctatctaacatccgatccgatctaattggacattcaaaaataacatctaatctgatctgatcacaattgaataacctatatttgacagtcaattataattagatcgatcaataaattagatcaatttgtacaaactctaaatatatctattcctttagaatggtatctactaatgatacagaattttaatttattggttcagtcatcctgttttcctataatgataattgcatcaattagtggtgcataattttatttataaaattagaataagtgatcataaactcctattgcttcttctgtactctttatcattatttactataaatgtctacatatattattttgtgatgaagtaatataaaaattgttatgtatatgttttatttttattttacattttttttttatttggttgtctaaaagaatgcccacaattaactattgagtggaacttacattaatttgtttaatattggtcattattacttttggagtcatatacaaatttagagtactggttagtttttcccctctatcat

SEQ ID NO: 19552 - DNA, 2562 bp, Cannabis sativa
  modified_base (2498)..(2504): a, c, t, g, unknown or other
gcaactgcaactgcaactgcaacatccgaaactttgaaaaataaaaggagtcttggaaatgttgtactccatccttcattacagaggagaatagaacaccttgcaaaagctacatcaaataccaaagcacatcaggcaccctttaggaacatgcttttttatgggcctcctggcactggaaaaaccatggtcgcaagggagattgctcgaaaatcggtattttttccatctcacggcttcatgtatatatttatttgcaggcttgcacttttttcagtttattaccttgctggaaattttcaacatgtatggaattcatgattggattttgtgctttacatgggataagggtatcagttgcatagttgaaaagtggtagctggactgggtagccagaactgtaaagttactagttttaatgtttctcggttttcttgtgcagggtctggattatgctatgatgactggaggtgatgttgcaccgttgggtcctcaggctgttacaaaaatccatcaaatatttgattgggcaaaaaaatccaagaaaggtttactactttttattgatgaagcagatgctttcttatgcgagtaagtactttctcttctttttttctgataaatatattgaactgtacctggacagaaaatagtgaatttcagagaatgtattgctggtgtttgatttgttggggctaaagctatctttgtaaaagaatagaagttagtttccgtggatcactgattataataagcttcagtaaagggtggtttccatttaaatgggaccatttctctttcatatagtgaaggcacatcgtatgaacatgtccttgttaaaaagtttgattggcatctatttataataataataagaaaaaagctttgaaatttcttttcttatcgtcggcttatactctaatacacaacttgttttttgtttgcagacgtaatagtacacatatgagtgaagctcagcgcagtgctttaaatgcattgctcttccgaactggagatcaatcgagggacatagttttagtccttgccacaaacaggccaggtgatcttgacagtgccatcactgatcgtatcgacgaggtaatagagttcccacttcccggggaagaggaacgctttaaactactaaagctatatttgaacaagtacatttatggtgaaggtgaagttgaagattcaactaaattaggacatttgttcaagaaaaagccacagagcataactgtaaaggatctttctgatgatgtgatccaagaggctgccaagaaaacagaagggttttctggccgcgagatagcaaaactcgtggctggcatccaagcagccgtttatggccgaccggattgtgctttggattccgagttgttcaaggaaattgtggattataaggttgcagagcatcaacagcgaattaaactagcagctgaaggtggtcagcttgtgtagctataaattcatattcattatggagaatttttgttagttttttcttttatgttttatacaattgattcgatttggaaactttgtcatatgtattattcttcatttgatgaagttcttcttttttttttttttggtgggaaaggtatccttttggagagtcaaaagatacgtgtaacaattcattacattgtactatgtaatgtcttcaatttcacaaataatttttcttcttttactaataaagttaatttgaaatcactctcatttgtaatgtttctctttttttgttgtcaaataattgtcaaaattagaggaaaattttggagcttaggttggtagttagttaccaactttcttttagattgccatgtttgatgatggagaaaaaagaattttcattaatttacatgtaacatatattttatatataaattatgtttaatttatataaagatcttatttagatataaattgattattttactctttttttttttttttgaaaaatttaaatagttttttgaattatttattaaacaaataagaataaataaatattttattgcatatttaatcataacttaaatataattatgaaagttctaaaaatataacttcagtattattaccgtaaaaaattaaatttagatatgatttgctaccaaaaattaaacttaagtatttatgccgcaaattacattttaacatgataatttgtatgaatttttatgtaataggcactatagctctaagtggtgcactcagggcatttccaatgggggttatccatggagtcgtctttgccacatgagtcttttggtacacatttcaaaccaactttatgaatatcattgtccaaaatgagcaatgatcatgttacattattattattattttttttaaagttactttatcaccaattaaatttttgagaaatatatataattttaaaatttaattaaagagtggtattatggtgggtaatttttggagttgtccactattaaagtaatagaaaattctacaatgcaccnnnnnnnaatagatatattgatgcacccttatctgttttaacacccgaaataattttttagtcaa

SEQ ID NO: 19553 - DNA, 5686 bp, Cannabis sativa
ggaccccaatcctgaccctgaccctgacccgaacaggacccgaactcggacctagacccgggacttgggacccaaacaggtgctggacccggactcgggactcaaactcaaacccggactcgaatccagacctagaccgagattgggacccaaacccggaccccgacccgactcgagatccgggactgggacccagactcgagacttgggaccggaacccagactcgacccgtagttagtgttggggtcgaatttattaaaaatacattataactttacacaatctattaacacaggtcaatattaaatattgtattgtattaaataatactaacgcaaaattaaaatggatataaaattataagcttagatgtaaaaaaaaaaaagtcgggtcggattagatccgatccgaataagttaggtcgaatctgatccgatccgagtatctaatctaatggggcgaggggaggtgaatccttacataatctagattatgttggatcatagccggataaaatccgaccaaattcatttacattggctcagatctaatctaaattgagattgattctacttcaagattcgacaaagccagagatcaattcactatgtggaaaaatattacaccctcaaatcttactaatgaacacccttgattcactcgagccaaactctaacaatcctctcatatacaagcacacacaagactaggtgatcatggtagtagaatatttataggaaaagatgtactcaatgttttataagacattagttagttgtaacaattaactgaaataacaaacttgtggctaactgtccaaatgatcctaacttctaactaatgttatcattttgtttgttacttgtactaaaatttcacagaatgattaatttataatattgtgaataatttaagaattattttttatgggttaaaaaagttcagaatgtacaataatacaataaatagttcagtaaatatactaattaaaagggtcaaaagaataagaaacgtacacaactaaaaattgaatcaatatacattatccataaaaatatataatactataaaacgacaccgtaccagcctccatttctgcatgcaaataaatttttgagaaatgggtctttagtactttatagtagtacacttataatctcatgttacaaggaaatttctagctaccttacatatacatattaattacatcatatttattccataaaaagaccaatcaaacaatagtttgatttccaattttgccaagaaaagtttaagagaaaaaagggccaaaataaaattaaaggcataatttggaagaaagctagcttaatcattaaatgttattatttagtactcatcatgagctggttattattagtcatgaaagatgatctcttaacaaatctccctttcattctaggtctcttctcggcattgagtttccgaacctcgtaccttatttttttcgcgaacaaccttgttcgtcttttctctctgtatctcgaaaccctagcttctcttcctcctccgacttcattattacttcttcttcctcctcctctaatcattaaatttccactattgttatgaccagtatccgctcgccacatatcctaaaaatttataacatcacacaaccaaaaataatattaagtttcaatcttaaataaatatgattaattagaattatcgattcgaaagtgtgtttgaaatttattgtgtaaacactatcttttgtcaaatacaataataaaaattcatatctaattactatcttatatccaaacatactttataatattattaaaccttaaacaagacctaacttccaaacacacttttaatgaacacataaaataatgtctaaattaaattaattattttttccaactaatttataaaaacacacaaaacattatttaattgttttaagagttgatataagggattaataagatttttttttttttttagaaacttagaaataacattaaaaattcaggaaaccactctagtctcacccggaaaaaaaaccataaacttagacgactttaagatattatgggcaacaaaattataaatctaaaaaaaataagatttatcaatacaataaaacatggttataataatttacttatataatatatttaaataactcaaaaaatattaagacctatatagctagggaaaaaggagaaagagatatatcaattgagatatttttaaaatatattgattggtatttttcaaaactttccatttctaatcaaatatcatcatcatgtgtcaattcaatttatatatatatatatatatatatataaatgaaataaaatattagtggtataaaaataaaaacaataataaaatttaccatataattaagatgatggtggtcaggccaaccatgggccgggttgagttgtggtctaatgcctgtggtccatggtgatccttgggtggcccatgcagctatcacaccctcataattcaaatttagactaagactcacatcacttgtcatctccctcttcctcttcttcttctcattgtaatttactattttaccctcttcctccatctcattataattatgatcataatctaacttataattataagtattttctttaatattattgaagaaatcttcattttcttctttgatattcaatttctcctcctcttcttcttcctcctcctcttctttacaattatccaaaagttctattactccaaacccattaatttcgtgctcacaacaatattcttcctctactcctcctccgccgcctagaaggttttctacatcagcagcaaattcagctagctctaactctgatggtagaaaccctaaaacttcgtgatcatcaacatgatgagtcactgttgattctatcaaatgatgatgatgatgatgattttgacggttatgatcattttcatcatcatcatcattatcttgatcatcaatagtgttcattggattacaaagctcaactgcaaatggatcaaagatcggaacctgataaagtagttgttgatcatcttgatgatcataataattcaataatggaatatcatcatcatcataatgatcttctccttcattaccactcatttccggaacaaaaggcaatacttcttcatcttttttctttcctttattattgcttctgggggttctggcttttcgcgtgaaccccctaagccaagcaggggaagaagagtcattaacttcctcgcttattttgcttattcctttaaaggaagaagtttggaggcgaaccctttcgtgtctactagccaactggttagcactgtggacagatgcatcacaagattgacaaaggaaagcatcgtcagctgcacagaaccaccgagccctctttcgaagacaactgtcacaagcccgagctgtcttgcctgccatggcatttgcagtcttcttctcactaatcatttttacaaacaaatatatagagtactatatatatatatatatactattacaactacaaatatattatattttaggctaaaagtagtatagagagaatatttccatgcatgtagtagtagtagtagtgtagtgctagtatattaataagaagaaagaaaaatctctcaatatgggatatgaaatttttgagcttttaattatattatagacttgtttgaatttattataaaaggtttatattgaaataaccaacaaaagaaattggttcaattatttgagtgtggggactcatgagagtgaatgagaatgagactatttggagtgaggctcaactctctcttttttttcctagtgttatgtctttatatgcatgtgggacccacaaataggtcttatctaagtgttgattggttgaatggtgaaagtccatcttggtttctgatttctgattggttgggtgtctaatgaagaggattccttcttttgaataatccaaatgtgggcaattctctttttatttttgtaatttttgtaaattttttttatatttatatatatgtactaattggtctgaaaaaatttagtgtgagtaagacctttttgttgtaatgtatctttatttatcacttgttcaattattcccatttgacaatattagagagtacccttacataaaaatccattattatttatatgggtaacacatatagggcatgtatatattggtcccctcttactttgtttcacatgaaaggtcattctgccttggataataatgaccaatatggctttatagtatgtctaagaggaaattaataaagaagaaaaataatgtcatttttgtatgtatataaatgagaaatgctagtaaaaattattattagtgaatagtattctcttaagtgttattttgttattagtgtaattaagtattgagtctcaatataatttaatataaagaattgttaaaatgcaccagtagcactatctttagtgtcatactgctatttgtgtaattaagtatcgagtctcaatataatttaatatagaaaattgctaaaagacaatagtagcaccatcttcagtatcatactgctatttgtgtaacaaagtaattaagtctcaatataatttaatatagagaattgctaaaaggcatcaatagcacctttttcggtgtcatactgttatttgtgtaattaagtatcgaatctcatataattttaaaaaataatttttagaaaatattgttaactaatcgtgaagcgctacttatataaggtgctagatactactagtgtctaataacaatactagcttttaaaaaatatcgataattaatcttaaaacgtcacttttaaaaagtgttgaagatcactaatatttaataacaatactctgtatatttatatatatacaaatatataaggactagctcatgtgaaaggtttttcgttagttatctgaaacgaattctaggccataacatatattttatcatatatatgccgaattaatatgtacatgtaacatatatatatatataatttatatgcatatattttaatatatagagaaagagagtaaaaaaatgaatagatttgttggggccacaagttagatctagaacttttcctatatggggggccacttcctattatgtggtgatatatcaccttgcaattgcaattgacctcctttattagatttcaactcattatatttatatattggaaattttatttttatagtttttaaggtataaatttgtgaaaatatattttttatataaaaaaaataaaataataaagttatttcattaaaaattttataaaaaaaaaaaatatgaaggtaattagatcacattctttatctgatttttttttttcatatttttcaattttttcttacattttccttataaaataatttttttttgataaaacaaactattttgcacagatagtataaaaacttataaaatttataattaattttaaacatttttacaaattttaagaatttatatacagaaaatacattccttttatatttacatattatttttatattatattcttgttattttgttgttggttttcttattatttgtatagggaaatttgaaaaaatatgcatcaaataccttaatattttatccctaaactaatacataccaccattgaaaacatattaccactttatctaaaacccaaaaa

SEQ ID NO: 19554 - DNA, 5385 bp, Cannabis sativa
taatatacatgactatataaaaaatagactaaaaaaatttgtcaggtgccaaaacaaataggaatagatttatacatcacttttaaaaatatgtattgtaaattttttcaaaaataattctcaattttataaatataataatataaatattaattaaattatatataatatatatgcaatgtctacagtgcacggcatatataccgtgcactgtagacaaaacttcaaaatgctgcgtgaaatgcagtttccttggaccaatattcacgacatatataaaaatataccgtctccttgcacatgctttaagcactaatatttttgagcaattctctaattttattagcataataattgattaaagagtattgggtggtatgtacagttccaaaataaaatcccattaataattgggctgtatatttgtagctccatatgactatatgaatgtttgtacatcttataagaaagaaagaaaccaaaaaaactagtattgtgagatagaatactaagttctcgttttgttcttgtttatatctaaaaaaaaacacaagtaaaaacctgaccaattaagaaaaatttaaaggtttgatttttcctttttaaaaattattttatttaaggtaaacatcattttgaaatcattatatatcgcattttttaaaatagagaattaagttatcatgaaaatatagaaagttaagccactaagcttaagttagtggtgagagaggcatgaaaaaaagaaagaaatcataggtttaaactcaaaatgtttaagctattaagctaattaattatttattaaataccgctatactcaaaaaaaaaaaaaaaaatagaaaatctgatccctcactaaaatagtatttacctttttgtttctttgggttactataatattatatgataaaagataataggagttactcgaaaattacgtcttgaaaagaaataaccatatatataaatatataatttctttatatgatattttcttatataaataaaattttaaaaattataaattatacgtgagtcggtgattttaggaaaactcctattaaaaataattcttataaaaggatatatataattaacgttttcaataacaaatccttaaaaaaaaaaaagaaagttccaataaaaattgaagggtttgaaaaaaacaaccatggagacttcttcctttgatgaatgtcctcagtttttcaaagtttttgtgcctcgattttcttctgagtgtctggtacctctctctctctacaattacttctttcgaaaaagaaaaaaatctattgagaatcacaataagggaatgatatcatacgcaaatttatagggttttagtattttgtttgtttcccaataaatctctttttgtttgttttgcttgttttctttttcttttcgtaaaaacctttcatggttatgttaacagtccgctatttattactgataaacaattttgaatatgattaatgattttcgttctttatcatgtttaatatgtattgataattatatatatatttttagatgaacttgaactagtattttgattttgtttcaaaatttatttgcgggatttaattactgatgattgggtggtttttttatttttttttattaattttgatagcaaattcctccggcatttgttcggagatatctgaaagagtttgagaaagaagtaacattgaaagatgataatgggaagttgtggtgtatgggtttggtgattattgacaagtacgtgtattttgggatgaattgggagagctttgtgagaaaacattctcttgtttttggtgactttctcatttttaagttgcatggtcattcattgttctctgttaagctattcggcagagatggatgcaacaaatatattttgaataatgctaaagccaatactcttaacaacactactactgtcaagactgaagtacaagaagaagagcagtatcccccttatactgtcaaaaagcggtttaaacgatccacaaataaaacatcaggtactccttcttaatcccatccttttatttgtgccagtagattttcttgaatatatataatataatatttttatattcctctctaggtttaactaaactcactaatcaacataaaacaaataagaaagcagcttcaacacttgtcaaaaagcataagaggaaccctcgtttcaaatcgataattagtgactgtgaatctagtaaagcttgggtggtaagtcctaatttttaacctgtgtttgttttgccatgtttccggtctctttcatcttattacttatcattaatagattaattaatgttgtttttttttttcattacaacgattgcagtctattcctcgttcagtgttcaaaggggtcaaattgtgcccagaaatcgtgctttgtaatgagaataacaagaagtggcgtgtgaagtgcacattaaggaaagatggtcgagctgctttaactgttggttggtcagagtttcgaaaacagaacaatctgaaaccaaatgacacttgtgtatttgaactacttgtcgttggcaaccaacacaacaaatgcactgaaattaaagtgatgaagccctccaacactaaaccctgtgccaaacttaagatttagtactcacttttgatttcaaaattttgtaggttattgaccgactcgagtacttttactgtaaatcactttacttgttgtagttcagtttacactttagaataaaacaaaagtacaactgcattaaatttaggatcactatatgcatgtctagcgccttaagaataagaattagtcatagtttaacatgaatcacaaatccaaacattcaagagatgaaaaaaaaaactcaagcataatatttgtttaccgaggttttcggcaaccaattaattacagatgtataaagtatttaataaatgttagaagagaatttttacgtagttggagttttagtccacgattcattgtatgtatgagagtatttattatagaatttttcaaccgatccctctttgctatacatcattggaggtatttataggcttacaatggtagtaaaaggccaccattgtcgtgtttgtttgcactattctttgcacaatttctcaaaactaattttaggacataattgcctacttttatgatggattttgcgaaatcagtgaatgatgggttttaacccttaaacacatctgtaagtgtaaggtattagatgctcttccccatgccgcattaaatgcgtgtatagtgtggtgatcttcgggcgacgtgtcatatttttatggtcctcttgtatcattcttcgggtaggagtgagcaacggtcagtttggttagttttttacacaaaagaaatttgaaattcggttttttagttttcatggttataaatcgaaaactgaccgaccattatataaatgtaaaaaaaccaatcgttttaatcaaaccgagcttcttttttgaaaaaataaaattttaaatttcctataattatttggaaattaaaaaattaaagtattgtatcaaatatcatataaataaagaacaaaatttttttagttaaataaataatgtaaatttttttttaaaattttctcaaattatttgtgctactaattggtaatgagttatattaaaaactcgtattattttatgaatgtgtgtatataatatgtaaatacatcaaattataataaaatgaaataatgagtaattgagatttcaaataaaaaagataagaagtaaaactagtttagtaaaattgtatatattaaatatgtacaaaaataattatattatatatgtatagtttataatatatatgttcggtcggttttcgatttaatcggtcggtttgtcattaacactaaaaccaaccgtgcaaaggcgcttttaaccgaaggtggttttttcagtttttggtttttttggtgttcgaacggtcggtgtactcggtttggtcaattttttagattttttgctcacccctatcttcgggtagacttcactcgcggagaaaaaaagacaacagacactcgttgtccagctagaccctcccaaagatgactaatctgtcattattgcttttgaaattatagactccgggagtaattaaggtggtgtgtcttgtaacgtgggtcctactgccacttggcttcctcccaaaatgccacttcttctgggagaaattttaggcaatatatacctcccaagtcctttctttgcaattttgcaagatggaacttgcaatgtgcctcctagagtattgacgtcatgctgattgtgaccattttaaatgttgctcattattttcccttattttgatgaaagcgattcgatttcttaatcaattctgatgccattaattgcaggacgtcataggggtatttgagtagtgtaactatctttttgtgtttgtccatatgccaactgctcctcagtcgttggatcatgaggtttttaatctttgaattaggatcattggatgatccacgatccatgtcgccttagccggtgtataaaaacccattgttcttcttcttcaagacctttactctcatgtttctcaaaatcctcaatcaagtcaaaattctaggtagcccagattttcttttactctttcttcgacattgtcaagcttgatttataggcgcttcacaccacagctgtaactgctcgattttcttctatttgtaagtctactagccacaagaacttcgacttttccttgttttatttttgtaacttcatttggtgatatgcttgcatgaatgcgaagttggcactatatctgcaatttgggggaattttccccaggttgtctttagttttcatctttaggaattcccatgctagagctagtagaattctccctttttccttttttattctctgcaccattatttttcatcatggtacagttagcacacgatgcacaacatatgaaatttccctatttttgtatatgcgatctagatttagtaacaagtttgttgaattaacatcttaaatatgaatctctaaaataatgaaattaaatatataagagtttagaaaatcttacattgagtgcagcagaataatacgactccttccactcagatctccaacccttgttcttttctgtcgcagagtattattaagatctgaggctggattaggggtgagcaacggtcggttctgtctgttttttacacacaaaaaatcgaaaattcggttttcagtttttatggttataattcgaaaactgacagaacattatataaatgtaaaaaaatcggccattttaatccacggtttggtcggtttaaaccgaccaaaccgagcttcatttttttaaaaaaatataagtctttaaatttgctataattattt

SEQ ID NO: 19555 - DNA, 4260 bp, Cannabis sativa
  modified_base (923)..(926): a, c, t, g, unknown or other
aaaaaaaaaaaaaaacaaactcccatattggaaagaaagaaagaaacaataaaaatctcaccagcaagaagattgggaagaaacacaagatgatattcaccattgaagatttgtcaaagtaatgaccagtgtgctgaccactaattaaattaggctctaagatttaatcattctagtctctttgacgaaatctgatataacactagtattgtgtaaagataaactttgccattttctcacacccatttcagcctattaagcaaagataaaataaaacctgaatattttcaagttccaattatcatataagacaatgaaaacagttttagggacttgacattgattacagttgtatatataacagaaacaaatagtgtctggcattaaactttaatatgaagatataacagaaacaaaaatataagcacctttagttttctttgaaatagaagaagctttcctagactgaacatgcataacagagtttgcttctctgctactactagaacatatagtcagactctaatgtcacttttaagagtctcactacttcaacgattataactatttcaaaagctctgctgcaaaacaccaaaatcaaatgaaacttgacctgtatgaacttgaatttcatcacaaattcactttcttatgtcagaatgggaatgttttggtgtaaccacaaactcaccaataataagctgtttaatcaccaatattagtgattccaaaaaccatttcacagttacaacttactagcatgtgtaattaatcctaaataaaaatcccattcttcacacagctatgccaaccaataatcatggaaagaattatgatacatgtgtgtgaaaaagaaaaaaaaaatatatcaaatgtgttgtgccaaccaggaatcatggaaacaacatatatatatatatatnnnnatatatatatatatattagagaaactgtattgatggggtttgttccaaagagaaattcaaatcaatacacagacaaaaaaacatcagcacaagcatgaaatctttgcaaccataatgagaagaaaaaacagaagatagagcagagaaatgtatctcgtaaatatatatcttaatcattccccgaaagaagcatatataagagactgtgtagtatactatctctcatattgcctataaaataaaagaatatatagtaaattttgagtacatacctgagacgaaaaaaaactcaaatcaatttcattttgagaatggagttttgaagaagaagattaggaggagctttggacatgaacaaagtaggagaagagttgtaaagggaagagaaggcggaataggccaatagggtttctgaatttgaatttgaaaacactttggaaaaaagttaacgttcttttatggggcccacagttttcattttttatttttttcctcatgatgcgcttgtttccaattggaccacacagagatgtaattttttatttaacagtgctgtaatttgttgataataatataatcaaaatcaaattatatatttttattctattctcactgaccagaaagcataaaagtaccattgtataatcaaacgagaatggcccatttccattggtcagaatctgtgtttggttttagctgctcccattccagctcgacaaaaaattacaaaagaaaaaacaccatggtgagacaaatgaatgttgtgttccttttgattatttatgtggtaatgggaaactcgacggtggtgggctcgtacatagttatgcttcagtttccacttccgatttctttttgtcttttggttaggaagtttgtaatgattggaaatgtttatcttggctgtgattctttgtccatttcgtatttttgatgaaattgtttggctgctgagagaaatcgttttattatctatgtgtggtattttaccacaataccaatatgggtctaactttactatctcaattgtttcagcgtactatttttgacattgctatcatgttgtattcggaacttttcatttttgttttgacttgtttatggttatatgatttaaggtaaagaaattgacattaatcagaagagaaaagcttgataagaaaatgtgttcaattcctttcagaaaattattttccttgtgttttggattattataactgatccgtctcacttagttaatggataattttgtttaaatgtgagcttaatattctgagcgtgtgtaaagaatgttgggatttatccaacacgatctcgatcacttgcacacacaaacaaacacaacaacacagtgcagaacaagaactctagaactaacagtgaaaacatagtcaaaagcagaaaagaaacaaaacaccataattatagactatagaggttttaacttcctccaaatcagaaagtctaatcctcttgttctgaactccaatcacaaattcagtgttatgcgctaagatcaatccaagctcgagtttacatcgactaaggcagccatgaacaaagctccctcaatctctctcttctgaacaattctcagaactatctcactctcccagtacagagtttctctctcaagctcactcaacagaatctctctttctctctctaattcagtctaactaacaatgagcttagtagagctgaatatatactgagaagtaaaccaatgtaacagaattggttattacaagaagcaagaaaagaaaggtaacagaaaaataactgaaataaccccctttaaccactagcttaggtgcgtttggtaacactagtgcttgtgtatgttgatgacatcttaataaggagtgatcctactgctacgacaacattgatttcagaccttagcagacagttttctatttagcacttctttcctactttcttggtattgaagtcaactacagtaacaatggaatccaactatgtcaagccaagtatgctcgagaccttcttatcaaagctcaaatgctaggctgcaaaccttctccaactcctatgaccagtggactttgcttatcagctcaccaaggggaaccacttgctgatgttcagatgcaccgatctattgttggtgctctacagtagctaacaattaccagacctgagctttctttcagtgttaacaaggtctgtcagtcatggccggcccaaacattttggggccttgtgcaaaattttaaaattagattttttttttgaaaataaaaaaagaaaactgtatacattaaaactacaattctattactaatatttttttaagattcgttaataaattttcaattataaattttttatttatatatataatagggaaaaaaagaaaaaataggccttttcttttaaaaaataaaataaaattggaccttaaaaaaatgggagccttgtgcaatggcccaagctgcccaatgtttggactgaccctacggccagttcatgcaaaaacctccgtccacacattggcatgctgtaaaacgcatactaaggtacattagtggcacaataaattatggtcttcatcttacgaaaccgatttcttgtgaccttgttgccttctatgatgttgatcgggcatcagatctagatgacaggaattcaagttctggctttgcaatcttccttggatctaatctaatagcctggaaaagtaaaaagcaaaaagcaacagaccatctctcgatctagcactgaagcagagtatcgaagcgttgcaaatgatagcggagcttacttggctgtattatttgtgtaatttctttaccaaaatctatatatctatatatattgaggagtgacatgaaacggtaacacttgatcctctagaatttcctttaaataataatatttgtctttccttatttttcttatatttttaattttttattagattcattaatattaattatataaatatatatatttttattttttttaaaaaaaaaaaatatataattccaaatctattttcttaattttttttgtacatccttttttttaagttttttttttaaacccaaatttctcatctaatttttttttgtttttttttaaactcaaatatcacctctaaatcactttttttttaaaaaaaaaaaacacacattatttttttttttttttcaaaaatcacataattttaaaaatcataactcacatatttttccatcacttacttaactttatatatatatatggaacacttcttaatgggtactacccatgaatggttactaaacaaatttaattataaatattaattttaaaaatatcaaaccat

SEQ ID NO: 19556 - DNA, 5665 bp, Cannabis sativa
catctgctatgtctctttgtggcttttgtaatgcgagatgatcttctcgctatatataatgcgagacagtttatgttgatacattcattctgctcaggtggataaatattcctttcttgtttgtatattccgaggcatgcatatgtctcgttaatctcatatcaatagttattattcttgtctcgtttttgaccataaagccaacgagttttgaatattatatatttatcctttaaataataacaagttattcaatatgtatttaatgatatcgttatatcatttagaattgattcatattccatacattgaacatgtgtcaacttctgaagcgtagctgaatttcgagtatagcactttttttttattattattatttcattatttttttttttttgaaattcttttgttttgttgttggtaatatagtgtatcatgtgatgttatatgttttgtttacacttattgttggtgaacatagtttttttaccacttttaatggcacttgtatagataagttttatcctttaaattttaattgatatttttaatatagtgaatattctttttttaaggaattattattgattttgttgttttgtaagaagtttgaaaatcattcaaataaatacagtaaaattgatgataacaccagatttaatgttgaattgatcatcaaagctgagataagacttcttctcaatgctgtggaatttgattatttacatttagtctgtttttttctaggtatttctcttttgttaatgacctagtttccttgttagatgttttttttatagtttactccaattttcttgaggcgtccatatttcatgacatagtgaactatttgggttgattttttccaccacttcaattattatcaatgaaattgttcattgttaaaaaaaaaaatacattagaacaatcattaaacacaaatatatatcacccaatacacctacttacttaccaattagcagcctttaaaaatagaataactctactactatcaaataacaaaccaaaaaagagttgaagttggtggtggtggtggttggtttccgaatttgatcttttgactcgaaactccaacgcttttcttcgctccccatcatcttatcttgtccctgcaaaacaagtttgagcagtctatttagaaatggcagtccgcaatgttaacttaccataaaggataaacataaaccagcagaaacttaccataaaatatacttgcctatgctgtacctcttttctactactcctagtttcacaaggcccttttgctttagtttaaaactgtgtaagaaaccaaaaagtcatggttaaaaagctatagttttggaaccaatgagcaattattttgaccccaacttttcacacaggttaatgtttagccattggtaatgtaagcattttggtactaaagatcattcagtatttggaagagttgttttaaattaacaactccacttgttagagtgctagggaacctagaaatttaataaagtcacacaactttagctgggttaccaaacatcaatgccaacacctaaaagttttttttacagaagcttctatttcaaggtttagtaactagcaataaacatgacatttaatgaaaaaacacaatgagtaagaaaatcatcaagagcccggcagtaacatgtcaatttcggatctgtaaactgattaattcaggcaagacaattcattcagacttcaaattatattagtggcttgagaagcaatttgcagctgagttatggacaaaatagtaaagttgcacgattatatgaaatgtataccatctatcttcttccaactacaccagggtacaataaatcaaacagataaacctacaagcatactagtcaaactcctttcagaaacaaccaaccaccatttttgctttataaatatacaatgacccccaatgcacgaaaaaccacctcggtttaggaggaaagaatatcaacaaatagtcaaatagataaagattagaacgatattcatcagaaggtaaggaaacagagctgtgaatgcaccgcaccttattctaaaaatcgtggaattgctgcttctatggattctcaatggtggcattcataatccgcagtgatcttgatctttcctgctgcccactgcgtctccaaaaagccctcctccaccaaacttcgaaccctctttgtatgttcgggcaatcttcagcagagttcaagaatcggttaaaccaagcaagcaagatatcctgttgccaagctaatggaagggtaagaattgtattgctaagaccatcctcaatcaagtgtctatctagacctttagacgcccttctcatccacccaaaatcatcataaaatggcaccaaccatgttcgtaaaagcatacatcttacatccttggaagccaagagctgtccttttccaataccaacaaataggcgagctgtgactctgctaacctcaaacctatgaaccgcaggaactttagaatgcacttcagacaactcagtttgagatgcccatgttttcaagaaatcctcagcaatctgtctatcaatcaagatatcaagaatccagtgaagattatccgcttgccttgaaatctgattcacttctttgaggtctgaatccaccgcccgcataaaatgttggcgaagcaacgtcaagcaaccatcacaagcagaatacaaagactctttcctgagatcattttgtgaggcattctcgcgaagcatcttcaacactaatcctttcatctcccttctagctttctcatctttaccttcaagaaccacatgtaaaagtttgagaagcacctcctcattttcatttccctcttcggttccattagtaacttcaatagaaaccctctttagaacttcccctgccccaaccccttcaagccggagctccgacaatagcgaagccaccttctcttcttcatcctcagcccatggcgcagcttctaagtactccaaacaagataaaacaccagcatcgaacccaattgcagctgaaacctataaacaccacacacacacacacacatatacaatataaagcactaatcaccctgaaaacaagtaagtgcgtttattggctagctaccaattttattcaaagccacaaaacaagaacttctagataatgggttctctaccgtgtccccatttcaaaaatctttgtagtagttaatttagaacaagcttcacaatgacccaaatagtataattttcaaatttaaaatgtcccaacgccatatttatgaaactcttacagtaaactcaaaaagtctcgaacaaaaaaagaaataaaaaaaatacctttaaaatgccaagaactctaggaacatcatccttcatgagcttctttctcagatccttacagtacattaaccgcaaagtctcgatataaacctcaacgtcttcacagtcggcaatctcaacaatgtgaggtgtagacgacgtcgttcgctgctgtttcgcccacctgtctgaaagtttcaccgcgaagaaacgactgtgcgcaacgagaatctggcggtgaacattcatggtaatgctaagcccatctcgggagctcaacgtgagcttgatatcgctagaagactggtcgttgaactgattaccagggctcctacaccccaaaatctctgaaatccgctgcatcatcaaggcctgtctatcctggaccgtaatagtagtatggttcctatgattagccacagtgacgttgcttgattgtatctgggttctggggtggatatcaggctcgctcgccatcatttcgaaaagggtcgggctcgatcgggtcttatcagtaggcggcggtggcgacattgggttcaatagcccagccgtaagcaccgaattaaatttgctaaagctcgagggaaacgaatcgtggtgacccgagtagccgttcccatttacggaggtcgtcatacccgtgggggtaggtgaagcggtcgtgaaatccataaccggcgaaagactccccggcgataattggatcttaaatgtggaaggagacgaagacggcgacgacgaagaccttaccttgtgcactactggatttgattcctgaacagggatttcccgtaccctctggcgaggctgcgctggcggagatggcggcggtggaggaggaggaggatgatgagaagtggaaatagtgggttttgaagcagggcaacaccaagagttatccggagagactatagtgggcgccggtggatcaagcttccggcgatgatgattaaggtaatacccagttgagtttacagtgcttccgactccggagacggcggcggatgtggaaatggtggtttctcgacactttcggcgtttaggcctaatgggttgggcttgaactttgaggtgtgcagtcgtagtagtagaagtggtactagtggatgtagctgctgctgccatgaaatattttaataaaaataattggtgatatatatattgtcctttagctcaggtcattggcatttgagcttgagagagagaaagagagagagtgggaaaagtaaattaaaaatggcggaggaaacgagacaaggataggtgggttttagtgtttttgagtgaaagaatgaatgattatttcagtatttgttaaaaagacatggacaagctacacgatgagtctgagaaagcattaaatgcaagagagagacactaagaaagagaaagaatgagactttactttgttaattaagagaaaaactctactcctaaataccaaataaatatcatcatcatcatcatcaagttttaacctttgtttagatgagtgtgaaaggagaaatgacagacaggaaaagctgtaagaacaaagaggaagagagatgattttgaggtcttttttcttttcttttcttttttattgatcttcattcttcggatgatgtgggcatgagagcatgggtgctaatggattgggttgggtttcactttttattttgttttatttttaaatctttttaataatatgttttgatgtactccttcctttgatgtaagtgtctggaaagctttgaagttgtcacataatatttagaaaattatggataggacccaccaaccacaaggggtagttttgtttggtctatggattttaggcatgcaaagttcataattgttaaattgtctttgtaatgaatgaatatcaatacaggagtgagataccaaaagaaattgaacgtttttcttttcatttcctaaaattggagggaattagtggtcgtcttgtgtgtgtgttgtggttcactttttattgggcttctttacattttagtggctactctatcctaaaagaccaattctatgtcaaaatatttggttttattggaatttgatgatccctaggtgaagaacaaaacaagaaaggatatagtcaagtttggagtagaggttatgagaccattgaagtaaagggatcaatttcattgaaaaagaagaaaaaatcaaaataactctttttatgtcagcataaatgcataacgagtatcatttattgcaattttttcatataatctaatttattaatagtaattagaggtgggcatcatccaatccaatccaattaaatcgaaccgatccaattcaatccaattacaaaaagttggatattcaattataattggattggat

SEQ ID NO: 19557 - DNA, 5230 bp, Cannabis sativa
ttcctcctcccaaagacctgttgcatggtacttgatcaagtggtcagaattttttggtggttgggtagttctgagaaggagaggttcttggccctcatagattggaatttctttgtttaccttttaaacatggtggactaaattttaagaagtttgaagatgtgaatcttgcattagtgactcaaattgagtggaaactagctagtggcaaagactcgttgtggtgccaaatttttacagctaagtactggggcggagaagatcaatctttctggtcatcttcgattactaagaacgcctcctttggggccaaagggattatggcgacaagggatttttattagaggagaatcctattattgttgcaaacggtcgcgtgtggatatttggaattcgccatggattcccaggatgaattggaatcaatttagagttgtctttaattctgttattgcgccaatgaatgctcgtgtttcttctctcttatcagacaatggttgaatcctctagcaacgggtttctgatttgttcctagtgttgctagctccttaatccattgaatgtttgaactaataatcggttgccatcactagtgtcatccaagtcatactaaggtggattcttagaaaccctcccactatgatttagtaccatgataatacatctagaaacttcaatggtataaatcttcagttgtatcaatacaatagaggttgtgggactatcttatataatataagatgatggaataattttggattaaaacaaaaaatatctccgtttctttgatactttggttttgagattacatctatgtagtcaacatatagaaaaccaatatttgtgaaaacaaatactttctagtcttgatgaccatagtgtagtccacccccagtcactttagaatagccaacaaacatgcaaacttgagttagcagttctagattttcttaaagatatgattaaggtatctctagatttaataatggtgtatactaagtacttaaccattatctaattctaaggttttaccaagatcagacttagatgggacgacatttaaaatatcatttgctatctcaaggcatatccttagaagaactttgtcagttgcttgtaactaattataaacttaatcatttcatcaacattcttggaaatattaatgatcaaattgagctttggacttaaccgatcatggataatatcaagattaatatcgatgcaaccttgtttgagaaggatagctcatatggctttgggggtgtggcttgtgacaatcttgctcgacctatacacattaaggctgagcaccatggaggtctttacccagctgaagttgttgaagctataggtattaaagaagctctaaaatggatcaaaaacaagcagtggaaaggtgtagagattgaaactgatagtacgctcgttgtttaagctatttgttctagtaagctaatgtcttctatctttggtttgattattaatgattgtaaaattctttcttcctctctaccaaaatttcatttatgttttgttagataatcagcaaattgagttgctcactatgttgctaagcacactcgatatctatctagtcgtagcattcttgggcataatatcccctctgatcttcaaactctgttgtattcagaatactaattcaatgaagttgctatttcatttcaaaaaaaaataaaaataaataaataaacgtgtgttgctcatatagaaaggcagtcaaattgtattgactcaagattaagtggcgtatggttggagttaatggaatgaaataattttcattctatttatttatttggttgcatttaaagtattgaaatatcgttccaatagaataaatatttcattttgaattaaaagaaaagatcattccaatgcaaaataaaaaaaaattattttttttatcttttatacattttaaatttctcattctcattcctattatttccattcctcccaactaaaggtcacctaagagaaagctcaagttgttaaactcttcttaattttttaagtggacctaggtatttcttttgaaccaaatcaaacataaattttttgaagttcatcttaattaattcttttctcaatttgtttgcaaaattctagtgaacaaaattaagtgatatttgtaaaatggtaactgctctcaactcatctcaaatgttattggtttcaatttggatgacaaaaaaatgaaaatgacagtgtaactgagaataggaatagtccctttagccttagccaatgtggagcatgatttgcataccattattcaagctactcagaaagctctattttgatatttctaacaatgtctccaaagtaaatttgtactcttttcttttctctatttgatgtgtttattagtgtcttttaacactcaaaaatggaaaaagaatcattgaaattgggagagctagattatggtggctgtcaataatgacatcttaatcaaaatttgaaccatttatcatttaccaatctataccatattcatcaataggtgttaatctctgatttcttatatgtcattatcacacattacattacaagaccaataatgctatgaatcaatactcttactttggctttggctttggctttattataagataaaaatgccatcacttttgaggctcttttgaaaggtaggtctcccgcaacacagtgaacttggtaaggagcttggcataatctggccaattttctttaaccacagggatctcattcaaggccgccttccaagccgacaagcgcggcatggtgtgctcatcaatgaatttcaaacctgtaatctcttcaaaaacacttaccaagttggaaagccatcctaatgcaatatccaccattccgatttcttctccaccaaacaatttctttcctttgagctcttcatccaacaatttgagcttctctatcgacctcgaataggcttcctcttgctccttccctgctgcctttgtaaatgcatcccatactgctggcaaaacctgtgcacaattaaagtataattaaattcaatggaatgaatgatgagctcactacttgtgcactgcatatattgtttattgtagaaaatttgtgttgtaaatatttaaagtttaactctcatttgcagataaatcaagcagtctaaactaattaggggctttgccaaaaaatataattagacttttttgtatgaaaaaatttatatattttgtatatatataattatatataatagtgaaaatttaaaatatagtattttaaaaatataattagactttttttcttaataaaattttaaatgtagcatcttaaaaaattaattaagtatttttttttaaaaaaaagaataattatatctcttaataaataatattaaaaatataaatatagtatttttaaaaaaataaatttagaatcattttgttaaaggatattttggttgtgggggccttgggtgtgggcgcttactgtcctattctttaaataaatagctaaatttaatttttgacgataataaaatttaaattataattttaaaatttcggtagttaattatttgactattaaagttattatctattattttcttattaataagtttcaaaaatataatctacatattattactgttaaaaattaaaattagttgttaaaattaaataagtacgccgaaaattagtgtttattgtaagttaattacctcagtttcaccaaacttgatccaaaatcgagctatggctctgtgataagggtgttggggcagtagatgaggttgttgggtccaagtttcatcgatgtattcaagaatgacaagtgatacagagatgggtttggagttgtgtaaaaggacagggactttcttatgaatagggttgtagagaagaagggcatcacttttgttggacagatcttcatagattgtttggtattggatacccttcagttgcagagcccaaacaatcctcaaagcaaatggagttgaccatgttctgaacagcttcacttcatcaataatatcacccatctctcttccacttattatgcagaaatcttttgaatatttattctatacaatatcatggtttctttcaaatctgtcttttcttttctattatgctattggtcaatactgccgtctagcaattgtgaagatagatttttcttacttaccatcatccatgacgtataatgttatagcattgttattgggtatgcacttctagacatgtcgttttatgattggctagcgatactctctaaaagttattatattaaactatatgaaacttaatacttagaccaatagcgatattgacacataaaagaatattaggcaccactagtactctttaacattttttgttatgtaattattatttgattaaattccgttgtatttatactaatcaaaattaatgtgatgattaaaataaaaagcaaactaaactaaaaatttaaggaagcaacgattaggaaattaaaagagcattgttattagataccagtagtatacaatattttttaccgtatgacaccaaggagagtactaagtactagtagtaccttttagcaattctcaaatcaaaagtaggttgccaattttgatctactagtagtaccttttagcaattctcaaatcaaaaataggttgccaattttgatctagtcatctaaaattggtcagcaaaaactagccaccattttgaggggatgttagagcattttcaatagtaaaactttagaggatgcttaatgaggtggacatattatgtgccaaaatattgagatgctacattattggagagaaattaagccaaaaagttacgccaaaaagttattgtagctaaaaattaggatatatatattaaataataatgtgtgaaattataattatagtatttttaaaaagtattatacattggagtatttttaaaaataagagtgccaaaaataatgttgaagagagaaaataaaataataaaaaaaaacacaaagaaaaatacactaacagttaaacaagtaacatctcactcaagggagaatcgatcctatagttatattatatatatgttcgatttatttcatagggaaattttataatgtacttttaccgatacatctctatctgttctagtatccgaaataattttttagtcaaattttttttcatggtcatgtaaattatacttatttaagtcatcctgtaaaattt

SEQ ID NO: 19558 - DNA, 7410 bp, Cannabis sativa
ctatgcacttcaaatatggtacaaacaactctcttatgtacaactttccatctaggataacatactagggagcttgatagtgactttttcttgttgcagctttgtctgttggtaattctcctgaattcaagaatttgtagataggacccatccaagaggcgaactgatcaatgacacttacccttgatgttgtagtacttggagaaattagtagggcaatttgaacaacctcgtgtgccttgatttttagatctattgctagtttagccaacatatctgcgagagcattctagtcatggggaactgtcagataatgtacctttagaaattttggagcatgggtctgagatacgtgtgtagccatcttctcccccttttttggtactctcccgaggtctggttcaccactacctaggagtcactgtacacttcatttttatcagctccaatctccttggcaaagtgtaaactggtaatcatggtggcaggtgtcatgcgcctcctattgtgtacagtaaatattagagaatatggcattggacaaaaagtatgtcccttttggtagtgtacgcgctcccaggtctgacatagaggacaaactatctttggatgtctcttcagtcacccctttctagattaccccataatggtatctagataggctttgttgggcttttaatcttatgggcaagtcgcatttttgggaccgttaaggtccagttttattttgtttgtaaattggaggagctatgaccactgttatttgttattgaatataatataactcttatatggagccctaaaatgtcatttaatttttttctggtacagagattttatatatgtgaagaaatgggcacaaaagagaggctctatatatgattatgttcacaaaaatagactacagttggttttgttgatagtacaacttaagaaagtgattgattttactaaggtgaggccaacaatatattgtagtacagatcatgtgtccttttgttctattgctccactatggaatcaaattattataatatattaacctcaagtaaattttataaatattatttgatatgtaaataattatttatttcttatgacatagtttagatcgaaataaagaatcacaggtatatataagcttggaagttgatggatccttaaacataaataactgaaatgacaattgattaatgatgccatctaataataatacatttagatttggacaattacacagtaatttgttgtttcatgttctatttataatattctcaagtatcatataatagcttgttattattatttttttttattctactttatcgtaagctaggctacttgtgtagtcaattttgataaattaatatgatggtgatctaaattgggggctctttcaagaattgagattcttctctctctctctctctctttccccctgaatttatcatatgatgtatgtatatcttaattaaggacatgtgtaagaagctttgcctaagatatccctttcccaataataagattcttaactataacaacttttacagaatgtgaacatttattagacttaattgaaatttacatgagtaccacaatcatagcaaacagataaagataatcatgaagtttctactagtgtttattaattataactcataaataaagaaattgaaaggtacccatatgaacaaaatgatcatgatcattcactagatggaaaatttacaggtttattattagcaaggaagattctcatcatcataatcatcattaagtagctaggtgctttcataatttctttcccttaaaaattgaaggaaaaatcttgttaagtgtatgtccatttattttatttaattttcttcctctcttcctagctacctaattaaggccattttagatagtttagtaataatagacaaatttacattatcatcaaaagagaaaatgtaaagaatagtgacaaagaacaagtagatatatattattattgatgatgatcttctcttgtcacctctcattttcttcccatgtgattctccaaaactgttcctttcttattatctttcctcttcttctctatgatcagttccctgtaaaaataagataaaagtattctattctatatgagactctaaatagtaatatagataataattagtggaatgaatcaagtgagtacctattgatcttttgcaatgaagaacagcctcataaatagaggtatcagaatcacaagattttctatcagaaacagaataagctacacttattcttggagaggcagtctcagaagaataaactctgttctttccccttttattatcaacatgcacagctgctttagcactactactactccccttgttatgacctcgaattcttcgatacaaaggcctaagaaaactcaagtacttttgaattatcctccttgaaaccaatctcctacaccttctcaatgatgaacaatcagaagagatgatattattaggtggagcaacaacaccttgattattggaactatgagaatgcaatgagttgagaattgatgacatgttttcattagaggttgaggtggtcttcaaagggtcatgatgatcatcaagaaaaagtggcatgagataaccattggagatgagctcatcagcatgaacaaaagttaaaggagaaggtgatgttgggaaatcaaatttgaaatcttgagaataatttctaaagaatctctttgatggtggcattcttgggtccatctcaatgaaagaattagaagcatgatcatgatactcagatgcatcaagagatgtcctaagagagttgtctagagatggtacttttaggttaactaaccaactatatgaaaagctttcaatggaaacagattgagaagtttccatttcactaaaaataataactatactaattagttatagctatagtacacttttttacaagtttattgagtaatgaagaagaacaatataaagagaagaaggaataatatatacactgcaaggatgaatatgatatataatagcaaagcttattgaggcccccctcttattatatatggaacatatatctagtgtatttatatgtatatatgtaccttaatatcctctctctctttctctctctctatctatatctctatctctctccaacaattgtgtatgtggttgtctggcaagagacactgaaatttattataattgaaaaaagggaaaaagataaaagaaacataaattgctcatgagtccccacataaccatccataatgtactattgcatcactaatttattttaccccacttcaattctttttaaacatgtttttttaaaagaaatatgtaaatagtttttttttttatttgaattattctatatactatttttttaactttttttttaatttacggtttgggtttttaaagtgatttttccagtagttttcatgtgggttctatacgattttttgttgcgatttagattgcagcgctagagtttcaatgtagaattctgtaaaaatgtaaaaaaaaaactgttttgaaatatcaaaataaaaaagccaatattttttttttatttacttacattaattatatatgtaattgatgactttcatcaattgggtattatcaaaattaatttcccctttaagacaaaagaagaaaaagagaaatatattcagtttgaactacaaaacaagttcatgcattactctcttttcttttctttactttttttttaaactaaattaaaaaggtttaaatgtgaaataatattttgtgatcatcgtaccatatttggaaagtagattatgacaaaaattgtgtttatgggtgccatgttcatgcatgttctattgtccctctaacttagttaggagagaaatgagaattgattcaattcttacaccaatggagaatgtcctttcttttttttcttttcataaagctatttgaatataatatcatacgcaattatgctgatttatgcttagcttgctctattttgtctttatctttttaatgtgattttttgtttttcaattattattattattatcatcaaaactttttggttttgggtatagattaattagtcagtttgagaagatgatttcaccagtctgatgcctacatcttaacaactacggcacaaagctgaacctaacaaagtatatatatgtatagcaatcattattatgtgaccaaaatgttctcttaattaattaaactacacataaaaattaatgcccaaagtaagtgtatatatatataatttataagaagagaaaaaccatgtaagctagtggcttaagtatcagaataagacatatattaattagaagcatatatatggcatatgggaatataaatatttaatagtgttacgtacttttatagggttgggttggactttaaagtgttgataactctcttagtctaattcaaaagaataattgaaaccatatttgacataagcattaattttttatatagttaagttgagagctgccaaattagtggggagcaaaatcatgcataaatattgggcttaagccttacacaattgtgtgtgtcgacatcacatttccctatatttatttttatttattttgaatttattaattattaaatatgatatgtctactcaaattatataccaaaatatttcacgcattactagttctataggggttcatgtttggacaaatgcgtgtcctagatttattagtgctcctgtaacagctgatttgagttgattaataacatactttctttcaaaaaaaaaaatatatatttcacgtattacggttttataaataactatttccatgaaatagaatgtgataaatagtattttattacatatatatgggaaatttaattttatatgtatgcattaggttaaaaataatacattaaacctatgttaagcactgaacaatatatgtattttattaacatctaagtaattgttgccaaaatactcctcccataaattaccatcattatcccatttactttatctcttttttcctcacaaaatcacactaatatcttgctataaaagtaaagatttaagctactctaagctcaaatcgaaggtgaattggaggtgggacaatttttttgagcaaccacgggaagcattgtttcgagcaatgggtaaataatatatatatatatatatatatttttggtttctttttgttattggttgatatatttgttttacaatgttatttagatgttcgatttgtacgttgttgattttttttgctgattttttatgtgaattgttgttgtttgaaatttttgcgtttttctaatttctaggttatttaaattaagctcgatggtgttcgatattagtatgatagtagtccaaaagttttttaatttagaggttaggagtgatgtcccaatgggggtctgataggaggacaatagaatcccgatatttttaggtgtgtagagtcaagaatagtgtcccgatcttgtccgatggtagacgataggagcctaatagttagccttgtcttaggctaatggttgtgcatgtgatggtggtacgatagtatatcgttttaaaatatttttatttgaggacgatttagccatattgtgttcgatattagatttttttgatattacacatgctcggtaattatgttgccttcatgtgattttttttttttttgttttttaattatattttttctggaaatgatagggtcaattgtgttcgtgttctttgtgtataatggtttttgggagtgtgagggtagagatcgggcttttaatggagcagagcatttgacatttgcgattaataagaacataacctactcacaactggttgaacttttgtacgaggagttggtggttgagaaaatgtagtatgacttgaaactagaaatgactttggtgaagaagaatgtttgtgtcgatcttagtcgtccaccaaatactgttaaggatactcatagtgaggttgacacttaagttccaaaaacaaatctggaggtgttgctagtcgatgtgtcacctgaattaaacaatatcatgtcgacagttgaccatgtagcacaaatatcctttcatgatgagtttagtgatggtccagaccgtgagacttattttgatggaaatgatgatgtaagagagaaccaagagacaaaggtccttattgtagctttaaatttgaatctaccatcgtaccaaatacccaggcaaacaacacgtagaagaagaccttgtagagaagattgtctaacacctagtactagtagtagtcgtccaaataaaaccagtaatgctagaggaactaatatgatactagaggaactaataatgttagaggaactaggaaaaaaataaaatggatggtgacgggattgggacgagactgagggagggttgtgggtaatctcgagtgttcgacgatgggttaaggtcagtgcgattggatttcagtggtggagttaggtgagaaccaacaagtggaaaagagagtgaaggcagaaagtattaaaataacagaataatttaatggatacataaaaattggtcgatctgcattagtaatattaaataattttagtttagattattaattttaacttatacatgtaaagcaaaagaaagaagagcttgaattttgaagagagaaaaaagaggaagcgaaagacttaatttcattgattaaaaaaaataaagcttatatacaagtttattacaagaaagaaactgttagtaaacagttgtaacagaaagaagtttaactaactgtaactaacacctaactaacaactaagtgacagcagaggtgttaacatctcccctcaaacgaaaaaggggagtaagccatttgaacactactacaaaatagacttttggtgtcggttcaagggatagtttttttaaaaaattgacactaaagactacccaaactctttggtctcggtttataactgacacctataataactttaagtgtcggtttgtaaaccgacactaaaagtataactgagaccaaaagtttcttttttaaaaaaatatacatacaaattgagtataagtgtcgttttataaccgagaccaaatgatcttttggtctcgattataaaccgacacttataggaaaatttaaaaaaaagtttcataataaaaaaataattaaaaaagggtatagaaacaacatttggaaaccctaattgtagatccctctcttcccttctcactgtctctgaataccctctttctctcatctcgctatgctccttgggggcagccatgcccaggcctaactggcctcgtcccagccacgtgctcccgaaacgaccaccaccatggtggtctgcaaaccccagaaaatcccactcccactcccaatctctct

SEQ ID NO: 19559 - DNA, 5845 bp, Cannabis sativa
  modified_base (596)..(599): a, c, t, g, unknown or other
gcatgctcatactcagggctaccaaagtaatttttggctgaagctgttgttacagattgttatttgattaacaaaggcccttcatctggcattgattttaaaactccaacggatgtctggataggaaactcagctagctataatcacttgaggatttttatgctcacacaaggcaagacaagcttgaaccaagagcaaaaaggtgtatctttctagggtacctcgagggtttaagggttacaagctgtggaacattgaagattagaaaaatgtcatcagtaaagatgtgatttttgatgagtacattgtacatggatcttaatgcttgaggagaaaaactcaacacaactagtaagaaaccaccagaaagaattcaatttgaggtggagttggacaaaagaaatgagggtaatttggaaattgatgcaaaaccaaaaatggaacttgaagaggagaatgaagctgatgaaatgcatactgttaacgcagattttcgtaaactatattaaagcctaaatcgtgatggatttgcgcagaaaataaaagcaataaaggaaaaaataagaacactaagtttttttacgtggttttgcagnnnnaattctgcatagtccacgagtgtatcttattagatatttctgatacaattcttaggactttttctcttaaggatttttcgtaccttttttagtgtgtcgtgctcctatttatagttacataggaggacagttaattacaaatcagactgatattttacaacaataatcccctgaaattgtgggatttgattacaccccacgtaaaataaatacgcggttattaattttgaaaatcacacacagctgtgataagtccgcttttactgggtcaatgcaaacatgtattaaatacgttgtaaagcatatcgttctgggacatctcgttgaacattagcaaataactaacccttggtaggtagcggcgagcagctagagagctttcttttttttctcatgtctttccgaggttgataatgtaaatgcaattggatgagttcactaaaatgtgtttggaaaaaatctattattgagatgattatcaggttttatgacctctaaggaaaaaatctattttgacaataattaaatagcagcaagaggcacatacatttgcaaccaatttcatttcatagttgtttattagtttctcattccattattattattgttattatttgcataaattatttctttaagacctgcattgattcttgaagatcatttttacagaaatcaaatagcgaggaagcgttggaactcttgaagatgtctttggactcttgtaaacaattgcccttatctttggtcatgttttatgatgaactgacagagctgatggactctgaagctcttcatccaaccattacagaatggtcagttcattgtaacaaccaaaggctggcagtgttatctatatgcttgttcgcagtttggacagatattaacaatcacactttgcttggataatagggttgggaaacatgtaggtgaatttgaatctatgtatctatctgatcttgatggtggacagttgcctaataaggagacttattgtggtttagaaggtgagtgaaatcatgatacttgtcttcctgctatctgacagtatgttaatctccatcctacattttgttttgtatgggtgttaattgaatttccttgatcttttgtaggggaactctggatgaacttggatggtgatatttcacctatttgtcttaacatattgccattggtttctgcatccttgcagtaagtcattttttatactttatagtatactgtatcatgttttgctctgcacttggttttgttgaagcttgaaagtttcattgcatgcaggtctacatctttacaagtccttcctgcaaacttccttttactgtctactgtaagtgctgcccctttggcattgtgtataaattacagttatgtgattgcctttgatttgctgtcattttttagattgagaggttgacaaatcaaggatctcttggaggaattgacgcactacttggctgtcccttgcatcttccatcctcaaaggttggactaaacgcaaggcattcttaataatattaacaatgacagctaatttttctttgtggctcattgttttgagtgtattttttttttcaaaaaaaaaaaaataaaaaaatacacacacagtgcttttacttttgctacattgcctgaacactctcattagtcagtcttatcttgtagcttgtcaatgcaattggatgagttcactaaaatgtgtttggattatgcactttccagtactttcttggaactggctggaagtctctgtctggtaaacaaaaacagactgtttgtctctccctctattatgcagcaaactggatacgtgaattagtaagctcttacgatttagaatggcgtcatgatttaggtggacttctattgaacttttatcatatagatgatctattgtctccttgcttcaatgtagctcaatgctttttgtacacaaattgctggaggatttgaatttactagccagactacaaaagaggacataattacaaagctactgaagcgattgaggaatcttgtgtatgctttttcattctctcaattgttttaagaaaattttgtaaatatgttttttttttctttcacagtatatgctatactctcatgacagatgtgttacataagctaagatccgtttacaagatgggttattgatgaattccaaaataattctggaccagtttattttattcacatatttattttatgcattagtttgcctactttttcacttagcttactgatgaaatttgtctaaaaacgtggaaatcttgaaacagccttcactttgtttagggaattaaatattgcatactagcataagaatactaataacaatacagtagattaggcaatgtagagcttaatattatttacaagattggttcttatcacgtgattcaaaatctgtttggaattcttttatacatcttttaacacttgcgttatgcctcttagtttggtttattttcttcaataagctgatgaaaagtagtctaaacttgtagatttcttgagggattattgaaccattatattggtcgttacactttatctctgcctgagctccatatttacttggatcactctggctcttcactgttaaatccacaatcacaccaagtaaagcatgtggaaaagaaaagggagcataataaaactaatgttgaaattccttctgacaagaagaggacacgtaagaatctctcaaaagcatgcacaagttcagattcaaatgagaaactacggcaacccactattattgatgtttataggaaagcaggagctataacaagccaagatatgccaaatgaaacttcttctggtttatcttctaaagagaggtcaactgagtcatcagagcagcgacctcatgactctaatgagcctgttgttgtagacatttcttcagttgcaaaggctcttgaaggccagcgatccaaattcaggtgtctcctggttcaatgcttttccattttgactctttcaaaggtatgcatgcttgtgcagttgtgcagtactctctaaagtctaaactacaaaaataaccatatttgctctgtttggtgcatagcattttaaataattcatttgttgagatacaaactgtaaatcttaactttgcaaataactttgtgtttttcttctagatatcaaaaataaggttattattatttaacatactgtattaatgtttatagtgatgagttttaaaatttattttttccgaaataacttttgagaattgaagctgtaagtattgacacttagtttgatatataaaataagaaaaataagtcgggtttagagcttgtgaccctaacttgttagggaggctttaagctcgtttcattaagctgtaggtattgcgagaccttattaagtggttttggaagctttcaggacctatctcgtgttggtagataagattcaagttttgcattattgttgttagttgtttctcttatgaaaagcaatgatttttgagttgaagattatggaatttatttaatgtttcttttctgatgcagggtcaagattcttgttgctctgatcccgctgctgaggtaactactaattggacagggatatggttgttgttgatctaatttttattgttaagaaaacattgcaaagttaaagaactaactcttttaatcttcaatggatgctagttaccactatatctgtaccttctgcgtgatcttcattacaagctggattacttctcccccagaaaactattctccggtagagtttttagtgctccagttgggttcaccaggatgacaatcagtcaatttttgagcaaaattacaccagtgtttccatttcttaagagacatttggatagtgcgatttgtctacttaaagaaggtaggcaaattaaattatgatgactggacaacgatcacagtatatatatccttgatcattgaacatttcttctgtaggtgatgaaaactgtcaagaacattggaagactcaatttacttttgctgggaacccagatattccaattttcgaactttcaaaatcttcaatgtctactatggtattcaaagaaatacttcattgttttcgtgaggtgaaatttcttcctttcactctaagctgatattgatcagcatgtccagctaattgagacgcccaatctttaacacccagaactaacaaccaaaattgttcattattacagataataaacttgccagatatactgatgaataaagaaattcttttataccttcttgaagccttccagcttggcaagataccagaacatttcttttcgagcatgcaattgacacttctccctgggacagctgaatacttatatgttggggcttatttatttgttgaaagtgtcctcgacgaaggtttattattttgctttgctgcatagtatgtttcatggagcttcttcattctcttacattgaagtgttgaaccgcctttccaatgacatctgatttgtgcagcatgctgtttctcctttatgctagcctccgagtctattcttactctagaattaattgttacctcattccggaaattccttgataagctcagggaggaaaatggtaatcaaatgcattcaggaatccagggggcacttgatttattaaggaccaaacttggcagttctgctgagaagcttttgaagcataattgggagagtgaacatcttgagaacggttggaagaacaaagtaataccattttgttataatgtttgtgcctttttacatttttctttctttctttctgctaaacacttctgattcaactaccaagtgatggagacaatagaggtgttattcatgacctttacactgtttttagggtgaaatggtacaaaagatacttcacatttacttggaaagtagcgattccacttctgctctgctagatgagatagctcaatctattttaacacaggtgcattgatttttaattttttctttctttaatttgttgtttactgaattgattacttagtatttaaatctatctgtttcttgtcaatgcgagtatttctcaatattacgaagctgtttgacaataggtacttggttactttctttacttttgacaatatagttccttgtagtaggttcctgagtgtgggctagaatgaaaaagttatccaattctgggtttaaagatgacagttgcctcaggttctgaagagacactttcaattttcagaggactaagaattaatttgtattcaacccatgggtt

SEQ ID NO: 19560 - DNA, 6278 bp, Cannabis sativa
aaattatgctggctttctcaaaaagaattttaaaaaaataacactgggagaaaagaaaactctttcagcaaaaacttttctaattcaaacaagcttcctcaacaaaaagagataaaaggaagagttattaaatgttgagaatgtgaaggttatggtcacattcaagccaaatgtgcaaacaccttgaagaagaagaaggttattgctgcaacttggagtgataatgaagaagattaagtgagtgatgagtctaaagaagataagttggttatagcgttcatggctatagaagctatgtcaaagggatctcatggtgataagtctttttctgatcatttggattcaattgttgtagtaaaaataaaccttatgaagagatgttcgctcaatggagctacatggctaagagatttaaagagctacaagatctaaacaaggctcttgatgacagtaagattgaacttgaagagaaactgaagcgaatgacaatagagctatgctctaaagatagtgaaatataaaagttgactatcgcacttgtaagagccaagcagtctttgttttcatacctctgggcactactgccttgaatcaaacccttcataatcagaagctctatggtgataggacttcaattcgatataataagatactttataaccaagatcaagacttgtcgattgatggaactaacacatcctctttagacaaaaaggtgaagtttgtgtcttctccagtgagtaaaagttgaatctgagaagaaagctaaaaggaaatatctttaaaagtggaagatactaccagacaaccagaacgctttgttcctatttgtcacttttgcaacaaaagaggtcatatcagagctatatgctataaactcaaaatatatctaaccaacatcataaataataaaacaacttctggtaagttctctcttgcttttcaacaagattcatctaagacatggaaacccaaggttgccaatcttgccttgcgagctcacacttcattattttctatgaaggagaatcagtggtactttgatagtggtttctcacgacatatgattggttccaaagaatccataaacaattttcaaaattcaaaagaagggtttatgacatttagtgacagtaataaagggtagatcatgggacaaggggatttgaatctctcaagtgcatttccattgactggagttctgtatgttaaaggactgaaagcaaatttgattaatattagtgagttgtgtgatactaattatgatgttcaattcactaagtctcaatgtctagtttcatcggatgggaattcagttcttacaggtaacaaaacttcaaatcattgctaggttttgtgtagccaaatgaaatgtcacaaggtttttctggaaaaacctgatttgtggcattatacttgggtaacttgaattatagagacttgagaaaggattgttactgtaaaagcagttcgtggtgtccgtaagtttaaattatgagaaacttgactatgtggatcgtgtcaacaaggaaagcaagtaaagtcctaccattctcctataaatgctcttcttacatcaagggtattggaacttcttcatattgatttgatgggacctatgcaaatagctagtatttctagcagatgatatgtcatggtgtgtgtggatgacttctcaagatttacttgggtgacttttctcaaaggaaagtctcatacttttggtgctttctctactctttgtttgaagttacaaactgaaaaaggatgtcatgattgggaaagtgtatcaaattagaggttaccatgggaaggaaattgagaatgctatatttgcttaattttgtgaacaaatggggatttgtcattagttttttgctcccaatgactctcaacaaaatgggcttgtggaaactaaaaatagaactcttcaagagatggctagagttatgctatgtgccaaaggtgttgcttcttggttttaggctgaattagtgaatactacttgctacatatgcaatccttacttaagtcatctgcatatttttggttgtttttgctacatactaaatgattgtgatcatgttggaaaatttgatgcacaaggtgatgaagagatatttctaggttactcttgaaagagtcgtgcatactgagtatataacaaaagaacttccatggtgatggagtccatgaatgtgaaatttgatgaactagaagtatgtaatgttgtcactattaatgatgatgaatcttttagtcccacttttcaaatgatcccttctgtgacaaatcctcaagaagctcctaaattatcaagtgctaactcattcggagagcagtctgtctcatctgattgtgtagtaagcccttttatagatgttgcagatactgctgaaccatctagtgtctctacagatggtcaagatacaaatagattgtttgattattcatctcatgctcgatagtataagaaagggcctccatcatgggtacaaaaggctcatcctcctacagttgtgatcagggatccctatgctagattggtgatggcaaggtattgaatgtcatagctttcgcttgttatctttctctagttgaacatcaaaatgtcaccgaggctcttctatatgaattttggaacaatgctatgcaagataagatgggtgaattcaagagaaacaaggtttagatcttggtccctaaaccagatggagtaaatatcattggtaatatgtgaatttttaagaacaaatcttataagtttggaattgtggtaaagaacaaggctcagcttgtggcacaaagatataatcaacttgagtgagtgggttttgaggaaacctttgcactagttgctagacatgaatcaacttgattactactagtagtggcttgttctttgaagctcaaattacactagatggatgtgaaaagtacttttcttaatggttttctccaagaagaagtatatgtgaaacaatcccaagcatttgacgacttcaagtatcctaatcacgtttacaaacttggaaaggcattgtatggaatcaagtaagctcaaagatcatggtaggacaggttaacatcatttctcatttcccatgaatttgtgcgaggtactgctgataatatattgtttcttaagtatttgaatccttgtatttctgtttcccaaatttattttgatgacattatcttttggtatacatgtgaaagggaagttaccaaatttgttaacctcatcacaagttagtttgaaataagtcttataggagatcttaccttcttcctaggattacaagtttaacaaactaactagggaatttttattttacaaatagaatatattaaaaaaaatgcttgagaaatttggcttagatcaaactaaaaatgctcctacccctttaagcaccacaactagactatgtaaagacgactctgttgagtcagttgatcaaaccatgtgtaggggcatgatagggagttttctttaccttacaactagttgccctgatatatattttagtgttagtctatgtgctcggtacgaagccaatcccatttatctactgtgaaacgtatctttgagtatcttgcgggtacttttgagtttttcttatggtacttaagagatactaacatgtctattattagtttcaatgattcagactgggttggcagtctagacgacagaaaaagcaccactgaagggttttttttatcttggaaataacctttttcatgggtgagtaagaaataaaattccatttcactttccacttctaaagctaagtatattgttgccgggagctgttgtactcatctcatctggctaaacaaaatggtaactaattatggattcccataggactctttggttcttttctgtgatagcacaagtgatattaacatgttaacaaatctagtccaacactcttacactaaacacattgacatacaatatcattttttttagggagatggtggaatctaaactattaactatttctcatgtaactacaagtgctaaacttgctgaactatttacaaaagcacttgatgcccacacttttgctcatctaaaaaattctaatggtgtgtgcaccatctatcctagacaaagtagcatatggcaatcatctcaactatgtatgtggctgtatttaacctttcaattgttgtttgttttttctttgggtcagatcacatatgaattcatttttagtgatgaacgttttatcgtctcaattgaaaaggctaccttccatggatgtaatgggaagatctacccttatgccaatatgtgactcgagaagttttctccttttcttgtcactcattgagaaaaattcataggatgatggctacatctctgtgggggtgtgaaagccaaagttggttggaaaaattcattgagtgtagatatcattcaaaagacatttaaaaaaaaaaatgaatgttcattggctattctcttggcctttgttatagagagatgagtgtgttgccttgattaatctcttggtggctcacacaaggacacttcacacactaataaggttaaagaaactacaatttcttcatgtgtttacatcctaaatctagttaggatgccttccatgtgtgtttgtgtgtgggtctagctgagctttagtttccagtatcctaagttgtttgtttctttcattttttttttaaaaaaaaaaatagtaataaaaatctgattccattgtcgatttttttacaatgtgtttggttggggtgttttttgttggatattgttgttttggattttttttttcatgttaattgtgcttggttttccattaattggatcgaagggtagttatgtcatttatcccgtgttgggattatactaagatcaaatttttatttttgttttcattttactttttattctttgggaagtaaattacacacctactctcgacactgttcatcttcttcctttggtagtttttgggtgtgtttcttgtgtcatgatatgggtaaaaaatgtgccgcaaggtcaaagagtcatcctttggtgggggatcatcgttagtttccaaggttgtcagccctagctcctctccggttctctccggtactgttccacctttgtcagacccaggtttgtccttaccccttctggtttagctaggcattttacttattcaatgtcagttcctagttttgaaccattatctccaccaatgtccccaccaaatccttccatatctccatccaaagaccagttgtcccaagttttcatttaaacgtatgaaagtctccttagccagcaagaagctaaggtttttcttcagcaattcagagcttaattaacatcattgttgaggtctcagtcctaggtaagcttcctagctcatccttttgtggtttctttagttttaagttaatttctcttgcacgattttgtgaaataggaatctgtttaatggtgttttaagtttcaggggttttttgtgtttttgttacatgaattctctctattatgatgttattatgtgatctggaagtttttatgaagtttggggtcgatttgaggtttactagttatctgctaattctcatgtttaaactatgttgtcattacaaaacagctttgctccaaaaccttcaagagctcactctatgagactaggtctcagaatggcatcaccaaaaccaagccttacttggcaattaagcacttcctcccaggatctctgcaaactacttaaccaaggccaatcaagtctgcactcaaaaaccctcactagtttgctactatgaaagttgagtttaatgctttaactaaacaaggtacctggactcttgttccttatgatccatatatgaatgtcattgtcgacaagtcggtgcacaaaataaaattaaatctcgattgtaaattagacagcttcaagttaaggtttgtaccaaaggttatcttcaaacacaaggaatagactatgaggacactttcaatcctattgttaaacgaaccacagtcaaagttgtccttacattagttgtctctgctaactggcctgaaaaacaactagatgttagtaatggggcctttctcaatagcactctttaagagactgtgtatatgtatcaatctcaagggtttgttgatcttgagaagcctaatcatgtttgtctactacagaaggtgtcaagccctgtccaatagggacgccacgtttgtgtgtttttataaaattcttatttaaatactatagaattataccaaaagtgtgggtaat

SEQ ID NO: 19561 - DNA, 2955 bp, Cannabis sativa
aaaaaaaaaaaaaaaaaaccgaaatttttgaagaactaaattaaaatatctttttcaaaaaacaaaattaaaatatatgttaatatttataaattatacaaaaatatagaataatttgatttaatataaaatctataattagaaacacagttttggggacaattttaaattctaaaaagttaaagaaacaaaatagtgtatttaattttcactttataaataaatgataaaattatgtattttagaaaacaaattctaatccttttcaaaaaaaaaaacaatctaattttaattttcctaacaaaactaccaaattcctttattattagaactttaattttattattttgttgaaaaaaagggctatttcaccaatgtgtttaatggttgacatttttttctttaaaaaataataataaatatcatatttatagaaaaataaaatcataagaaaaagattatgaaacctcaatcacaataattagaatcacaattacattaaaaataagtgaaaaaagatgggtataggaattgaaatcaatgaagataatctagaaaattaattattttggatgtaaattaatattaaattaagaaggaatgacacctagattttcttgcaaaaacaagaaagttaaccaagaaaatataatcaccaatgaaatatatttaaatataatattattatatatctaatcctagtcattgggtcaatgcatgtgagtattatttttaattatttagagaaaatgttacaaaataatatgtatatacttagtgagttagtggtgtggagcaaaaacaattatgtattaaaataaattaattaacaaagaaaattttggactattataattgtaattcaaagttatattataattattcttgacaaaattcaacttttgaaaattatatattagttctcattattataagaaaattgaacacatcatatttgataaatacttaaaagaaaagtatgagctaactaccaaaatgactttaattataaaactaagcataatttcaaagatcaaaaattgcattgtagaattgtctaaatatatgcatatttttaaataaatatatgtttgtggtcataagttaattatctaaaatcatggaatcatttggaaatggtcttgagttgagaaaaatggatcattttcccttattaatgctatatacaaaaattaaagggaaattcttataaatatctattaagacaaagtttataaaattacgaatttacagtttttttaatattttatgaattttttttatataaaaatataaacgattgttattctgttgttttcatgcttcagttgcatgaaagaagaaaatagcgtaaaaataatactattttataaaagaaatataagtaaattctgtttgtaaaaaacataattcgtaaaaaaaaaaaaattagtttaaagtatgtgggaaaatcctaaaactaaaattatatttagtaggatcttttataaatatttatattagtttgtttggttacaatctctttttgtttagtatatatttggtattagttataaaaattgcatatttataaataaaataaatgaattaatttttttatatttgtaaaaatgatagaaacaaacttttttattattatttattttgttattattgaattgtagttgtaggaacaaaattgaaatgaacaactctcaaagtgggtaagtaaaaacatatataacaactaattaatcatacataaagttaaaatgaaaaatgtttaggtgtgacaaagatatccacttggctccaccactacacatataatcactacaaaataaaaaagaaaataaaaaaacaagattgatatctttttttttaacactttattgactttgaaactacttaatctatatagctattaaaatctagagcaattgaaagaaacaatattagtgaattttgaaaagttgaaagtggtactaaaaaaataaatgaatttcaactctttttcaactctactaatgcaaaatggttcatttttctcaccctaatactacttgttttcttagatcttaatatcttattaatattatttggatatctttgttagaagacttttaagtatgattgaatgtgactacctggccaaacctagtatttggcatatatagaataaatgttagcaatggcggactcgagaataaacttgaggaaaggcgtgatttttatttttattttttaaaaataatatgatatgtaggaaaaattattagaagttttcgagtatgaatttgaactatatataatctcgtgaacatatagaaataaacttaatcattaagtcaaaactaattctttgataatatttatcattttttcgagagaacgaatgccgacacccaagactctttgtggattcgcccctagctagagttagtgtggtgtgattggtaaaggtatcatggatagagatgatacgagtagtagtacacatgattggattttgcgagctttgagttgttagattcaggttttacatagttggatttgaaaaaaatgagataatagggtttttattcaaattttatgagtttcagacaaatttaagcgtttcatctaaaataataatatagaaagatagtttatgcaaaacacattctaaaattataaaaacaagatcaatagcaacatcgcattctaaaatcacaccaaataaattatcatcactatactattgaataaatacctaacatatttataacgtacttaggtaattatttgtggataaaatattaattcatgtgtttttttaggattgttaataaaagtattcattaagaaagacatgggtgaccaaataaagactttcatggcttttttttttacattattattaccacctaatatcatcatcatcttatatatgtttttgttgtattcctatggcatcactatcatcacctacttctt

SEQ ID NO: 19562 - DNA, 4532 bp, Cannabis sativa
ctgttcaagaaaaccacaagatgataatatcggaagttgtgatgaagctatttcaagctacccttataacgtgtttgaccatcaatatctcaaatacactagcaacgatcaccccaaatcccaactgccccatgaactgcggcaacgttagcatcccatttccattcggaatcggcccagattgttctattaacaaatggttcgaaatcgtctgcaaaaacgtctatggttctcagacacctttcctcaaacaggtaacagacttaaaggttctgaagatttcaattgaagagtccacgctgctgacagaaaaccccatcaatttcttcaattgctcagataagaaaagcccaattgagagcaatctgcttcccccagcaaatctgacgctgagcccattttcctactccgacagcaagaacagactcacatccgtgggctgcgatgtctttgcctacatagattctatacccgataacaagatttttcaggcagttgggtgtacagctgagtgcgctgctaatatgaataatatttccttaagtacagatagtgataatagcaataataactcctatggtggcggctgttatggaaggaactgctgccagaccattattccctcttacctagaaagctacgaaatagagatcaatcgattcaattcgaacaataagaattgtagctatgcgttcgtggtagacaatgattggttatctaatgtgagtttgagtgttgttagaaacatggattacgttccagtgactctagactgggacatcttagaataccttaacgaattcaagaatatgagttcacctttaaaaccaaagtactcccattgctattcggaaggagctaagtcatctataaccaaagatcggcttcgttgtatgtgcaaggagggatatcgtggaaatccttatctttttatgggctgtcaaggtaataactaaataatcctccaaaagcaaaacgttcaatatatatattactatttattatattcttattgaatttaaattttatgtaaccagatattgatgaatgcgttgagaatccaagaccatgtctagatgatcaagtttgtgagaacactattggtagtcatagttgtaaatacaaaacagtacacaaaatccgtccaatcctcataggtatgttctcttgtgccatgtgcttataattaatatataacaatgtgccatgaatatatatgattgaacatatactattataaatttttgtgactgcttgatcctctttcaatgaaagaaattttttccaaagattcttctgagttgatagtgtgtccccatctcaaggtgcatggcctccttagagatgggagcacacatatatattacgtttttaattaagagaatactagtcctagaattgagagtaatattagcactttacagttagttaccgatataatttaaaaattatgacaccaaagtattggcagccgttgtatagtatatattatagcttactccaataattttgtggatcactggaccttgagtcaaagtaaggcacccactgacccttgagtcaaaacctaccctgagagctgagtttcaggagcatattcacatatttgacctattgcatttcttaatattggccaaccttttatattcaaataattaagatagcttattaattatagtaactgataaaaataggttaatttaaaatgttacattgtaaaataactataattattttgataatttttgtaaaaccacctactcgttaaataaggtgttagggttatttatataatttgtgaaactaccaattcgaactaaattatttgagactgaatcaaatgactctaatatcaattgtttggtcaatccaaacggtttataattttttagttcaatcacggttttaaaattctcaaccgtagtttaaaccaattcaatttgtataatttatttttatatactaaatatatatattttgtggatattatattaaaatttgggaacaatttcaaatagaatattgttattaggttgttagagagtttcatattgataatatgtgcaaattaaatatcatatataaaatgcatgtgttactcctctcactgtcaattgattttgagatgaaagttcatgcacattatcatatactcacatattcctattttctcaatcatatgcttccgcattctaacataacttttaatattattttgagaatatttatttattttttatttatgtattattaatttattaaaaataaaaaaaaaattaccgaaaaataaacaattacttaaaaaaattatagaacaaactatagttttaaactaaatcaatttattcttaagtggattgatttggtttgatttgaatatttaattaattagtttgatttgattttgaatttttgaaaaacaataacactggtttgatttgaaaaagaaattaaaaatttggaccaaactaattcatgagcaaaggtggtagaattttcaaaaagttatttaggatggttggaaggccaaaggtatgagaatagcattaggactattagtattccattccattccttagtagcattactatggaatcaaacatttctggtccattaccatcaggccctagcttaaagataaacagaacataaggtatatgataatctctccttataattcattataactaatttaattcgtccctcctttagtgggtgtacgaataaactataatcaatgtctaaaagaacttttggtgagcaaatgaccgaacgaatttctttttacgtggcgatgatagatatcaagatacatatatatataaataaggagggtagagatcagataattaatttgaaggggaagggtagagataattaaggagcgtgattaattagtactaattagttaaaggaaaagtttgtgcagtgattaattaggaaggatatatattatattatcgggaccgaagtcgataacttaattaattaattcttttatttattttaatcggtggttggaacactgtctttccataatccatgcaatgcaagtggaaaagtaattcctctaatcatcatattagaaaatacaaaagtaaaagaaaagtggcaaaagtatttgtttcggctcttttaataatataaatatataaatattattttctttgaataaagattctgaaatggtagggggtattttaacttttaaggtgttaactatgatggagatgacatatattattgtaatttattattgagttgcacactttttgattagataaagggatttttatcctatatactgaaatttttaaatttttttcttttttaatgtggggtgaagtttttttaaatagactgtatttttttcaaaaatatattttttatattgtgtactgtgttaacggttgagtttcatctgttgttccactgttgtttttagttgtttcattgttgtttttaattgtttcgtttagtgttttacaattgttttataaaaatacagtatttttgtaaaaatttccttatatatggtaaattatttcctaaaatccaataattttataaaaatcccttaaataaatactatgagaaatcgtcaatgacttataatgtaccacaccggtatagtattaggcacatgaaggtatctaatagcaatgttctttaaaacatctctaatgaagtgttgaaaaagatcgtgtattagtattattctattttagtaatatcaattcaatagtgtattaaaaagtgtctcaaatttttaacatgttaaaaattgtgttaaatattttgacacaaaatataacattaaatatcattttttatttattattgtgctattatgaatctttggcttttacaaaactttattacatactttcttatcatattattattatttaaataataaaaagatcattatttaaataataaaaaaattcttgcaaaataataataataataataataataaagatttattcaaaaataataataaagttaatatataatgattttgtatattttttaataaaatattgaatgatcattaataataattaataatttttttttacttattttacattttctgcattggatataattatatagtgggtccaacttatattcttttatgttaaatttaacatagattttaaatttgaattgaaatgtacaacactattctaaataaaggcccacactactagatcgatggagattgctttacaacaagattaagattcatttaattaaaaagtaacactttattattgagaagcttcatcaaaaatataaacaaaattaacgaacgtcacatcatattggaaaatcctaaccactcaaaaaggatatacagatacatttttatttattttggtatttaaaataatttttaatcaaatttttttatattcatattttcttatctgttttggtatctaaaataattttttagtcaattttttttttatgataaaaaagattaacacgctcagaacaaagttcaaacattgtgttgc

SEQ ID NO: 19563 - DNA, 9521 bp, Cannabis sativa
aagaaataatatattaaataatttttcaaggtttcaacaaatattacaatgtttaagtagaaaaacaaatatatatataatgaaatcatatttaatatacttaaaaaaatctataataatattgtatactatataaattataattgcaccactctatagattgatcaacagggattcattaggatgtttttagttgatgtaataaaatgaaatgaaattaaaaaagaattaaattcatttgattttattactttttgttgtatgtattgaattgtcattataatttaatgtaatgaccctttctactattttggtgtatagctattacattttatttattttttatatatgcatttcaaattcactacatttttattcttatatatttatattcttattcatgtgtttttatttatacctaaggctataacaagatcaataaactattctaattagatatttgccaaacaaaaaatggacaaagagatttcatacaaatcttttgcgtttataagttttacatgtatttatatatttatatatatatatatacacacatttaagtagtatctaagttggtagacggccacactccaaacaagaagatatcacgtctaggagcaacaaacggaggtcatgtaatgctcgtccatgaactttttttacatcgatcaaaccggccaatattttataatattatattatccttgaaaaaaaaattataatattatttttcatgtccataaaggtgcttctgttagctaagcttctctgttaagtattagttaggattgtgttactattgtacatatgtatttagtttgttagctttgctctaattgtttataccttgtatatattgaggtattgctttatttcaatttagtaatgaaattagacttttatcacttcatttctttcaatcttttctcttaacatagtatctgagtgactttttttttctctttctctttacttttgcaatcttgtttctctgttcgttgttcttttatctcttttcattgagtggtttcgatggctgcacctgctcaaagcttcaatcatgttgtcttttctcacaaagtttttattgaacttgatgacaataatttccttctctggcaccctcaagttcagtctatgattcaaggatatcgacttcaagatgaaatctagactcgttttgtcctccgcacaaatttcttactcaagaagatgaagttcttggtcaaaccaatcctcatttcattgagtgggaagtttaagatcagcttctatacttctggcttctctctttcatgtctgatggaattctcactaggattgttggcattgatacttctgctcaagtcaggaaaacattagcggtatactttgtcactcaaacctctggcaagatttatttttacgtactcaattgcaaaacctcaataaaaggttttctgtccacaaatgaatatttgtttcgcatgaaaactcttgttgatcgtctaggacttattgaacacaaagtttctgtaaaagaacatattgctgccatttttaaaggcttaccatcatggccggccatttaccagtacaaggagtgctaatgcacagggtccacaaattaaaaaggcccaatatgatattttaggaattttttttaactgaatcttccactaattttgtattccaaataataaaaaaggttttctttaatttcttttccttatttaatgtcttttaattgttttttcccataatatttgatattagcttgaagttgcattagaaataacaacaattttaataaaattatttaaatttttgggtgcttaattatgtaaaatatattttaataatatgatattatttaaaagtattatttacaaattataattttttttgttaggggcctactttttaaaattagaacagggcctccagaatatttgagacgaccctgcttaccattaatatatgatacatttgttatatttgtcaattcaagaaatgatcaatgctcagttgttgagattgaaactcttttgtcatctctgagcatcgaatggtgaatcatattaaggatcttgattctatcaatcttgctactaactgtggttttcgattcaaaccacaaagttctcccaatgcttctaacaatgcagaatcaataagatcatttttctgcttccaattcaaccttcaatgatcaaggacgtggtacttagaatccctatgctatttcacctaggtcaatgcaacaaggttaatccttcaccaactctccttctgctcccgatcataattctttctcaactttctcatctgtcactttaggaaaacgacctgtgtgtaaattgtgttcaaaagctggccatcttgcttcacgtttttatcaacgtttcaattgtgtttcaaatagtattgagctcagaagcgatattctaaggaaagctcgtaccactccttaattatcatattttggtactattaaggtgtactaagacttgaaattctacctatggtgtagaatgccaaagggtgtggtggacaatatatattcagatgcttaatttgtaaatgaattaggattaagcattagaaattagtaaggtttttatgatttgttaaatttctcaagtaacatgaaaagagattgctaagaatcatgagtatgtctgatttcgtatgtactactttattacaagagcttgtaaggaaaggtataagggagatagtatgactgtacgtgactctaaagtccatcattttggataggaaaccgaaattcatctttatgtttgaacaatgtctatagagggccattattatgtagttgaagtttagtatagcttcctacctttacacagatggctagtcaagaggggcaattttagtactaaaatatatattgcaagcttacgtgatgaatcacaagaacttatagaacaaatatctgttttgattaagttttcatacaacaaacagttattaaagtgtgacagggatggttccatataagatgctaaatagaatgaagtgtcattcttgttttgaaacaggaaatatctagagctgaggtcaattaagcagactaaatcccaagtacaaaaagctaccacaattaagtttgattttcaagaaataagtaaattttgagatgagataaagagagtgggaagggggtcggtttggggctgagccaaaacaagaaaaatgattttcaatttcaataaaatttcctttttgctaaacataattcaaataagaaaaattacaaaaatgttcctaaggctacattccacatatacatgcattacaaggttaaaaatgtcattagtcacacaccacattatccaaataatcctctaaatattcatataataataaaatgtcgatataaaatcctgaaagtgtatttcagccccaaacctggttcggcccgaaatactcgattgtgactataccgcgccgacctgtcaaaaatctcttgaaaaaagacacaacaagtatactacataataatatagtccataagcacgcaattaaattaaatttgttgttttacccttctcgggtcaaaattactaaaatgtccttggctcaccaacgaggtcttaacatgtcatatatcaaattaattcacatataataaattatataataatataattcgacaataaatacacatttaactagtaaggattcgctgatccatttttctaatctcaggacattacatcacatttgtagcaccaacactaggaaattctataaacttgagttttatgatgtaacatttcgtgatctaatattaaggtattgctaagctagctagctaaggcttccttaaggtttttccaccgaatttgcatttaaacttgttctagacatttcctacttaggactttttccactgtattggcctttcttgggtaatataagttaggtaatcccaatcttgagctaattttaagcactgcttctaatccacattccaatctttttgagtaactaaatattttaatagctaaatattttaagttttcattgaagaaatagttttgccaattcttaagtacaaaatctcaattcacaagttccagataataatttgagtgacactacttatactcctttaactagcaaggagaataagcagtaacgctaaaaacttacattaaactgcactttatatcctgtccaaatgcctcacaatagactatgaacttatctcaattcatcaacttggactttagcaattggaaaccagctttacatttatctgtccatatagatcgctactttatcttaattaactctattaaaagcgttgagatcttggaataacctttccatattataataccataactaatccaaacctagaaaacttcaattcgaataactgtctctgaccttattcaaatcctgatcgattcaaccttaccccgtgtcgatcatgatctcatataaaaccatccatagatgttgcccatactttcttttttataaaggtgccctaggatatcattaacatgtactatgatgtatgttttgagaaaattcttaattatcctaatcattagatccataacaacagcgtggattagttcaaaagacatctagaaattcatgataagtacctagtacgaaaagtagtagttaaaattctttcccctcagattctcaaccaatgataacctgagcaagggtcattcataaggaaaattatctttccctgaaactgattgaagcattcatatataactccctaacagagtgtatttattcttgattaataacttgcttaatcctctatagttaacattcatataaaaagatctatcttccttcttaataattaacacttgggcttcctaaggtgatatactaggtcaggtaaatcctaagttcatcatcccctaaagttgccaatttactttcttaagtcttgttggagccattatgtatggtgcctcagaaccacctctactctaaatgccaaacaacaacaaaaaaatatttgttgtggtgataagttaggaaaatatattctgagaatacatccaagaacttttcaccactttaatatccataggctgaattgtctcggccaggtggtatttaataccatcgctactaattctacgcattcatcccatgatgagtctttatattttatcatcgtggaaactagagtctaaaaaccctctgccaatatcataataaaaagaaaacataaccttcaggttaaaaagttaacatttctacttacaatccatactaacggcttactacaacgataaccccattctaagtaacatcttaaactctgatatacccaaatctatgagaccagagttcaactttctattctcaactctaatcaactgcctaagccaccctttggagataactaattttttgccaagtaatagagtttcaaatccctatttcatatttatctcaggatctatccaatttattgattacccttactaccacatgttaatgtgtagtttcaaaatcaattatcgcagaattaaataaaatagttgataagaaattgacatgaccccactaagggactatcttctacattagtttgggtcgtgacaaactctcaaacatggaggggatttggcctcttgttctggttccttcttctgtagccgtggacaatttttcttgtaaagtcctacttggccacaataaaaatatttccaatgcttacactctcccagatgatgcttcttgcattggaagcactctggataagtataataacttcaatggttactctgatagccactctgtccttgtttcccctaaaacttctttccctgactcgaacccactgatatagatgcaacttttctcttcaggttaaccaaggaaccagtaccacttccttcacgattagaagcaaacgatacagtatccctaccaacaaccaaagttcctcaggattcctgaaccaattctgtagtgcatgttgttggaggagtattcatctcatctaggtttcccaaaataactgaaggtccttgcatcttatattttccaccagacagttctatttggttactagcaataaacttttctgttggcaactctaggatttacgtaatcgggacatggggtgaaggcacaacaagagatccatgttgcctcatcaccataatctcctcctcaagttgttgaatcctagcctccatcttcacgaaccttggctcttaatctaacagagactgaggtggattttaataaccacctctgtaagttcttcctcggccaactcgaccttggaaactaaggggatcccattctcgccatctgcaccgatctaatcaagcttagcccaactgcatgattcttgccatatgtccattttataggacaaacctgtacatttatgagttagctcggtcaggtagtgatcgcaaataaaatctacctatgtcttacatgggaacttaatatgctcctatttagctataatctactaacctataccatgatttttaaatcatgcataataaataaaactgctaaaacaagtaagaacttactaaactatcagtcaagcttatctttcatgatgattttacatatcttgacgatcttcagagaataatttagcgactctattaccaaaattgtaacaccttacttaattaggcatgttaccatattttctaagtattgtgcacgcctttactaatcaaagagttcgtgaatatttaaaactttctcaaataacttaactttaataaataaacataataatttagataatttgggatcctattttaaaagttacatacgtttacaaaatatttatacttttaaagttgtcttctagagttaataaagaagagccttaattatccaaaagaccttgaacactccagataaccatcttgatatgtacaatcttcatccttagctttagactcacactggttcagttctagctcttacctacacatacacgtaatgattgtgagtcgacagattcagcaagaaaagcataatcataaacataaacatatatccaaatcgtaaccaggcacccatacacctaattacaatctgataattgggtgaggaatattctgaacaaagtatatgagtaactaggaatctagcctatactcagtactctagtcgtactgatgtggtagcagttagttcatactatttgatagactatatagcatatatttgttggcgtctctgtgcaactctatgtacacctcactaataccctgatatgctaatctaatggatattgattttcctaataaatatatttgtatctagtgcaactctatgtacgcctcattgatacattgatatgttattctgatagcaagtaacatgcacacaaaacatgtatccatatagcaactattatactaatcttatcttgattttgaatgcaagtgtgtcgatcgacctagatagaaaattatgctctaaacggaggccttctgtcacaatgtaaaattgataagtacttactctagaaaacttctctagtgctaaaaaaaacctaggttttttctactaaactatgtggtgatcgacaccctaaaataaaataaataatttttctctagtttatataccatattgtggagctcgtcataagctttaacatagtatataaagcatctaaatcaaacaccagagtgcaaagctttggctaaaatacaaaaatcaacctttcctaataccgtttaaccagaatttcagttggtacaaccctgaatgaactgaaatttcaattgtctaggcagaaaaacacaaaaatttccaatcttccaaccccgataacttggtccaatcaatcccaaatactatcaaaattttgcgaatatcaacatgtcacataaggaacctattacatagcttaaacacaaaaattatactacgaatcaaaattttccattgttgaggaagctttgagttcaataactcaaacttactcaactcacaccacaacgactataagactctcaatcaatacttcaacactccaaaatcaatctataaaacaatcctttaacattaaaaacacaaacagaagctatatcaaataattgcatgcttgaacttgaactttaactcccaatacacaaggaaaagaagtaataggccttacctctatttgtaccaccacaatactctgaaatcaagctgaaaatttaaaaattttgtgaagaaaagggcttgctcttgctggttgcttagggctagagagagagagagagataaaggatgaggagacttgattttctttatttttttcttaacttagtgaaataaatggataacctataatatttttgatttattcaaatgttaaaaatcaaaaaataaacttatcaaaatctcaccattttcgctaaaagccaaaactaactctcttaagcaaaatttccaatttacccttacttaatgctaaaacaaccttaaggcttacgggtaaaatggtcaaataccacaactttgccttagctcgatatgttaaatatcaaatatacttgtcaccctacatggaaggttctaaactatatctgtgtgactttaatggccaaaccgtcatattttccatcgtcaccgagcaaaaaaatcataaaaattgtatattttatatttagcataaataatactcttagaatttaatgaaatctccggaatcgagaaattataactctaatgtctatttactaaaaaaatgtgacccacaaaataaatattcgtctaaatctatagaataaagataattaatgatactaattcatattttaatcttgcggtcattagaaaaataggttttaaaaatcattagcaaaacacaacttgtatttttaaaactacaaaaactgttttctattctcatttttgaagaccaaattttgaaaacagaatactataccaaacaccctaagagtgcaatttcatatttatagtggaataatgatgaaattaataaataagatttttgaattcataagatttaataaataatataatttattcaagcttagtgttataggttcattgtccccaagttgtctctataccacactattaagtgtatgtgtgtcacaaaataaaagaggaaggagaatttattttgtaatgtcaagacagtggtatgtgcctactattcggggtgtagaattcgtagatgaatactattaggtttaataaaacactcaataaatatatatatatcacatatataaatatattcctaaaagtgctttaatatatagaaaatcctaaatcaaaaatctataaaacctttgctaaattaaagaaaaaaaagataaaagatgagcataagcactaacttgaagtcattgttggagattgcaaagaaagttacgatcttccaagaatacactatttttctaaagtattttctctgacaggaaagaagagaatatagaaaccctagtgttttataaactcatcttagaatgagttttgggtatttataatttggcccctcaaca

SEQ ID NO: 19564 - DNA, 2839 bp, Cannabis sativa
aggatgttaatgaaacatacatggtagtaaatctagatccaggtaaaatatttctaacatatggtactaacctcgatagggctaatcatccagactgggacatttctcctctaaacccctttaaccttttcatgattactggttctagggagttcagttgttattatagttcttcttcctcgtcaattgaatatggtaattttctaagtgggagattatctcaccacaatttccttgtttattctgtacaagtgtttgacactttatcttttgtctcgtagatatggactttgaaattctcatatctacctcgggttccaagaaaggcaagaagcgaggcattgtgttagaaacctattcgaggacgaacctagaactgttgaagagattgaaaaaatcaacggttagaaaaaaaatgtgcctcaacccaaatggctatcgagccagaggtgccttaagtaacctcatcagttcttattgcgagcactgatgaacaggcttaagtgtatgttcatcaggttaagttctcgagttcacaacctgagaaggtgctcttagagccttcctgcccctagttcaaatccatcactagaaagacgaaaagaaaaggaaggtcaagcaattaaacacccactatccaaatgatagaatgggtatcaggaaggcctctcctgaaattgcttggataggtccctgccagacccaccttttccagaaacctatttttcccaaataactcaaagcaataggtcgagaacccaggggaaagttaccaggataaagtttaatgcaaaaatctagcaagtgaaagccccttggagtcctagtgaaagccccttagagtcctaataactccaaatggatatgaagaaaataatctggcctaatgttcgtaccgaaattcatctttcctggttttgccctaattttagaatcctacaagcatgcaaatgtctatggaagtgcaaataccaaactcaaaccattcgaacaaaatcaacacttttaaaacacaataaatttccacataatcttaccctagaaataaaactccacaggcaatactttaccactcaaacatgcaaagtatcatagacctagcttgaactaagcatttttatcttagatacaaaatagcaaatagttgacaaactgtcaggatacttactttttgcacgagtgagtaaagtgaggttgttgtggtaatctgcccaagaatgtcgaacccaatcaattgcacgatcgtagttggcctgagcgtcaaagtttttgttggcctaagggtggaacagttcgaggttcagcgactctacttctggaaaaacgggttgaacagaggtttatacatattcggattaggcagtcgaagacttcttgcattcactgttagagacgacggtgaaagggaaatttttttggaaaacaagaaattctggtctggatttaaaaaatgggggactttgaaaatttgaagtgatgtaaaaggagaaatgaggtgggaaaaccaatttatacctcaatcaggatccacgagattcgaaatagacgacccatattccttcttccaaaagctttgattcgatggataaaaaattgaaaagatggtgtttaaaattcacccctagcatttattattcatcattgtacgacttgagtaccgtacgaattaaaggaggggttatttcaattgtcctgccctcattgtaactcctcccaagaaatgcgcccccaacgcgtgcgtgttgtcagcaaatacattaaagacgccacatgcgtgccacacccgtggtacctttaatttatggtctgttacttgatgaaaactcacggaatgcatccgcactccagcagttaccacatatcaagaacatacctctaagaaatagaggagtattgcaagctcccatttctcaaatagtcccaaaaacttaggggtaaatgttatccatatttatgagcatgtgacacgtgacatttagatgaaggaattagtctcataatttccctaataaaaatccccctatgatcctatcacagagaagcctcatagaactaggaacaagtcaagactaaagaatatacgaaagttcccttggccttgccttagcttcccggacgcagaaggcgtgttgcctctccaggatctagaggggtccaaacatggaagcctacccagttgatatccagaggggtactcgaggggcctaatgcgaatgtcgactgccttggagtgtcgcagacgtctacctttgatacaagccaggtcaccaagtgacagttatgccttttctgacacaggatctgatcttgtcccttacatcccgcatagtgcgcacacctccaccacttttttaacatacggatattacaaacctcttcttttaaaggtaaaagctttgggtgacatgtggtctctacttgtgaaggttaaatctttggatgacatgtgtccgccttgtacaaatggtccctaattgtccagctgcaacatgcacggggacaataatttctaagggacccattagtcaactcttaatttgcatgtaatttaccccaatagtgggcttttagcaaaaatcctaagcaggtcataggcatatccatactcgtcacttagcctataaatatcctttaattttcatacaaaggagagatcacgaccaacatagcgaaaactctgccaagttcactcttcgtcttcttcacgagaaacttaaagtacaaaattaggatttcctataaaaatattgtaaacacatcaaaaatgccctaagaggctaatagactgactctagggctgaccctgagttgaaatggccataggcaaaaaaaaaaaaaa

SEQ ID NO: 19565 - DNA, 2400 bp, Cannabis sativa
atgatttggtacatgttaaaattttgagagaaaaacttaattagtctattatctaatattttctctaatagtagttatttttttcattaatcttgaataatgttattataaatagtgtctatttgataggtgtagatgaaaattaattgataatgaatagactattctcttgtatatgacccaacatttttatatttaattaatataaaagtgatatcattcaatacactgttgtaatccaacggttgagatattatatacagaagattattatgaccaggcttaagaggaggagatgaggggtattaaggtcaaatgatcacattagtagtagtgagctcactgagtgaaagagtggactagaacaatgaacacgctaacaaccgttaaggacacgacacgcaacgcgcttgtttgttttaattttaggacacgtggcagcatggattcacatgattggagtaaccgacaaaactcgatcatataataaacaattgactaagttatcacgccgtccatttgtttcggagttctgttaaaaaaaattgccaggtggagtgaaactaaggcgcagttgctgatgttgaactctgctactgccacgtgttgcttttacagattgggattccactcttgagtattctactggctcttctctctctctctttttggccaactgttttgagtacagacctaactaagcaaagggtggatgcttttagctttatttttcttttaataataataataattaaagaaaaatttgtggataataatggtttgattaaatgacttttattattggatgatgatgatgatgaacatttttaggtgattaaattttttttgttctaagtttcaactctcaccacgtaatgtgttgttccacatatatattgtgcaagtgcacgtaatatatttataaaaatataagaaataaggagagttttgactgtgagccaattgattatagaaaaacgggtaagtagacatttggtatagcaaatcagttaaatttttcggtcattactttacatgataggtttatagggatagtatttcagtggaatacaatcaaatctgttgtgagtaaaaactcacttagccacattatagacggcaaattacaaattctattaatattaatattagtaaaaatacaactaataaatgaataaggttagtttaaggattaataaatataaataaaaaaatattgttattaaacagtggcgtcttattaacgataatttttaaattatataagatttaatatttaatataatagcagtatgatacgaaaaagaatattaagtaccaatattatctattacgaattctctaaataaatagagtggagacgtaagtgaaatggtccaaactttaataaaaagaagtagcgtcaaggtttggtttggcaattggcatagggtgaggaatagtattagttagtacatgttgtaaagggttaatttgctgaagtcatggctcacataattaaccacttcttccgtctcttctttcctatatccaatatatatataaataggtatattacttgtataagtttcttcttttaaatacccaaaatacagattttcccaattttgtgtttacaaaaaaaaaataataataataataataataataatacctaagttaaaaaggatcaaaataagtgagttcgaagaaatgagattggcatttttctttttcgagtgtggtcaacaccctttaatattgaatattaattgtatggtcagtttaagtctacggttttaaataattttcattaatgaactaattgggttattaaattaggcacttcgtgttcacatgcccaccagggtttgttttccattatatttattgagtttttagtggatactattgtatagctaaagtaaagataagagtttgtggcttccaaatgattttgggccctaagacagtttttgagattatggcacatataacactttttagtcgataaataccactttctcattgcttgtcccatgcactgtgcaatctcttgcttttttcttttattttttatattgggacttgggaaatttgaatttgaaacaatttatttgaactaatattttatcttgagcaaactaagtaatctaattaaatgaggcttaaacattttatttggtaagaagtttgtaatttgtaatacccaaaaagttaataagctctagttagtagttagtttacataaaaaacattataggttgatccaaagctaatctctaacaactcttctcctataaaagaaaattagattgtagaaggtcataaaggtaatcttaataatctgagtttaagatctttgtatgcatcaaaatttagttctatctcgcacaaatagctttttgtcaaaattagatt

SEQ ID NO: 19566 - DNA, 4485 bp, Cannabis sativa
aacttgctataaaaggttattaggttgttaccttattaaatttttttattacccattaacaagtgttccatatatatatatacatatttgattagagagaaatttatgaaaaatttaagggaatgtaaaaaaaccaaaaaaacacgatttttttttcaaaagaatgatatgaagcaaaaaaaaaaaaaaatggtgcaaaatttatgaaaagaatttttttttttatttcttataaagtaaatagccaatatttattgtaaaagaaattttaaaaaataattcattgtggtacatattatctattgaaaaaatgaaattttaacaaacaaaaaaaatataatttaattaattttttttgtggtctgaaaaacaaacaaacaagtaaatagaatgatacatattaattattaataaataaataaattaactattagtttttaaaaaataatttaaaaaataagtaaatgagatgactcattttaagtatcattaataaaaactaaatgagagcataattgtaactatttttaaacataatttagaagcttacacatgtcactcaattaggaagagagtataaaaaagagtctctagcactcctctaattagatattaaattttacatcaaaattttacaattgtgtattcgagcacaaagttaaaatttgatgtaattaaatttaccacaaaactaatttttatattaaatataatacaatttttacatctcccattagagatgatctaaggtgatttacaagaaggtaggtcattctcgacattcggtgggactccaagaatagggtttctctcaaagaaattaacaggcttcaaatcaaagctagatgagactgtaggcattataggatagtcctcttgacatggcacatgatgaaatcccaaagtgtaccaaaccactatgtctttattttcaattatcttatccctgcaaaaaccaatgaccattataaaacacattatatactaaatatttcaacttcccacacaatggtaacactgatttaagttattagcataaaaaaaggtcttgagtactagaaatcttttttaaaacaaattacaattataaacacattttgtactaattaatgctatactacaattctgaaattaataatataaattatagtataatagaacgccatcactacaagagtgccatacaacatgaaaatagatacttcttaatatcattttgcaaaatatatagtcttgtttatataacttatatgtaaaatatagttctttagataaggtattgttgagactgattctcaacaataaaattaagattagaaaaccaaagtttaaatgtaaaatcaagcaaaacaataagagttagaaagcttggagaataaatgtcagcaacatcgatagagagaaaataagtattgcattgcttaatggtatttcttataattatttttccaccccttttacaagtgcctcaaggggctatttatacatgatctctaatttcttaatataagtggttccaaaagttagaagacactatcttggtagtacgtatagcaactgagcttggcaggtgagtagtggaggccggtagttgtggtcgagtgtcaagctgtactaatagctgttaggtggtggctccactacttgtactccttctaccctcttgtacaaccactactcgccctcaagcttggaagacacaagcttgctttaacagacttgtccttggtcgtacattcttttgttatttttctcgttgtctccctcatcttccatgtacattttgccttggagaatttgactgattagtgttaggcttatgttgttctttatccagtatcatcttgatgcattttaccaattctcttcacaaaaatcctagtagtgtggcttagggtaggaccgattccatgagtgagatggaatggataaagtgaaatgaagaggaggggggagaggaacctccctgtggagagagagagagagagagagagagagagagagagcttgcactccccgtgtgctctccatggagacaaagagatagaaaggggatagggagcttgcactccccatgtgctccccgtgagacaaagagagagaaggagggcgaggagcttgcacacctcgtgtagctaccttcccgtggagattgagggagaaagagcaagagagaaggaagagaggggaaaggggttcctttgtgtgttaactattggattgggcatcaaaacatataaggataagctctaatatttatacttagtaaattttgagggtgaacacttcaaatttacacttagtaaatttcgaggtccaaacttgctcccttaggtgagaagagacactgtttgggaaaggagagacctcctttagtttgtggagactcccctgggcggggaaaatctgcctctattcaagtatgtatacatactgtcgctttcttctctcctatgtccttgtggtggacttggaggacgaccacatcggttaggcagttgatcatttatattttcattacttctttgagacttttgttgtccccttgctcgtgtttgcctcgaagttgtggcaccctaattttggggacctcatccatcaacaggaatgtcccttgtattccttggttgttgctcctggggttgagtgggactatttagctcatgttctttgatgttgggtccttgtgcccttctagtatagttcgtgaaccacagggccttccgcacggtcttcgtgcaggttgctcttcttgcacaaccggtgcattgttttgagtcattctggctgcagccatggctcgttttaactcctcatttcttcagttggattctgtgagcctttgacgaatttccactatgggaacatatcttgtggggtcatatgcatctgattcccttctctcacgaatttttttgctcagggtcacttctatcagagttcctctcagtaggaccccttccttgagtggtctaagtttgtgccccctggggttcttttcttgatcgacatgttatctcttcttccacgactagctcgtcgtgttgagtattttcaaaggtgtaatgaaataaagaggagatgtgttttgagtttttttttacaaatgctctcaatgaaagcaccaaattgttaactcatactctcattaacaataaatgaagccttgtaaataaaagttaagtatttatatttaattaataaatatatatgaaacactaaaagtttttacgtcattttgtatttaaaatctacatactccatgagtcactattatttctgagtattttgtgattatgtatatggattacaaatgaataaccatgagtatttatttaatctcacaggatctttccttcccaaaatgatggattcccctccctaaggttcagttcctatttataggagttttttttttactatgacagttattcttttcgatcatatctaggtaactatttatgaaatgtgggcaatccccacgttttatgtttacaacaagttgaaaaaatgaaataactgctgataacaatcttttgatcttatttggaagtcttttattgccgaggtaacacattccaaggatggctcgcatctttcagtggtgttcaaggatagttggtcgcattttacgagatgctcgttaatatgtttattctcgctatagcctttccagggcaactcttagacttagtcttctaagattttgaaataagttgcatttttcttatttcccttaatcattcaagtatgtgggttaatgagttagaagttcttaaacaacttattatctaccttttccaacaatacaatttggatttgttacacccgagtagacttctatcattatcatctcgccatacgttacttgtctcactgtcttactgcgtaatgcgagactgatattgatcgtaatcaattatcccttcaagatgattcatttattattaccgagttttccacaattctcacgcccaaattttcatgtgtcatatccatatttatggctcgaaatatgagcataacaatacctattattaatatttttgtcatttttttctctctctctctcttttttaatctctcaccttttttccccttaaaaaatatctctaatttttttaacttcatttgcctttttaaaatactttttctttaagtcttttgtacatttttttactattttttttctcgtgtttttttaataaattttacttgctttattttattttattatttttttgttttttaatcttatttgtatattagtaaatatttaaaaactatacgagctacatataatattaattttttttttgtattatttttttttttatatacataaatttttgttggttatattattttatttttcttgtaaactttgtttatttataaataataacagagaaaacgagacaaagttatatttaaacatgaaaattgatgatcttatcactacaaaattttttacttttagtcaca

SEQ ID NO: 19567 - DNA, 1981 bp, Cannabis sativa
  modified_base (1638)..(1642): a, c, t, g, unknown or other
ggtaaaataatatccaacaatctgtttactaggtgtaattttgcggttgcactctggtttacttctcctatgatcgttagaattgacacaattcccggtaacaatatttctgaggtcattcgcaatctgtgctcttcgttggatcctgcttgcagagtcaaaatgcttggttgtattggggttattttcgattgcttatagaaaaccaggaataagttcattcactcccttgcctctatcccttgtttggactctgttagaaaagaaattactaacagatttcatgaaatgagtactattggtgatggagttcctttgatgcaatctaaccgattgtcgacgaccgtttttcctaaactctatacggataaatgtatcctgatggacgagtcctatctggatggaaggtttgggtgtgccttgttgtctttggtgaggggctcttttgattggtggaggtgttcctcctctggtgcgtgtgagtcggcactagaagctgaaatgcaggcgatggtgcttggccttcagtgggcgtcttcgaatcattgggataacttatccctcatctcggattctaaggtcctggtggaggccattcgtgtaaagagagcacctcattggaagtgtactgctttattttcttttattttacatatgttatcatcttttacttattgctgtgttgttttcactaaaagagactgtattgtggatggttaggccaaggctgctcgaatgtgtaatgttgagtggtagaactctaaaggggagggatttctctctgtgaatcccaattccttttgggctttaatctaagccgaaccaaggttctttaaaaatatatatatatatatatatatatatgtttttagttgttcaataatacttttcttttaaacgaaatgaataatactttaaattaaaaaaatttaagtcaactaactcttgtatggatcctatcatatttctaggtttatacacagatgaaagaatgttacaaaatttgcatgttacaaattatttatttgatctattgacaattgaactatggttaaaattatatcattagatctgtcaacaagtcaaccatagcaatttagatcaaataataatatgttttataaaacaaatttgaatgaacaataaataaaacacacatgtaacaacattggatagttggttataagatttatttaatttaaattaaataataaattaagtaaatttcgaaaatctttcaataaaaaatatttaatttcgaaaaattattaaataattaatttaaaattaaacctataatttaaaaattaagtttataacaaacttaaatatcttttcaaaaatatcaactaacttttcaaatttatgttatttttaaaagataacattaaatatttaataacataaaatgataaataaatatcatttatccaattttataatttaatttaaaatttaaaaaaaaataaaaaaaaaataacaaacttttgaaagttgataaaatatatggttagttttttaaaattatctagattattttattaaaatatatcatattcttaaatttcaaattaagatcattttacaaaaattatttaaataatcaaaaaaagaaaatatctaaccttaaatttaaannnnngataaaataatcaaattttaaaattaaaataaccaattaagcaaaaaaaaaagtaaaaattatcacttttcaagttcaaaatctactaatatctataattaattaataaaataataattaatttcaaactaataattagacttgagatttaaaaattaaaaatctacacaaaaaatcgaaattaaattccatgtaaaaatttgaaaaaattgcatttggtgcagatggtatgcattgcataccatccacgcgcgtgcttcaagagagctgactgagaaaccttggcagatgaggttgcatgtgttgggttttatgcccttaataaaactcatttcaata

SEQ ID NO: 19568 - DNA, 3068 bp, Cannabis sativa
tttcaacaacaaaactaatcaaaactgcaagtaaaaacaacgccaaatactatttattttatctccagcagtcgcaaacaattgattgtgatgagcctcactccatggaattatttagcaacatttctttcaatttcagccaactttgatcacttcaacctcttaatgttctcatcatttcaaagaaattcatgtcaagaaaatcagcatcagaatttcaattctaagacctttaattagaatatcagatatttgtttgtgatcatagacctttagacctttagaatttcaatctctttctctgagtttgaatgtgaatggactgggagtagcccacatatttaaaaaataagaagaaaacaagaaagaaagaatgagatataattatatatttttatttttaacatagctaatagctaatgtagtacaaggtttcatttacatggcatgagaggtttcccacataagcctttgttaccagagtaagtacttggaggaaagttactgagtggtttaccatcaggaatttccccaaccagaagattatttgataaatctaactctttcaactctctcaacttcaaatactcatcaggaatttctccactgaacttgttcttctgaagtttcagtgtctccaatgatctcagatttgacaaagcttctggcaactctgaactcagctcgtttgagctcaaatccaaaatcttcaacgacttgaatctcccaatggttggtgtcaatttacctttcaaaaggttatttgacaagtttagcaactgaatcacaggtgactccttttcttctcctccactactatgctcaatttcctctattccacttgtgaaactgttatcagaaaggtctaggaatgttaaaaaacccatgtcaagaacttggctgaatgatccagtgagattgtttgaatgaagatcaagaacacctagtgccttcaaattcgatatggaatctgggattttcgattcgagtgagtttctggaaaggttcagtaaatagagcctagtagaatggttgtcaagccaggttggtattgagccagtgatgttgttacttgataagtccagttcttgaatttggtttggaattttcttcaacaactcttgtagttctccttcaattctacagcccgccaagtaaatccgagagagtgaagaaagctgagtaagccaattcggtatagagttgaggttcagagaattgaatgacaaagcaagagtttcaacattttggagggaagacatttgaaatggcaatggcccttcaatcaaattatgtgacacatccaatagattgagttgagaaagctgaccgaatgattcaggaatttgacccgtgaatcgattcccactgagataaagctctgacaaagacgacagattacccaaactagaaggaatctcaccttcaagattgttataacttaaagaaactctctgtagagacaccagacttccaaacgtggctgggattttcccactgagacgatttagttgaagtctgagaaagcctagtgattgcatttggttttggtttgatgggaacggaatcgaaccctcgagagagttgtcatttaggtacataaccgaaatagagctcaaatcagctactgataatgggattttcccagacaagagatttgaggataaatcaagctctttcaaagcctgcaaatttccaatcctctctggtatatttccggttagagagttgtcttcaagatgtaaatattccaaacgggtcaaattcgaaatcccatctggaatcactgctgagaatttgtttgcgttgagatataaactcttgagatttatgaggcttcccaggctggaaggaagtggccctgaaagcctattctcatggagagttatttgttcgagtttagataacataccaatgctttctggaacttgaccagtgagattgttcccatgaagatacagctctgttagattctgaagatgaagaccaatggaaggtgggattgacccagaaagcccaatgaggccactgagatcaagaacttgaagagaagacaaaagtgttatcgaaggagataagataccattcatctgagactgaaaaacagtctcatcggttgaaatgaagcccgggagacgaagcactgtgactcttccactcccagtaacattatcacattctactccttcccatttgcaacaactgagactatcgacccacttcatcaaacgaccagaagaatcataagaaatcccagatttgaaactggttaaagcttcgaggtcatctgggttacatgacattgacaccttaacactatcatgtccttctccaagagtaaagacattatgaatgagaaacactaaaacccagaagcagtaacgaatacccattgtggattttcacaagtcctacctacgcctagctcttatcagcaattttaaaaagtctattgagtttacaaaatctggacaatgaagggaaacagaacagcggataggtcaaaatgtaatgtttgtttttctgtcttttttgtcgtctttacagattgtaattgctgaaaagcatttttgcgttaaatcatggatggccctcactcctcactcctcactccttaagtaacggatttataaagaatatattatcattaaaataaatgtcggaatattgttcttaatgattataaagttgtcgttttggtaaggaaaaaaaaaaatccaatctgtgtacagttacttttgaaagagtcaatagttggtcgtggtaagtaataagaatctttccctcaaaccaattggactaaaaatgcatttaattcaatgtttcctagcaaaatatccaaataaaaaaaaaaaattaaaaaaaaaataggtaaaaccctccaaatttggtttgaagtattgaaactcttgcataattacttaaatctcaaaaccatataaatcatatttttggatttttttttaaattaatgatcttccaaattaagatttccaaaatatatatataaaaaaaaatttgcataaaagaaagaaaattaccccacatattattttttttaatttttt

SEQ ID NO: 19569 - DNA, 1983 bp, Cannabis sativa
agagagagagagagagaaaacattacagagtgataatgcaaattaagtgataatgaagccatacctaagtttctctcacagtgccaccaatgtcgatctgatcttctccaagcaaaagagaaaggggaaatgcaattcagagagagacagagagagaaagagcaagggaaataccactagagccttgacgattcaaagagagaggtggatctaaggtttgaagggagtgtggatcttcattttggggtcagattagaccaccagaggtcgagcatcaccattgttcgatgggcagctacaaaaacgtgagagaggatgaaagagttagggaggcatagagaaaagaaattgaaagaggagaaatattacggttttttttctttttatacgaagaagaagcattagagttttgctcattattgatatatatattttaatttgatccatttaataaggggtcttaatcaaagagctctcaccgcagaaatcgctcgcactgcatcacaccgcataaaaatgcagtttgaaatcctttgcggcgcgatgcagtttgtattttttccaaaccgcgcggtacgatttgcagtttttaatttaataattgcagttcaccgcactatatattataaagttatcaatttttacaatatgatttttattcttttttcatataagaataaatatatgtaatatgtatacattacattattcttttagagacaattcaatataatgacttgataattagtatatatgttaaaactttaataagatttttttgtattgttaaattaaaactttatagattgagttttaaatttttattataatatttgataatgatgatagtctaagttgctcaaaccgcaccgcatcacactgcattttcgcgttgtgatttttgcggtataaagatcttacggtgcagttgcagtttgtaaaattagaaaaatcacatatgcggtttggtttggaaaaacagttacaattcgcaccactcgcaccgcgaacacttatacatttattaacgagtttttttttctttatatctgggttttgatttaatctagaatttgtggtggcggtggcgatggtggtaggtgatggtggttatggtatttatgaagaagagaagaaaaaaaaaaggaagaagaaggctagtggaaaaaagaaaaagaaaaaaaattgtttttattattttttttattttataaaaatattatatttttaaatatttatttacgtggaccaataatataatatcatatgtacactatgttcacgtggacaataccacatccaacttggcagttaactacaaaaaaatgaatagaaatgactaatcgttaatataattcgggtttaagggattttaccatcaaaaaagtagattttgagggttaattgctagtgagataatattattggaagttatgccgcaatttactctattacgtatttagctgtggttatgatatttgcgtcaggtaggtatacaaccaatgttattggaaaactatagcgttagttcattactaacactattacgacctgcaaacaatatcgaagaatcttcatcgaaaccgacactaaaaagtgatactgatgtcttttttgggtagtaaaattagatataacaactacataattaaattataactattttttttttaaaaaaaaaatcactttcaataaataaattataatacttaatattttaaattataaatagtgtatttttatatttggctaagtttccttcttattttataaataactaggtaggagttacgtgtcgaggcacgtaaatattagttttaggtaaagtttagttttttttttctttatttccaaaaatataaggcattggttcaactgcttgaacggtgaactgattgtactttgaagtcattgttcggtttgcatctacgtacaactgaattctccattttttggctgataattgcttcgtagttttttgga

SEQ ID NO: 19570 - DNA, 4257 bp, Cannabis sativa
tgtttggtttaactctgtaataaatattgtaatcaaataaaataagttgtatattgacaaaaatatttttagttttattatttttaatatttaaaattaaaaaaaaaaatagtaaaagagatattttcattacattagttttataatgtaatatgaattacaatagatagtataatgactattacaatgtaaaaccattacaaaagtttaaaaatgaaaaacagacaatgtaatgtaattatgattccattataattcccattatactaaaccaattaaaccaaatgatctttctctttcaaaaaagaaaaaaaggttgaagaagataggcaacccctacaacccctacaaaaattacaataccacctcctctgttcctctacactacccctactcgtagcttagctccctccaaaaccaacacttacccctatacccatctattcacaacaagtaaataatacaacttcttcatcttcttctagagttttcatttttcagatttgagtttggcaaaaacaaagaaaaaagaagagcacatgaaccaacaacaacaacaacaacaacaacccatttactattcatcctctaatcaccttctagaaccttgttcatcaaacgacgccgttttcacctactggaagtggcgtgaccaaaccgaagccgaggcagaggccgaggccgaggaaggtgtcactcctccaattctgaattgttggagggcttgcagtgattgcgggaacagagccaagaaagagtgtaggtttaagaggtgcaggacttgttgccgtgcacgtgccttcccttgctctactcacgtgaggagcacgtgggtccccgtcgcttgtcggaggaagcgtcgtcatgatccttcttcttcttcttcttccatctcatctttttctcattccaagaggccaaccttgtatgattctcacaccactacttccatttccaacactctcacgactttcaccaatcaaggtcgtatttctttctctcttggattttgtgatttttttttttttttggtgaaaatggtgatttgaggagaaaattgaattgggtatttgtttaatttatttaaattatgttttatcaaattctaaagaaaaaaatgtgaatttgattgatgaatctgagtatggtctgtggaatatgttttggaaaactcgatttttcaagattagtgtaaccaatatgattgacaagaactaataaaaatattatattattcagaagaaatcttaatttgaagaataaacataatatattagtttagtttttttgagatgatttgcaaaggtctcatagttgattgccaatctaaatagtttatgtgtatttgtacacttttatacatatgttaaatgtatattgttacaaataatattattattttaaaaatataaaaaatatttaaaaatttataatatttttttatttttttaaatatttttttttttctattttttgtaattttatttaattttaaaaataattttcaaataataatattaggtgtattaatataaacgttaacagtgtacatattagcagttgatagtaataattaactgtatgatactttaaatttgcactttagagaattaaatataagtgaaatgacaattggaaaggttttaccgcaattagtattaccattactattgaataaaagtatgaatttgagttttgatatttcaaaaacaaacaatcaatttggtatatttttgtgtccagcattgttattaaacactattttattgcaaaattgaatgatttgttagcttgttctgttttttctctgttttcattttcaaatttacagatgcaactttgaagcagtcattgccaagtaaagtccatgctccagcgattttccggtgtcatagagtaacagccattagcgacggtgaggttgaggttgcatatcaggttgctgtgagaatctgtggccatgtcttcaaggggtttttgtatgatcaaggagttgatgagaagaatggagattactctacttcttcatcacctattgtggctctgtccacacccaatccgagctccccaagctgatacatgaatcacttttaccaaaccaaaacaggtaatttaagagaccttaatgttgtttgttttaaaaatgttgggaatatcttaacttgtgtagtgtttttgagctacccctttaagaatagccaagaaaattgcagcttggaattggatttcactagctcaatgtaagatctttcttgttctttatgccttaatggccttatttggaagaaacaatttagggtgtgtgaccctataatctcttattccctctgattttggtagatgacatggaaaaagccaaagccatatatgagtagccaaaggatgattacccaccattttgttttttttggcttagccaataaatcactatatatctcccttaatttcattgttaattgacaaaatagttattgataaaatacacattggaacatttgcaaattttgataccaattcaaaaacacatggttaactgttagtttgttaataaaaatgaattttgggggaaaaccatgccatataactctaagaagtgttctgtttataaatgttgttataagtgtttggaaaaatggtgtaaaacttaaaagatatattatctagatgtgaaaattcaaatgaatatattcgatcgaagtgaaaatcaaggaaaaaattggcataaaattccaaatcagcctaattgtagatactcttgcataatgtttggtagaggaggaatgtaaagtttggggagaagattttatttttgcttggttaaaaagaaaagatggggaaaataaaatctagttggccacacactaatatagtggtgagaaattttgtttataatatacatttaatttataaataatcattttaatttattctcaattcaaagtaatttatatgaatttgttaaattattaatttgttctctatctcccaaacaacttattattattattataaaacaactcataataatacattttctaccttttctactctaatttctatctcttactaatggcctaatttttttcctctgttaaggagatgtttgtattccgagtttatagaaatttaggtatacttgttacaaaaattaaaattatgaagtgtataatttaattagggtggtgtttggattgaggtaataaaatagaacggagtagaaaataaataatttggggaaattttataatacacctctttaaaatggatatattgatgtactcttatctgttttagcacctgaaataattttttagtcaaattttttctcatgatcaagtacgctatagttatttatgacattcggtaaaattttaaaaaatttagaaaagtttaacaagtcgaaaattacgttcaaacagtgtatcgcgtgactattttattttatacgcctgtaaaatagattgtttgaacattcttttctatattgtaaattattcggaatttctcaaaattttgtaggttatcttaaatagttaaaaattagactaaaatttttttctagatgttgaaacaagtcatgggtgtatcaatacatcccttttaaagggggtgcattgtagaatcactcaataatttttattctattcatttgttttggttgtattttaaaataaaaatgtcatttcaatagaaaaagtttttttatttttttataaaaaaaaatttatacattttaaatttgattttattcttattttaaaatattaatttcttttgtttttgtgctcttgaagttttttttttttttttaattattaatttatatatataaatatatatactaacaagaggtgttcttctctgattgcaggggtagttaacatgatttgaatgaagctggtctgtggtccttaattaactttgtagttaaaagaaagtgattagggggatggttatatactattatcatatgtgtgattgttatataattagtcaaatagatattcatggtatgtgataatttggtctatgcaaaatggaaagagaaattcgagttttatttatgcttcaagtgacatctacaattctttcaataaaaaaaaagctataatgtggtttattgttattttttaaaatattttgttaaaagctaactctaataatgatgtaaaatgtgtattaaacttgatccaagttaaaaattgtgtcaaatttagtataaaaaataacacgtactaaattttttttttttttttt

SEQ ID NO: 19571 - DNA, 7051 bp, Cannabis sativa
tatcaaattaaacaaataaattaaaaggtaatttaagatcttacattcttgtatgaatatatattaaacatcatgtctaatactaatataagattattaattattagcggtttttttattattataattattattaaatttaaatatgtaatgtatagtaatttttaataattttttttattagtgcttcttgcaataaaataataactaaataaagttttttttttttttaaaaaaaaaaaatatttagtagttgaaacggccagcaagttaaaaaaaaaaaaaaaacttcccttaaaaggttaaatttaagagcatttattataatttatccttttgtaagttggaagttttttatattttcagataagatcagtaaatactataaattatcaatctgactaattttgccagcctaatttttatgttatctatatctataattacatatatataaaaccaaaaaatgaatatataatatgtatatatttttttttttttttttttgtatttagacaatatatgtaggaagttgcatttcacataaatttccaacccaataatttcggattttaattaagtaaaaacaaaaaatcatatctacaaataatcttacaattgacaaatgaactgtaattattattaatttaattatttttttaagattaaaaaaactgttttctgtaaatgatgaatagattccgttacactgaaaatatttcattccaaaaatagtcataaaattaaaaactaaagcctttaaaaacagaggaaactgcagcctatttttcataccaacaaaaaaaaaaaaaacagaggattgaaacagaggaaaacagagaagagataatccaaacctcaatgaaagtcatgacactttcttcttctcttctctcattccttcttctcttttctctgtttcaattctccaccgaagccatcaaacaagtaagctttccccgaaaacacaatttttcggttattttcttctttgttcattctaactcataatgttgttgttgttgttgtgttacattgttttgaatttagtcttacattgtctatttgggaacacattctcatggcccgaaccctacgacacttgatctcgatagcgctactagttcgcattatagtttgctcggaacatacttaggaaggtaaaaagaaaaattaaattggttttgttacaatttgttgttgttgtttcgggtttgattatttttaacgcagcgaggagaaggcgaaagacgcgatgttttactcgtataatcgatatattaatggctttgctgcaatcatggatgaggcagaagcttctgctattgcaagtaagaagtgttctgttttcctctgttttttaactctgtttttgtttttcgatgtctaagttttgacattcggttttgttttgttttaacattgtagagcatccgaatgtagtatcggttttcttgaacaaagctaagcatttgcataccactcattcatgggattttcttcgattggaaagaaacggtgtcgtttctaaggattccctttggacgaaagctcggttcggggaagataccattattggtaaccttgacactggtatgtacaaagtaacttattcataacaattcaacttttgcatcagtagattgtaaaaattgtgtcattttctgcactaattttgctaatgtggatgtgaaattgttgtataggtgcttggcctgaatcaaagagctttagtgatgaagggtttggtcctgttccatcaagatggcgaggattttgccagcgcggtcccaatgatggttttcggtgcaacaggtccattctaacatccaatttcctctgttttttccttactatttttggtactaaattcattttttttataggaagcttataggagcaaggtactttaacaaaggctacacttcctatcttaagacacaaaacacaaccttttcccccaaacaaaacgccactctattcactccccgagaccacgatggacatggcagccacaccctttcaactgcaggcggtaattttgttgaaagagcaagtgttttcggtaatggtaatggcactgcaaagggtggttccccgaaagctcgggtggctgcatacaaggtgtgttggacaccaattgatggcaacgagtgctttgattcggacattatggctgcttttgaggctgcaattgctgatggtgttgatgttctttctgtctcacttggcggtggcacaaccgagttttttgaagatggtctcgccattggctctttccacgctgccaagaatggaatcacggttgttacctcagctggaaactcagggccacttcctggctcggtttcaaatgttgctccatggatgataactgttggcgcaagcacaattgaccgagaattcagcgcgtttgttgctctaggcaacaaacgacacatcaaaggcgaaagccttagcgcaattgctttgccagctcgaaaattctaccccttgataagtggttcaggtgctaaattggcgaacgcgttgtctgctgacgcgtgagttgaaactaatcaaatcgctttcttttcttagacatgttttgaaaatgcttgacatgtttagttaattgttttcgcaggctgttatgtaagcctaagactcttgacccttcaaaggtgaagggcaagatcttggtatgtgttcggggtgacactgctagaatcgaaaagggtgaggaggctgttcttgctggcgcggttgggatgattttggctaatgatgaaagcagtggaaatgaaatcattgctgatccacattttctccctgcttctcatatcacttactcagatggaaatttggtactaaactacatcaactctaccgaaaatccctacgcatatcttactcaagcaaggactgttcttaacacaaaacccgccccaaccatggctgcattctcatctagagggccgaatctcgttgagccatctctcctcaaggtatgcatactcaaattttgagcagggtctcgggaaaactagacaataaaacttttaacataattttgatttttgtaaactcattgtttactttttttcccttttttttggttgttgcagcctgatattacagctcctggagttaacatcattgctgcattcacagaatcaactgctccaaccgaggttgaaatagatcatcgtcgagttccattcaacgtcgagtcaggaacttcgatgtcatgccctcatgtcgccggtgttgttggtcttttcaaaacccttcatccagattggagttcagctgctataagatcagccattatgacttctggtaacataacaaatctcaaatcacttagtagcttaattttcttcaattttaaacttcgattttaggctatgtttggtagagaagaaaagtgagatgaaagaaaagaaatgagagaaaaatgagaagaaaattatggtgtgggacccaccaaaatttttcttctctaattcgaaaagaaaaatagagagaaaaatctcctataaataaggataatgtagtaattttattatataataattttttttccttattttttttttctaatttcatgatttttattgtagcaaggactagggataattctaaccaaccaatgttggattcaaccttggaaaaggcaacaccatttgctttcggtgcgggccacatccatccaaaccgagctatggaccctggacttgtctatgacctaaacaccgacgattacttaaacttcttatgcgctcgtggctacaacgaatcggtgcttagagttttctcccataatccatacaaatgtcccaagtctacaagtttgttaaacttcaactacccttcaattacggttgctagggttggatctcgctcggtgattgttactagaagagttaagaatgttggcaccccgggaacatacaaggcgtttttgagagtgccagctggcttttcggcttatgtgaagcccgaagtgttgaaatttagtaaagttggtgaagagaagtcatttgagattgttttgaaggctaaggttattggaaaacctaaggattatgtgtttggagagttgaaatggtccgatgggaaacataatgtgaggagtcctatagtggttaagtactaacaatggaatgaaaaattgtgttaagaaaactataaaaaagaaatagttggatttgaatagatgattgtgtaaatttgattagtttataatatggtaattgtccttaaattatgtaacacaatgatcctaattttatgttccatttcggacaaaaaaaaaaattaagattgtttgatggtggaaatttcttgcattaataaaacttccatgaatgaaatgaaaatgccttttttttattatttatatttaagatatcatatatatatttataattttctaaaattattctcaaaaggtcccaaataaagctattccaaatgtggtatgaattgaaataaaagtgagaatgagaataaatattgtaatgagaattagcttctattttaaacaagaaacaattgttattaaatttattcttctctttttattgcagatattattgtaaaacaaatacaaaaacaagtgattatctttgtccccttgtgccactttaattagcccataaattatgaataataacttatgaaaaatattaacctttaaatattgcaccatgtattacaaattatctatggatgctaagttcatatttatttttcttgtgccatattcaagcacattttttttttttctttttgtgtttttgtgtctcttagattaattcatgtccatgtcaattttcataataattatgaatttccacataaattattattttccataatacttattatttccatagctattattttccatattattttgtattttaaataccttattttatataaagaatcataccatattttatgggatttactaatgaattattttattttgacttttattaatttataagtttattcctatatgtgtcaccatttaaacttttcaccttattttaagttgaataatgcatttctctttatgtgtcatacacatcattatttttattttacatgaatattggctgtcattaattatttattttatttttctatatcaaggtacctctatatagaataagacttaaaaaaaattattttgtccttacaaaaaaagaaaaaaaatgttttttgtaagatcttttattatttctttctttatttcttttgtaattcacatttcaaacacacaatatttttaacatatttttatcattatattagaaatttctaactcctcaaaaaattattctgatagatttttttatcgacattgatgatagttttttagttttttttttttttttttataagcgatctcatacgttatagttatttaacacggtttataaattttcagaaaattttaaataaaataaaatctatctaaacgggtagatgtcatgcaaatttttctcatcaattttcttacatccctaattatagattcaaatatgggagtaaatcaagtcaaccaaaaaaagaaaaaaaaatgtagaaaattttggacgtaaaagtgaccaaatgcataataaaaaaaagtcattaatccaatttttaagtgacctttattaagggagtatataattttgggatgaaattaagcaaagacaactattacaacaaatttttatccaatcataatataaatcctacatgaaaaaacaaattgttaagttgactaaaataatcatcactattattattatttaaaaataaagataaaaaaaacctatttatagatttgttaataataatattttgctacccaaaatagcaaaaaatcaagctttaaaaacaaaggaaattgcagcctattttccaagacaaatattttttcttcttcttttttttttctttgattcagagagaaaagaagaaattgaagccatgggacatagtttagtttcttcttcttctcttgttcttgtcccaatggtacttcttttctctctgtttcaatcgccaaccgaagcaattcaaaaggtaaaaaaaaaaattaaaaattaaccaaaaatttttcataacattttcttatgttatcttttttctttacttatcaaaattctctaattgtgtttgattttcatgtagtcttacattgtgtacatgggagctcattcacatggcccgaaccctacctcgattgatttagaaaccgctacatcgtcccattacgctatgctcagtacttacaaggggaggtacttagctaattttgacacaaaaatttctcttctttgttttttcttgtttgtttagttttgttgtatatgttgttaaattttttttgtttcgatcgaattttaatgcagcgaggaaaaggcgaaagaatcgatgctttactcgtataatacatacatcaatggctttgcagctgtacttgatgatgctgaagctaccgagattgcaagtatgaattttactctattttcctctgtttactctgtttttttaagtttttaataagtaatattttttttttgatatagagcatccaaatgtgttatcggtttttgaaaacaagccaaagaaattgcacacaactcatacatgggattttcttgaattggagaaaaatggtgttgtttcgaaaagttcgttatggaaaaaggcacggtttggtgaaaatacaatcatcggaaacctagacaccggtaaatatctcatttgttaggttattatgccctaaattgtttaaaaaatcaaatgaaattgttgtaaccattttatttttgtatgaaattgtatttaggtgcttggccagaatcaaaaagctttagtgatgatggaattggacccattccatcaaaatggaaaggagtatgtcaagatgataacaatgataaattccgttgcaacaggttcattcaattcttttatatatataacaaatttttgacttgaaatattataaaaagattaagaataagaatttgcagttgatatagtttgaatgttacgt

SEQ ID NO: 19572 - DNA, 4838 bp, Cannabis sativa
aattagataaaagtccttaaatttacgtatcttaatagttcaggggaaatttttaatggtcaaaagagttgaggaacatgatttaatacatgtcaaaattcagaaaaagaattagtaattaatctttaatgtaataattttagaaagtattagtaaccattactaagcatgaaatatgatactaaagaacgagtcatacgtagtcttatactctttatgtatgtatataaagccacagaacagaacaccttatttattattggtacacacaataattgttagcagatccattttcattatattattgatcttcttctttctctttgtcttaatcttaattctcacacgtaacttactcgtttgtattcctcatcaaacgcggttcaaacacccacatatatatatccttcttcttcctctgtcggctaaccatactcagctcaaaaacaaaaaacaaaaacacattgattcaaaaacgatggattctcatcacagaatctcacccgaagtgacgtcgtttagaaagttccattcctcagcctctgccccccctcgtttgattccaaaacgtggtctcgtttttaaacgagctctcaaagctctttccacttgtctctgtttttaaaaacaccaattccaaaacgccactttttccaatgtctttccttcttaaaaatttgatttaattatattaattaattattgtttaattcagttagcttccttgtttttttttttaagaaaaaaaaatccagaaacgaataaaattagtaacgtttttaaatacggtgttccaagtatatctcggcgggtgtctcaggatgggattttaacggcggctactcggaacggtcttattttatttttgtgtattatttcttttaatagaaatagattggttattttaatgtttattttattctaattttgattttctgtatttgattatttatgggcttttccaggattcatcaccaaaattttagtaataagaaaataaaaattcattataatgacttttatttcaagttcatgttcaaggttacaaataattcattagcattcttccaataatgataataataaaaaaagcttaaagtcaaaagagttaaaaggactgaagtgcctatttattaatgtaatttattgccatatatgattggatctggttgactaattgactccatagtccgtaccctgaaacctttccaaagtttactttttttaaaataaggataattttatttaagttatagttaatttgaataaaaaaaccattaaaaataataatttaacaaagcttccgacgtggcagttctttattgcatctcttccatgcttgcatcactggacaagtccaattagttatcgccacgtggaaataattttgttgaaattttcttcatttgattgtaactttgtaagtagaatagtggtgagggtgtaggataactaaaaagggaaaggaatatagaatcattgatgtctggctttaaggaaggaggaggtgtgtgtatgtgtagtcttagaaaagtcaagactacgactttgactaatcaaagtcaaagttttggctgccatttcattcaagatgttgcacaacctttcttgtaaaatatttatcaaggcaacttcatcaaaagaatatttatcaaggcaatgtttgtaggatggaaagaaattagggagaatgataatggagaataatataagggaaagaaagcaaagtgataatctttttaatttgtttggtaaaatgaatagagtagtctaatgatagataattatttatttaatgaaataactagattatctttatttaagaatatttgttgagtgtattttttgtaatttataattattgaattggggcagtttcagttttctcactctttttttctctcattcaattcctctctcaaacaaaggaatttgttatctctatttttctcccatctctctatccacctaattctccctggatcaaaactacaaaaatcactactagttttgcctaggacatttaaacaatgtgttggcaaaaatccaaggaggattatatgttttgttatggaaagtgtcgatgctgaaaagtgaccaacattaacttgctagattggcaagataaataataaatgtaagtatataatttagagagatacaaaattcatagtagttcactcttcatgtcgcgatagtaatagagctacatctacttcgagtttttattacaagaaaaatagctaagtgtggaggctctaatttctagagagagaaactagaaagagatactttgaccttatgactacttttttgaatgtaaaaaataagctagaggagctctccttttataggtgacggaggtccttgaaaaaaagaataaaataatccaaaaataacagtgaaaattaacttttaaggttgatcgtcaaattttagagcctagatcgcgacaacgggactcgctctgggtaagttgcagcttgaattcgtaactcccttggggtgaaatttgaagtcgattacttgagaattgcgattgaagtgtcatatatgacttgatagagcattaaaatagcttcgaaacgcaagttgaatcatgtcaatcagatcaacattgagtgagttatgactattttactgaaggttgtttgggccctatgcccaagttgacatatgacttcaacttggacgctgagtgagtggaaaatattatgggaatgtattttttgatgcctatgtgatattttgacatcacttagtctacttttgtattatggagaaattggtcaacaattcttgatgatgttgctgctctgcggaaatgggagactcgaagctctaatttttctaggtagtttaccatgttagaaatgagaaatgcaaagttgtgaatttaacttctttgacttcatggctctcagtcattgtgaaaaattatatgaacagtcacgacaaaatcaaaatcggatgagcagaactcagcgcataaggactacatatgtcaactagggcattgggtgctcatttcagagctcgtgatatgtcgttttgatactttcaaggttctagaacttgagaacaagatattctaccccatttttgaccatttcggagagaattttaaaaacataacatgcatttgaatcacctaaactagcgcagcaggtggattatcaagttgggcgctaggcccaacaccaagtcgacctgggcattgggatcagtttctaggcccccaagtttgtagtacttttctccccaagttttcttgtatctttgttatttctggtgatggaaaaaatgcgtggaacattttttcaagaaatttattggaactagcccaggttgacaaacctaggcgctgggtcccacttttagcctcctgaaagttccatttggtctccaaaaatagttgaatcttaatctttgctgaaaatggagaatattttcagaagagttctcggaaaaaatccttaaaaatggcccaggttatcaaccttggcgctgggccagccccaggtgttaacttaggcgttggactcctattctagcacacaagttgggttgtttcttcccataaagcactagtttcactgtttttgatgaagataaagaagatgcaagagttaaatttttgatctgatacttggaagtggccccagattgacaaattttcaacctaggcgttgggtgcccgagcatcgggtgcccaaaaatgatctttctctgatctgattctgatgcctcaaatatgttcgtggtacatctctcaatgcaaagtttgacccattttcactaacacgattttgaaaattgacaccctaattaggacgtcaacttgggcaatcagtgaaaccataggtgcccatgttgacttttggggtgcaggttcatgtaatttcaactctcaaagccttgatttggttgttgcatgtattcatggtacaaaatattgaagacagtgagttggaaatgagttatcgaagtccgaaattccattttggagttttcgaagtcaacctaggcacaaggctagggagccctcccaggttgacttgttatgactcaagactactcaactccaagatgtcatcttttttgccgtgtgtcaaacattggtgtccacgtcattagggatacttttggtgtaaacaaaaagtaacccattttttttttgtcttaaatattgaatttgactagattaatatcacatcagtactacattagatagttatttaaagaaaagagcagaatgtaattcgttgggttatttgtagcgatttatagtttagggggcaaaactctaattgttatctgtgttttgaaagggtgatacatggtatctctagagtatgattaagcgggaatggcctaagtcaaagccctcccacataggaaggcctaatctatacggaagatcggcccgagcccatctaaagctgagaagccttgcctccgaagacgaggctcctttggatttggaaggcttctagccttttagaagacataataagggaagacctctgaatgagcactggtatgcacccgaagggggaattccaagaggcgcctctggaagtctttgaggggtgacgtggtcgcctctgacgtttggtcccaccaaattaaattttgtttcgtatgttagaccatggtagtgcacgcaccaccaaaatgaatacattctttttgctaacgatgcctatctaatatctttgtctactataacagtgcccatgcgtgacacctgtcccagactgtgcgggccccatttatatttttactatttttcataaaaacaacacgaaaaataacaaaaaaactacataaaagta

SEQ ID NO: 19573 - DNA, 6622 bp, Cannabis sativa
  modified_base (38)..(46): a, c, t, g, unknown or other
  modified_base (74)..(77): a, c, t, g, unknown or other
aaataagtgatgaaaatactgttgtttctttattgatnnnnnnnnnataaatattacattgaaatggagttttnnnnagggcataaaacccaacaataaagatgattaatttacgaggtaacatatatataatttatattattagatgaatatgatttctattattgatataatggttttgtattgctaaatattcttatactgatgtttattcttgatagatgtcagtagtgatttggatctcatcttatgagtaatgtgtgatcctttgattctgatagtctgagtataaatgataatattcaaacaataaattatatgattattgttattacttttcttgttgagtccttgtggctcacatgtgctatgtggtgtaggtaaaggcaaagaaaaactagttcagccatgaagtgagagtcttctccagcaatgtacttattcatcctactggcctgtgtaccgagtttctaggagttatttttgggctgtatctgcgatgtatttttatttaatattttggcttattgtcatatttagcctttgtgtaaaacttttacagtagggatccccaaaacacaattttagtgttgttatgatgtccttttttagtgttttattttagtgaagtttttaatattatcacagattttaataattaattattttagtactattaaactagtttataaaaccacactcgtggcgctcctataggataggacgttacactgctggagtcctcatctgaggggttatttgcgattctgtccaggacatggtgcagtgatttttaccaacccatcaactggaaactcctccttatccagggacttttaggcaagtcaaggtgacctgtacccactacgaaccaacttttggaattttcaagcgatccttgagcgatactccatgctgagtggagccagactggctagcatttacgtgactagatcctcatcccaggggactagggagatgtctgattcaacccctccaaaggtcgttcctttcgtagggataactagaaaagctcttgcccatggatgctaagtgggtggacacttttttgccctcgtactgactggctttaggccccgagtcttggtttgggaagcatgtgagttggaatgtactatcctcccgactggccagcgaatgacgcgagcgcgacatgtgttctacttttcctatgcaactttctttactatcgcttatggggactttcaatccctctcagctgcacatggcctttttgaagttgtggccacctgggcacctacaagcagtgcagagctctgagtctgagagcgcgtagcacagtcccatcttgagccgacagagcagtgagtaccgtgagatgcgttccaggagctcgagggtgacctattcctgggggaggttttatagtacccttctgtctgggaacaagcatctttctgggaacaaccccctatttggtgtagaaaataggaactcggacatgttgtcctagacctcttgttgtgaccactgtcttggactcgccttacaagatgttcgcactttggacaaatgtttcacttattcccatcatttcttctgggaatttttccccttcgacatcttcagtccatatacttccttggattttttcagctttggcctgtctcttttttctttaggggtttctcaagctatgttcttgaaagtatgttttgaacagctcaggaagcattttctatctggtccatgtctcaccgtacttaaagacataggtctgcgtaggtgaagacactgacacatgatattccttaatagttagaatgcacggggtttcgggaacatgtactgaaaaggaaaacccaagaaaaaaaaatagagtgggcactaatatcggaggggcttcggaaaactgccggtgcgtgtaccttctaaatcaaagaattccctgggcccttgacaaatgcttagacaaagttcctacccttgtcctatgcttagagtcgtgataccttttgtagccttccacaagatgcttgttgtcagaataatatttcttgatatcaccatcagactcaggtattcccacaccttgccctttctacacggttgtgcctctgtgagcaaaaagggcgcctaggcttaaaagcaccgctggccttttgcatcttcagagggtcgatcggtcagactcatgctttttcgaagaaacatggaaatggtagaaaccccaagacttcctacattcaccttcccttctcctttagccagggaaggggtgtcagcctttgtagaactatctctattattctcaacaacaccctcaatcgatgggtccttaacacaacctcctctggttggatctttgggcctagcaggttgccaagccatgacctttctccatttcatttgtgatctcttcttcttcataatttttaggctagtgataacaaccacaatgcaagtttagatcttttctcagctctcaatgaaaacaccaaaatatttaccaagatttttagaaacgtattaataagaacttaaggaattacaagatagtaaataataaacaagtagattttttacatggtttaggcgttaatgagccttagtccacgagtcagttgtattagccttctttggaaagtatttgagtattacaagtgtttacaatgacaatctctttattcctcttatttctcttgtagaagaaagctcttaaggaattttggcagaggttttgtaagtaaaaattgttcacccttgctcatgaaaatctcgaggtattaataggagaattcttgatcaacatactttcaagattggccttactataaaagatctaacagttgatttggtaggtggcctctccatcatgcgatgcgtagagatgacgacccgtaccatcgagacctttcataagtgtaacccaaaggcctttcctttaagaatcaccatcttaaatggccgctagataatgggcaggtacaatggtacacatgcctcatactatgtcctggcatgggggaaaaaaactgatgttgtacctgaaaaagcattgccgtcactcctgtggtcagacaagtatggacgatggcctcgtgcaacgctgtatggtagtaaaacctgtcctttttgctacctacatagacatacttgtagagggcattgacttttgtaaggcatttttgaaccttgaaggaacacctttgcttctgctcccaggaataagaaatggcatgcacgctgactctccacgtgcccctgccttgaggtggtggatgcgcccttcgtggaaactgggaccgaaggcactaattagctgaagattaacttggattcttttgtgggattctacatgccatgcttgcaaaaatccggacaatactcctagtaatcgagtttcttaaaaacatggtgtactatgcaagtgttaaacggtcaagcaataacggataaagtaaaataaaaaaaaataattggaataaaagttctattaagatggaaataatttatgatttaactaaaacaaaattctaataacatttactaaggcttatccacattgaaagaccgcccgagaacgaccaactaacacactaaacctaaatgctaaaaacaaaaaacaagaattcaaagaaggtcctagaagcctattatgtcaacaacaaattcctccttgtcctcacttttggcaagaggagcatcacccacagaaagaggaagttgggatgcttaaggttgtagccttcaactcttgaagtctctttgactaccggttcaccaccatttacagtgaagttgattttcttgagagtgtcgtcaccaaaacacggttcgcaccgcttgatgaagtcaggcacttctgtatcagggaagcccttccatctgaaggactcggctccaccattggtagcccaagcagcatatatggcatcaaaacacaagccattgtagaaggtaacatcaagaagagcctgatccccgagggtagttactcttttctttaagacattgacttggtctctcagatcattagccacaaccgttttctcatctagtgcattacgagaatactcttcatgatcataagtcttcttttgagcagtcgccaagttcttcttcaaattactctctcgggtcttggcaccactagccacttcttagagtttagacatttcactcttaagagaatcaatcttctccttcaaagcagtcacttggtcattcgtagcgacagtacagtcttttgtgacccctagctgctcaacaagcttaaccattttcttgtgttcgttatccatagtgtaggcataattaacccaagcctgaagacatgaaaaaagtgtcaggtgatgataaaataaaagaaagttaagctataaggagacaagacaaaatagttaccccgaagatgtcggtgaagcacctttgggcaatgatgtgcagaggcttggaactaactaaccactggaacgggatgctctcagccttggcacaaattaagatatcactatgagcaagaatccgagagctttgctcacccaattgctccaaaaaatctgaactcgagtttggagcaccatgtttaatttcatctagaaaaaggtcaatcagagatctttcatcagcaccagcagtgttagacctctccctaccaaagtcttaagcaggaagagtagcatcagcagttctagccctcttctaaaccttcttctttgaagcatcagaggcagtagggataccctaaaccacattccttaccgaaggttcagtttccatcagcaccaaaatctttctcttcatgtttgaacaagatgccataacagccaaaaagctcatattgtctacaaagaaaaaagaccagaggttagtacaataaaagagaaacaaaacaacaaagttaaatgcatagcatggagcatcaaccacctattgattccccatccttcctggagtagtttgagtagaggtaacttctccatcatccttgtctacgaacacagatattctccttgaatattctatgtcatttcaaattgaagacacttctcccatcagtatctgagacaagatgatagttttactatgagcatcctcatcatttttctcaagtggtattgtccaagattcatatcgaaaaaagtgttagcataactagcatgacatgatcatcccaacctttcgaaaattttcagtactaaacagagttttcctatctctctcccatgcatcaatttcaagtagcatggcatcagttctcctcttcatgtcaattagaggagcaggccttttgaaagcaccaactttttgaaaggtaatgtgtctcaatagaagaccgcagttgcttttggtaatatgttctatgagtgggctaaattggtaattcaagcttcttctttacaggttggacttcttttcaagtcgcaaaggaagtttatctcatgcaaagtgggaataggccagttcttaaggcagtagaatatgaagaaggtggcaagaatcctataacaatttggatttatctagtaagggctgacacctaaaaaaccaggtatggaaatgaaccatggatgcaagggcaagtaagcacctgcattcatgtggaatctcgaccagacactacaacaagtattttgagagccattgggaccaacgtattgtggcttctggacaatagttttagggagatagtaatcatcccaaattaattgagcttaatgctaagtaagagtgataaacacaagaggcctccccttaaagtctcgatctctcggatcgtcactctcaatggcagctttaaaaagctcagttgccatcattttcttgccatgcaccttgtgtaagttcatagacttaggcatagttaacttagctctaataaaatgagccacatggggatcatactcatcaggtaaccttctacttctcttcatcctagccatttcaagctcaacaagttaagctgcttacaactcaagaaaggtcaaactgggttggaaaagtcaaagcaattttggaggaacttttcaaggcactagaaaattgttttggaattttggagttttagcaaaattatttcaaaggtttttaaggagactgaaaattcttggagtaagaccaacaaaggagcaaaaggaaaaaaattggcgtaaaaaacaaatatgtgatttttctaccttagaatgaaggatgcttgaaggcttgatgaagatgagattctaaattgctctctaaaagcgataggtatctggagtatgaatgaggaagcgtaaaaattttgatagtcaattcacttatttttaggttaattcaatctcctaatcctaaagctaatgagagtcttttaaaattaaagcttttaaggaacaactaaatgccaagtaaataatattaatatatcttttcccttcccttttcaagataattttgaaatcctatgcaaataggaatagaaatctgaatttaaaagttaacaataattcctaatgctattaagattaaggaaaaattagagaattaaaataaaaagataaataataagaaaaagatcaaaattattttctcttcttattttttcctctaatctcgaatggcactcactaataggattaggaatcgaaattaagttcggtaaaaa

SEQ ID NO: 19574 - DNA, 5471 bp, Cannabis sativa
agccttgatagctgaagaggcagagcaacatgtgatgaaagagtagactgccaaggatgccgccacggcatcgaatcctcatgtgggtggtctctgaccctgaccttggacctcggctctcagatgttgcaacccagccatggtttggcctgaaattgacccctagacttggactaggacttgaagttatcattcaccctcaaactctgaacatcagacgttggaatctggacctgacccccagacatcaaacccaaatcccggaccttgaacctagcccctggatctcagacccaaacactaaacactggaccctagactcgaccacttgacctcagacatgaacctcaaatctagaggggaactagccctaaccccgaatcctggattcagtgctaacctttggaccccggccaaacccgaacttggtgatgacccccaaacttggacccatacctacacccatatccacacccgaatccgacctgacccagacctcgaactcgaacctgacctagacctcgaactcgaacctaacctcggaccccacccctaccctagaccttaaccccagcctcatgacttccaacccaaacctcgaacctaaacctcaaaccccaaacccaaacccagacttggacttgacccttgtccttgattcccagtcctcggtccactttctctcacctcggtttctcatttttcacttaaacaaaaaaaataaacatttaaagaacatacttatattttatatttttaaaataaaaaaacaaaattagttacataactcaaaataaaaattctattttcatttttgatttaaaaaactaaaaaacaaaccttaaaaacacactagttggagtaaagccgagggtaagaataacaactgcggaacaagactcggtagtgctcgagggaggaaggatcagagttaagcagtaaaagcactgacagtgagaaaatgaagtacatccccgtggttctgatgggttgtggaggagttggccgccaactcctccaacacattgtaacatgccgatcccttcacgccagccaggtctttctcttcatcatatccatttcgttaatttctgctatctgggttttcttgtacacatatatatatatatatatagtgttataccataaagtaactgtgtgggtttgagtttgctaacatccaaaacttgaatatcttcgtaaaaatttgacttttataattgtgggttttctgttttgtgggcagtattgtactatactctacttatgcttctggttcaatatgattcatagtaatataccatctcctttaagcatacagttgatgtatttaaaactagtttctcatactgggaagcattgtgtgagtggcagggaatccggttgagagttgtaggagtttgtgatagtaaatctttagttgttgctcctgatgttttcagcatggagttaagtgataatcttttgttggaggtttgccgggtcaagttggattcttcttcttctctgttgactcttaatggttctggtacttttcttgaattaattattattttgatgaggttaagtagcaatttttgtgctctcttttgtgaactgaaactgaggttgattacttcgtcaacaaaggtgaatgccaggtatattcgaatcccgaattgaccaagaaaattattgacattgcagctctcttgggtaaatcaacaggtttgtggcatctatatggtgttgtattatatttttagactggcatggtttagtctttcttgttgtcatttcgaatgttgacaattttttgttacttcttgctataggtttggctcttgttgattgctctgccagttcagagactattggagtgctaaatcgagtggtagatatgggatgttgtgctgttttagcaaataagaagcctcttacttgtaaaatggtagggaattggtaaatggatgaaagtattgttattgaatgtgatgcaagaaacatatatgtgtactcacttgtgtcttaatttaccacacattgaacacatcagatcaagaaagaagttgaaatgtaattatgtggtcaagtaaaggctcttccttttttcattatttgcaggaatttgtttgtcattgaactttagtatattcttccccattctgtaagaatagcacatgaaatgtcttgaataactttctttctctggcctacaggaggattacgacaagcttgtttcacatccccggttcattcggcacgagtcaactgtaagtgacattttgaaaagaaggaataacggttaaaattttccaacattcatttatatgggattgtttctcaatgaattagagattttctttctcaacagtagagagctttttgtttgctagacacatgcaagtatatctataggggagaaagcattaaagataaaattagtgtcttttatttggtaattactaagatgatattgctggaagatttaatgcctacaaccctttattcaagggaacaatctgtttatgaaccatagcatgttatttcgaccattacactcacaagcttctgacatttaagttttgggctacttggttagagcattgaattacaggctagttcaaaatgtttggacttatgaaattttaagtttgtaccaactggagaatagagattcaattcttaatgattgtagaattttctctcagtagataacagcttatatttctttcttttttccttctctgatctggtggtgtttagaacagacaacacagcaatcagatatgagtttgggaagacattgaatattatatttttattaaagaaataattattgataagaaagagggagctgattcagtaattgaggttcagcttttggacttcattcttgaaatatgattacaatattcaggtaaagtatgctaaggtcccaaattaggattattatatgaaatataatgtagaggattgaaaaaggatagtagaaaagtagatggaggagaaatgatagaaaaagaagaggtagatatagaatgtatcttggggaatttttaggactaagctttacgcattcgaactagatatgctatctatgtcaagtatatgtttttagcttatccctcctgagtacctacatagcaattgctatagtttcctgatccctaaatatagttatttttatctaattttcacatgaaaattactctaattggaggcagaccctgatattcctttcctgcacatttccaaaggctgaaactaagctaaaatcctcaaaatcaactgtgacactcatttttttgatcacataatcatcattaaggtttaagttctttcagcttttacatagtctagaaaaggcattatgctatcaagtgctaattcgtctgaatatcaattattctgagctcaattgtgaagggaagattaaggaattttaagagtattagtcattttgtaatatcaatttgcagaaaacctatttgaaaattttcttttgtctccttttaatgatgattgtggtgttgaccgtgataaaaagaaaagagaaaaaaaacctataatacgaagagttgaaatatacacaagtacgacttactaaaatcactttcaacttgatatattatgcaaagggaacactgtagtaaaagagaagaatttaagcttgtgtatttttattgctatgccagcgcaagacttctcatagaaacatggtttagtttgaattgtcaccatttcatttgctgacttcctcccttttggtttcaaaagagaactttttgaggacctttcaccctcttcgttgaacaccatacatgttttgcttttattgagtttgttatgctatgcaatgcagtatgcagtgcttatttttctattactgtattttttctgttccaatcagtagacacttgtataaatttattttcaatggtaggttggtgctggccttcctgtcatagcgaccttaaatcgcttactttcatctggcgatccagtgcaccgtattattgggagtttgagtggtactaggtcttttcagttattttttaaactagtaacgttagatgattgtttatgagattttcttgatttatcttcatatcatcaattttacatttggatttagaatgctgactgtaaagattaactctctcataccataggcacactgggatatgtcatgtccgaagttgaagatggaaagccctttagccaagttgttaaatctgctaaaagcctgggctacactgaaccaggttttgtaccttagctccattttagtataaacttttaattctgtgtctatagtctttctgttacttgatgcttaatctttctacaatacataatttctcgttcgtaacataggatatggtttcttttcaatgtatctgttacttgatgcttaatctttcaatattatgcgttagaattttattttattttgctttgactgtagaaaaccaaataattcaaggcgccaagtttatcatttaattatcaagttttcattttctggttagcaaaaagagagagacagagagttatgcttttcaacgaggtttctttgtgtgcaaaaaatgctcacacatgctttcatcacctcaatgatggaaaaaaagattttaattctttacatcaatttgaattagaaattaaagttaacttgtttatatgctaactataaacaaggtggttatttagcttcactattaattgttactcattttttttttgaaagaaatggatcttaaaattgtgttatcaaagttatgttgtttgatcttttaactggtgtcatcattcagatccgcgcgatgaccttagtgggatggatgtagcaagaaaggtttgattttggttcacttcatatgctattaaggtttattggtttatgtacttatttagagtacctttgcttgtgtcttgcaattaatcaaattcatatacattttaatcctcaactaaacctttcaactgaattacaagttagaattgtcctcttttctcctttcttttatccttttctttcccacccaattggaaatttaattattaggttaaaatattttggtttaatgatctaaaagcataagattagattaattattaaggtaaaatattttggtttgccgcgtcagtaccccgcatttcacacaaagcttttgaaaagttcggttttttatttgacgcacatgcaatcaaccacaaagatacttagaagttatgaattggtcaattaacagtcttataagattcctgtgcatggtaaatatttctgttgattagagaaatgttgtttcatatggttttaatgagaaaggctaaatttatcgaaattttcttaaaacaggctttaattcttgctagacttcttggccaacgtctgaatttggatagtataaaggttagaatcttatttcttctgatgtaaagctagatttctaattatctttttgtagcatacccagtataactat

SEQ ID NO: 19575 - DNA, 9331 bp, Cannabis sativa
  modified_base (54)..(58): a, c, t, g, unknown or other
  modified_base (1216)..(1230): a, c, t, g, unknown or other
tcaatcacttcaaatttcttatgttgattgctaatcagattgtaaagagttttnnnnngggcataaaacccaacacaaaggccaatgtcatgaaccgtgaagttttacagattattacaaagaaaatcgcgaagttttaaacctagattttctacctatcttctacaacaaagtcaagaacgcatgtatgaaacccagaaattaaacatgcaaagtaaaaagaggaagaaattgaaaacttactcactatttgttgtctggtttcagtccaaatgaagctgctcggatgcctttggtagaaatctgatgacagacttgaagtgaaaaccttttttgctcttagtttgcttaatggagaaattggtaaaagtgaatttgtgaatgatgctcaaccctatttataggaaaaaagtgaaaaaagggtaatcatttcaaatgccttagatgcatcggttccccctaaaagcaaatattgggaatcaaatataatcaagtgtaaccgtcaaaacatggtgagaaaaacgaggtttttgaggcattaattgagtcagagcattaattagccaaaaactcaagggacgccaggtcagcctcacatcaaatcgcgagcagacgtgcctaatacgtgtcacccattcaaatgcaagtgcagctcagatgaagtctacacgcaacttcaaaagtcccgtacagacttggggggcaaatgttatcccaatttttgcactttgatgtggcatcatacgatggtgacacgtggaatcaactttatgtacctgctcgcaagagatatgccgaacaaagcaccacatatattcgctcggacgaagccttcttaacgaggcagtgagcaatccgaacagcatgccaacacttagcaatttcagatttcgcattgtgagtcaccgatgaaaaccctataattttaggatcagatcacagagatatggcaagctgtccaaatcccttaattagtgtattctgtatttaatatgcaatatttccaattatattaattataattaaaagggaaattcttccctctaaagcttatagccctataaatagtgattcatacccactgggcaaaaggtcgaaaacttgtctaagaattcatattcaaagatactagtgtaagagctgtaagaaaagtgattatattccttgttcttaagttaatacaaaccaagaggattaggctattacgaaactgctnnnnnnnnnnnnnnnataaaattcttgtgtctttatttactttattatattacgtatacattatactactttttgcttacaatctcgactcactgtcgttggccaaaagcgaggtcaacagtaggggtcatcaaaccttgtacacttattggtagtatttcgtcaaacgttcccagttccaataccttggaaccagaaccagttccatgttttcattataccgaccaagtttatatgctccagaatctgtgacttctattacttgatatggttcttcacagttaggtccgtgcacgccagctgtgctatcttttgtgtttaagaatactcttctaaggaccacatctcctacaaagaacttccttgccctcgctttcttgttgaagtatcgagctaccttttgctgatgagccactagctttaggtttaccgatgctcttttttcttcaatttcatcaagtgattctaccaggagggtgtgattgatcataagttagtctcttgtgggatggaggctctaactcgacggacaacattgcttcataaccataagccatggcaaatggcatctacccagttgctgtcctttctattatccatacgaccataatacttctggtagttcctccagccagttctctttagcttcttcaagctgctttttcatggtgtctttgagtgtcttgttgtctactttgacttgtccatttgtttgagggtgtgctactgtagagaaactcttgatgattccatgcgtcgtacggctatcaatcttcttgccattgtttgagacaatcttgtgtagaagtccataccaacatatgatgttcttaactacaaaatctagtactttcttggatgttatggttgctaagggctcaacttttgtcaacttggtaaagtaatcccctatgaccacctcatattgtactctgcctttgcccttaggcaactgttcgattaggtctattgcccatatggcaaagggccatggacttttcatctgagttagctcattaggggggtgcgtgggggatcttcgaaaatctctgacacttatcacacttctttacgtgggtctttgaatcttccatcataattgggtagaaatatccttgccttagtattttctttgacaaactttgccccgcagtatgattaccacaaaatccttcgtgtatttcaaacaggaaccgttcagattcttcttttgttacacatcttagcagtggcatggagaagcctcttctatacattacaccttctactatgatgtaccgagcaacttttctcatcatcttctgagcctcgtttttattgtttagaagttctccactgttaaggtaagctactatgggtgtcatccagttcagcaatgtgtttatcattttgattttttctacacagattatgttgggttctctcaagaattggattgggactaagttggccttatctgtcactatgctgctagcaagccgcaccaaggcatcaatagttgtgttttcttcccttgaaatttgcttgagggtgtaacccttgaattatgcgactaggtctctcataattcaattaggttcatcttttctccacaagccatgtactctcttgagacttaacttaccgcaagctgtgaatcactatttctccgtgtagaggttgcccctcaggtgtcatgagataaattcccacaccaaaaagctgaccggtagctgatccgtccacatgcaatttctagataggtttgtctttattctcttctggtagagacttttgtactggctcggggcttttaactgtctttgtcttttcttgtacattccaccacaaagtccgccaaggccttccctttagctaatgtacagggttgaaagattatttcatactgacccaactatatggccacttgagtaattgtccaaaggcatcaggcttttgcaaaacttagtgcaaggtttggtcggtataaacccaaacagggtgagcttggaaatagggccttaacttccttgtggctgagattagacaataagtaagcttttcaattaaaggataccgaccctctacttcaacaagacatttgttgatataatagactggatgttggacattattttcttctcttatcagcacggtgctcacaacgtattttgtgactgccaagtatatctctaattcttcactttctaagggttttgagagtacgggaggtttcgcgagttgtctttttagttcttggaaagcatttttgcattcctttgtccattcaaacttcttgttgcctcgcaagatgttgaagaagggaatgcacttgtccatcaattttgaaatgaatatgctgagtgcatcaatccaaccagttaagctttgtacttcctttgtttttgtttgtgacttcatatctaggagggcttgtattttctctaagttgttgtttggcgttgctagtgaacttgcctttctttccattaccttgtctattgttgttattggacgtttttccatttggattcgagctgttgagatattgtggattctgggcgagagtaccagttgcggtgtgttgttgattcttcttttgcccgacggtatccacatgccgtactgcttcctcgagcttaatgaatctatctactcgatcgaaaaactcagccattgatcccacagttaatcttttgatatctttccataactctcccagaggctcaatgcccccaagtattgctgctaatcttccctcctcagtcagccctttaacttttgttgctccagtcataaacctgctaatgtaagcccttagaggttctcctggcatttgcttcacttctactaggacttctaggtccgagggaagctaacggaaggaagaaaattgtgcgtggaatttagaggagaaagaaatccatgaattaaactttcctggaggcaatttgaaataccattgttgggcgacctctgcgagtgtggctagaaaaattctgcaccgtacaccacctcttaccccttgcaggtccatttgcatttcaaagtacatacttcaaatgggataaatgatcttcttttcctgtatacattttcaatattggcattttgaactttgtgggtagatcaagagcttcaatttcaggtgagaaaggtgatccacgtgcccggttgagtttgagatctgtgagttttgggtcgttcaggccttgtaccatgattttaagttgatctatttgtgcttgcacaagtggatgaacttatcccacttggtcactggcctgtgtcacaatgggatctctttgaactggatctttggagtgggtatctaggtggacggtcggtggattgttttgtccgtccaatcctcttctgaggtcatgcacggtgactagtcgattaaacaccgaggcaccaggtggtcttggtgttttacctgtttggctaagaggttaacttgagacctctgtatgagtatagttgttcgaatgtgtacctcctcccaaggggcggtctcgccgtctaccgtttggacctatagccttggattggatggctcaccattatgagtttgtgtggtatgtccagctgcatacccttttgacccgcttagagggatactagatttagtttctggttgctgactggtaacttagtaggcccttttgatcagcttggcagcttgcctaaaacgattttcaatggctacttactgagccctcatcacttccatctctcgatccctccattctatgaattgacatcttcgctcgtcgaaggcaaggttaatagttactcgaagatcttcgtgatcatgatgcaaattgttgttatggccttgcattagcccaagtgcttctcacaaatttggaagtttagtaccatctccagctggcctttgaatgttattagtggacgggacctcggtgctaggagtggtctgatcggtagtcgtactggtgttcccagtctcctgtatgcctagtgtgaacccagctagaggggaaatcactccatggcctatcgcgggtggttttgtaataatttgtttggggtttgtccaaagtggtcctctcgtgttttcaagagtttgcaaattcagatgtgtcaccattggatcaccttaatcagcgaggccttccctttgagtttgtacaaccatcctattaacatgtcaagattaagacacaagcttgtgtttttgctctcaatgaaaagaccaaaatgttgacctcgcttctagccaacgacagtgagtcaagataaagtgataaagcgataaagcgattaaaggtaaaaggaacatcgaattttaaagaggttcgacctcgcaagaatggtaatagcctactccccttattgttgtattgacttgagagaaagaatgaagtgttcttcctcttgcaaagctcctacaattgatctctgagttattttctcttagatcacttttctctcttgagtgtctttctggattaattttcctctctctcaatagtgagattatgccactatttatagaagcttattacacgatgaatagtttcccttaatctataatgaataaaataggaaactacattaattctataattataatgcaaggaatgggaactaaggtgtattgcctttattctctgacttaatcccacaaatatagggattatcttcgtgtcttggaaatgacgagacttgtctctgaaattgccaactcatatatcctactcagtgcatatgagtttgtactttggtcggatgtctcttgattaccctgtttggacatcctactgtatcagacatttagatcaaccgtttgtgggctgctaggagtaatcccttccgcccaggtaggaaaatgtaggacacgtgtcattcagcccattgccatgtcatcgtgcaaaaaataggataacagagttaaatatgcagtagttgctgtggactatttcactaagtgggtagaggctgaagccttagcaacgataacaactgccaaattatgtgagtttgtgtattgagccattattttcatatttcgtattccttacaagttaatttctaacaatgggaaaaagctcaatggtagggaaatgtggaagttgtgcggcgatttggggatacaaaaaggccttttcagtggtcgcatatcctcaaagtaatgagcaaactaaaacaattaataaaataatcaaacataccaccaaaggtaagcttgaagaacaaaaaggtgtttgtctagaagaactgccacaagttttgtggtcttataatacaactcctcgatcaacgattggcaaaacccccttctcattttcttatgggtgtgaagccatggttctactcaaggtaggagctgggtccttgcgatgagacatttttaacattgaagacaatgaaaagaatcaagtacttcaattagatctattagaagaaagacgtgattaggcttagataaaaaatgtagcttatcaacagtgtacatcacgctattttaactctaaagtaaaagaaagaagtttgtgagtaggagatttggtattgcaaaaagttatgccaatacccgcaattctgtgcatggggtttttggcgacaactgggagggcccctactaatcgttgaaaatatagggattgcaacataccgactttgtgatctcaacgactcagtctttattagagcttagaatggcgagcaattaatgttttattattagtaggacccgcacatatatatacttagtcaattgttatgaaaattacctaagtataggggttatacatgtatatatataccactacatcctttaataaagattgtactactaattattcaatgaatcattaaatttttgaaatttttattgtctttgaaattatttacttagaaaattttacttattatgaatattgagatgttcataaatcacatcacaccaagttgtgtagaaaagtcacataaagaaaatagtgactaaacaaatacatgcatttcaaaagcagggagttgcttctataatcgcataaaaaacacaattcgagtatgaaaatacttgaaaattttcaaaagttatccttgaaggatattttgttcaaaaaaaataaattaaaagtgcagagcacaattgtctcaaaaaccaaatacaagaagcgagtacccatgtatcgccaaaaaagagttcaaataaaagaaactaagctaaggagtaggggcattaagattctctgaccttctcagcaccatctgcgacttcaatatcagtcacagtctcagcttcctcaagaaaaagattcctgcctagaccttgagtctcagtaggagacatggtgggaaagcaattatccatctcgattgcctctggactaaaaacaacaaagccgaagtctggcagtttaatcaggatagtgtagatgtagtcatgtgatggcctggtcataagctttttcttctcctctctttcattttcaaggtcgtaggtaaggttggtgatttactcctctagtttcttgactttcttttctgcctggttcttagctttgctcagatcgttgatctctttgtctttggtagcttcctccaatttagttttcttcaagacttcttgaagagcgatgttttatttttctagaggatcaagatctttgaagcctacggtgatggcccgcaagtatacagtcatcaactgagtcatgagctcagttgaatgagataaaagatcttcagcaggagtccccttgatttttttgacaaagtcattgctcacgaacttctcttgcaaggccatgaagtcacgagccttggttgcaagatccatcatgacttttttccctttgtcttaagaaactttctgatgcttctttgatagtcaatcattagagtattgacaacatcgctcattctcttttgtggaggcgtcgcagtagaaggggttgcaatgtttgcctttggcttgcagttaaggattggggctatctttaagaaagtcatatctacaaaaaagtggaaaagtaacataaaaaggttacaaaaactcgcagaatattaacaagatatgtgatgatgtatcacctaatacttgtctcagagttttcttggaaagacgcttgttaaacttttctttttttttagaaggttccttgtaaactagttcttgctgaagtttggcgtcacctggaatcaacttgtgttcttgtagttttgcagaggtgcataaaagatgccaatcacaatcctggactagaagactgctcagaacctctacaatttccacgcgatctctagccaacattgatcgagttggtctacctgcgagtacagattagtgttagcattcatgaaagaaaataataaattgaatcaagtatagagatatgcaacatacaaggttgacgattcaagtttatcctaattcctggcattttgaacgcataaaagtttcctatataaggtgaaataattcatatctcaaattattatttttgagataaagaatataattgatacatataatattaattaattagagagtagttacaatctctgattaaataaaattatatattattcaccttatgttgcttttaccttgataaattcaactcaacccagtgtttgaaaaatgatctggatggggagaagttaagaatatacattccttttacatctatctttagaagcctaatgtattcctaagagtttgcataagctctaacattgcacttgttcaggaatgttaagtagtatcataataacttaagttaataccactttatattttcatacaaagtgatgaagtgtctatctttaagatactaaggattacattcatacgtaaatactttattgagatgaactgacattctggaaatatagttaaccttttagattctaacttcactggtcatattgattcacgtaaatcaatatttgatcacgtccttaagattaccagtaagttgtatcgtggaaaacctagattgttatttctatttacagaagtcggattcatttcattttttgaggatacatcgtataatgtattgaaaaaccatgtttttacaaatgtcaattatttataagaaaatataaaaactgtatgcgtcagcagaagcaaaaagtaattctgctactgtagaaa

SEQ ID NO: 19576 - DNA, 5681 bp, Cannabis sativa
caccgcatcattttttgcggtgcaatttttagtatcgcggtgcaggtgcagtttggaaaattagaaaaactgcatgtgcatgttggtttaaaaaaagagttaaaaaccgtaccacccgcactgcgaacacccctaccaataactcctgatggaaagcatggcgatacatgtatgtgggtacaccttcggataaaagtgttgtcacctcctcatcaaatgaaatgctgcatctaaatactaaaacatgaaaataaaatatgtcagagactaaaaaaaattagataaagtctttaagacctaaaaacgtaaaaagtctttaaaacttacatcgtctccaagccatgtcctcagagtatgtagttggaggaaccaagctgaattgtgtctactggagtaacactccctcgggtaattgttcccaatctggctgagaatccaactatgaaaagtcgagagcagctttcgatcaacgactctaagtgggtccacattcacatgtgccttcgatgccctggacttcttcttcatttcagtgtactcatcgaaccacctaggccattttctctgtctctggttctccactagttttggagctgtctccaagacctgtatctctgaatcctgagtatccccgatgctggtgatcttcgtgttgtcaggtgtacaaaatatataatcattattttctctaaaatgatatatttctctctttaatattatttaaaataacattatatttaactaattaatatagttttatctaataaaactaaatagttaaatactattaattatgcaattcatatttttcataattattcaaaataataatttcacaaataactattttgcccttaaaaaattatttcttataaaaattaattctcactaaaatttactcatcaaataaaatatttacctgtacagtgttgtatagaggtgactcggggaccataaacctatatttcaaaactccaacaaatacttgattattatcgatctcatcaatagaatagtccagtttattaattctattatttctctattataaatatgaaattgcactctttgacaatacataattatatttacaaaattcttatttgtaatccattgatataatcaatatatgtagtttgccctccaattattagttcataattagagttggtcaaaattaccattttacccttcaattatctcttgactccttatgtaccatcgattcaatgtgaacagttaatctataacttattatagatttagatacaattgttatcactcccaaaattaacactataagggaattaatattcgacccgttaagaaagcttgggttctactattgtataacatgttcccaggtactcatgttattaagctcttataataaaagttggaagaatcatcttctctgagaaatattaacgagtgaatcaaagaactcaataaatacaaacaagagttcatgtatactcaagattttagttgatctactaatgatcatcgttgtgatataaataactctttcatggtaaacatcacattaataaagatgtttattgcatatcggtccagtcatgctaatcaaattatacaccacacctttactacatgtctatatccacatatgagtggctctaaaattacacacactacaagtatagtgtatagtgaaccgtacttagcagtttcatattaaagattcccattactttaatatactatcgactttttttattcatatcgtataatcttaattctcttatacatccttgcaagattatacattctccatatgaataaggaatttttcaaatatttaataattatactactaatatatcattaatctcataattgtatttgatatattctctaatatatcatctattaattatttacttttagggcatacatcctattaacactcgcttttcaagccagtcaccaccacactcagctacccccacttccttctacaagtaagtcccttttcttcttcgaactgtataacttccttcttctacagaaatgtgtgctcaaattttaattaaggatagctgtttgcatgtgagtgtgaggattgagtgtgtaatttttgggcaatttcgaagccatagagctattttagtgtaagtataggtaaaattttgtgtattttggctcgcaatttgttttcctgcattggttggatatgaattgtatatgtgttgaatcagacttaaattccttagtttggaatcactagggttccaaatgaaagacctgggtttatatcgtttattcttgtattcccgactgattgtctagaggtacagctccgtgagggtcaaactgagcctctggatgacatatttgctagagatctctccaagcagttcttaggggaggccttccccagtacccatgctatccttctttggtttagggtattaactgtttggactttgctcttcttttagttgatattactatgtccaacgatgaatttgacctagagatggtggaccttgtcgaggaagaggttgagacaggacaactggaggaggatttagaagaagaagtggtcctggaagcgtctccaaagaggaaaagccgaaagaaaatcaccccaataatttacagttcatctgtctaggagatggaccagatctaaaataaattcaggagctacgacatgctctaacgatacaacgtacatcgtagtgtcaacaacattccgagactatgttggcacaaactttcccttgtgggagagtcaccaattaagtgcattgaagccttcagagcatggagttgggcgcatattatttgtggagcccatctgtcgttgcggtgttacttcgccagcttctgtgcccatgtagggatcacaccctactagcttatcccgcaatcctacaagcttttagttagatggtatattttgtgcaagctccgagagctagaagttccgagttcggaagaggttttgtacttttatgcagtcaagtcgcaacccatgcaaaacaagacaaaaattgggtttgataggctagaaaagcattccagcaagttaacttgtcctattggtttcaccaaatatgtcctagactttcgagactattggttcttcaccactggattttcggtgaagagtgttctaaccttatccctggacttttctactccgtgtaagcattccaattattttttgttattctcgttcgttctcttatgtgttacatctatttttttttatgaacgaggttctaaccttgtagccaacatagaacaaacacccctaaccccgaccgtggtaactcaggaagcttaatatcgaaagattctcgcagacgttttgcaagtgaagactttggtcaccatagagaacctccaaatatacgagctcattgctaagacctaaagcatcaaactattaatgttcaaaaaatatatataataaatattttgagcattaatcttcataaaatatatctatattaaatataaagttgaataaaatatatattaaaagtaatttgcaatataaatactaaattttaactccatcggttctaaataattaccgaagtttaatttttagcggtaataatacataatttataattctaaaatttcttaggtatctcaccgttaaatgtcaagtcattatccacatgtcattttcttattaactaatttttttttaaaaaaaaataaaattttaatgactttgaccaattaagaattgctacgtgacaatttacttaacatttaatagctaggtacctacaaaagttccagaattataacttaagtattattaccactaaaaattaaatttagttatttacttacaaccgaaagttaaattaagtatttatgttgcaaattactcatatatttaataggggaattaccccatatactatttttttaacttttttttttatcaaatttacgatttgcgttgctccggtggtttctccatctgggttgctatatggattttaattacgaattagattgctccgttaattgctatataaatttctgtgtaaaattccataaaaatacaaaaaaaaaaaaaaaaaaaagaactattttaaaatataaaaatactcctatttaataaagacatcaaaatatatatatatatatatattttaaaaagtaatcaaattttattaaactttaaactctaaaaagcaaatcaatccatccgggatataaactataagctcttgagcaaaaatatatatatttaaaaagaacatcaaaatatataacatatatatatttaaaatatgtccctgctgcttcaaaaaaaataaaataaaaagatagaaaataatattcatataataaataaaaataatataaatatatgaaacttttaaataacattatttattaacattgtaagttaaataattaaaagaaatattttgttttaggaaaaatttaaaaccgctcggttggtttcctgtctgtctagtgtccaaaaaatgccctcccaggttggtggttacactcttcaccactatctaattcccctattgggtccatcacacgcgctacaaccacgattccgattctcttaaaatcccctcttcaatttgaaaccaaaacccttttgcgtacgcgcgtactactcccactcccatcatatataaatatcacaaacctttccaatcatatctttcatttcaactctcacgtttccatttctcaccatgcccaatcaactcacctacaccgatcactatatcgacgtcggagacgacaccgtcaagacactggtcaccaatgcccctgacatggtcgattcctggattgaagacatcgagcgtatccaccgtcgccgtttgaatcgccttgttgtcggcctcgacatcgagtggagacctaacatcacgcgcgttaacccaatcgccgtactccagctctgtgtcggccgccgttgcctcatcttccagctcatccacgcaccctacatccctaactcgcttagagagttcttagaagccggcgcgtacactttcgttggggttggaattcaccaagatgcgaggaggctcatgtcggagaagggcgttgacgtgactacttgcgtggatctcggtggccttgcggcggaagttaccggcaaccggagcatgaagaatgttgggttgaagggtttggctcgggagtttcttcaactgaatatggagaaaccgcggaacgtggcgctgagcaattgggatgtacgctggctgtcgtctgatcaggtacagtacgcatgcactgatgcttttgtgtcctttgagattgggagggttttacaagcctggaaatggggttgaaaatgtgttcttaattgcttgtgtttagggttttacaaggctggaaatggggttgaaaatgcctgtagtttcttaatggggaagaccaatttagggtttcttttgcgtttatattctaataataactgaactaatgggcgtttctagagaagtactttttcaacattgtggtattttgaatggaaggaattggaagttttctggtttgatgattcaattttctagctatataatatagtagttgtttctttcaatataaccctttaaaaatgcactcctattttagcatgaaaataattttttaatcaatttttttttcatggtcacgtacgttatagttatttaaga

SEQ ID NO: 19577 - DNA, 4174 bp, Cannabis sativa
ttttatttatttattaaattaatataatatattatttaaaggaatgggagcgcgtggttgtagtagtattatatgatgacgtgggcgtggtttctattctaggggcggctgccatgtggactgtgttcaagctgttggggactcttgtcatttctcaactaaacaaccaaattcatgtccctccacttgaatacttccattttcttttctttcttttttattgaggctttgatattttaattttgattaaaagtgtatatattaatctcccctgaattaaatagagactttaatgtgtggtatggcaatcacaattgattccctctaataaaaacaattaattaaaatagttttgctccaatttaattaaatcattaacatccaatttcggcgatgaaattagcaccaaataactaaattctctccctcgtttcccttttcccggaaaaagtcatttgtcttttaatgcctgtgggcaaccctacttaactcgttttgtttccaaattattaataataaaagttttattagagaaagagaaaatatatatagcatgagtattaattaaaattttttattataattttttagttaattactatgtccgaaattacatgtcaaaatatttttttcataacagtattgattataattacattatcattcttgtaaatttttgtaaaaattccgaatagtttataataccgaaaacagagtttttgatattcaaatttatcacgcgcgtttaaaaaactgtaaatgtatttttgatacggtaaactattagaaaagtttaaaaaatttacagagatgatactgtaaacataacgaacagcacctataaaaaaaatttgaaaaaaaatattccgagatatatttttaagcgtaaaaattaactaaaatattgtaacatagtactcacctatatatatttaagaagaaatagatattttgatttgtaattgagacattagagtagagtcccacgtcttcagtggcaaaaagtgagctcacaaagctccgaaccaaacacactttctctatctctaaacagtaggaagaagaagaagaacccattggacaataattgcagcggttgggttgggattacagaatatatagagatgagcctcgttaggactcagagatgcttcgtccctatccgtacactttctccttcatcatcatcatcatcatcttcttccgtttcccgttgcaccggtcaccacaactctgcttcatcaggtattttctttctctcctttcaatctctgtgcgcgattcattatgatacatatctcttttttacgatctcgatctgaaatccttaaaattagaatgagaaacaatctaatcgaatcgattgctcaataatccgtgatcggtgattgaaattaaaatgtatcgttcaaatcgctctggtatataaaggagcactgatcactctggcactctaccgtagtttctctctctatatataaatatatatgtatgtattgatgtgtgtgtgacatataagtcggaataaatgtaatcgacgatttgcaaatgttggggagagttgacggtgcctgagtaaattcacggaagtttaggggtattatgctgtgtgtttagttaacggcaccgttcaatcaaatcattgactatcaattacataaaaatggtcccatcacatgaggaaggtctttgctgattggactggtcatggtcaaactttaatgagatgaacccttttatgaatacccacatgttactgctaacccaacacaacctgcaaaacctcatagttttccatgtccatgtacttttttttcggtagtttactaattggggtttcttttaattagttttataattattattttttttttgcaatgttggacggtgcttttttttaatattttataatcttgcactaccataattgttaattagagcttgggagggaacagagtcactgttatgagaaattgaacttgctttaagttaaaaaaacaaataataatatttatatatattatagagttgcatgtaatatttataagcgcgtgcattatttttctcccgaccagattggatcaggtgccacatgcaatgactaaaaaaattaaatatgcatattaatttattttcaacatctatacataaattctggttcggcctttgcccatatcgtgaaaagggataggtattagcatataagatatgaaccacattttgttcgacgtgatgttgtgtttcccacagcgtgtgaaaccccgtctttcattttttttctttataaattatatttagaagtatatgcatgattaatgttgtggtatttatgtctatgtatacagtatacacaagacacaacgtatttatgttttagatggattatataagataaatattatataatacgacaataccacagctatgcacaaaataccaatttgagttgaggccttgaattgtctagaacaacgtgccgtctcctctataatgccattcggataacaaggaattggctatactcttgtctcggcattcctcaaataattggagcattggggcagtttggttgaggtagttggcgtttggttagagagtttatactttataaagttggtcacatcccatgacaattttcttagttcagacatcatcatcatattcttgaatattattgctctcttttttatatgcaagattgttgtacacatgtaaaatctggtgtgtcatttgtattgatactgtaaaagaaaaggcatagtcattgataacaaatattgtgtatgtgtatttatattttctttagttttgtaattatttttctctagctagcaaataaaattatctcatgtgaaacagaaatccactatttggagaggctgcaaaatcagtggtaaatcacctagctgttatgaaatgctttggtgttgctcttgtttcaggtcactaaagattttgtgaactctgctacttcttgtgtcaaaattctggttgtttaatagccgtgattagagatgaactgcatattgatatttaattattttgtaataattaactgtattggctgaaactaggcgtttcattgtgttgtaatcactatgcagatgacaatgcaacttgtgtttcgcctacatggattggcaaaggcctcacttgtgtttgctttaagagaaaaggacattatgaacgaatatgcgtcaacttgacaccccaacaggcaagtaatccaacagtcaaaactaagatgatgacattaagaaataaggaactgggatacacgttttcttttattttttatttttcagtggttatatacttaaatatgttgtgatatcattatgatttttaagtcaatgttggcgctacaacaaaaaattaccctatggtattctgggggatctgtctgatcatagatttcagatggtaattcaaaactttatgaacatatatttgttttagacaatttcggtgattaaatgaaaatggctttgtaattgattccccgccttggtgtcagtattctattgttgatttctttcataacttgcaggaggagaaacttaaacggcttaagcatcgaatgaaggtttattttgatgcttctaggccagatcatcaggtgtatattcatgctctcaaatttaaattgcaactatatttcataaccttttcaaactagacacttcctgatgatattataagaacaataaccttatgactatcaatacactaagatttccatgttgtctgttctaaaatactttatataaagaagatgattttttttcttccatgtatatgatttagtttgaactattcttctttacccagtatctactcactaagaaaattttatgagaacaggaagcattgagatctctttgggctgctacttaccctaatcaggagcttcatggcttgatatctgatcaatggaaagaaatgggttggcagggtaaagatccatcaaccgatttcaggttaaaatatacgttgagttactgcagctttgttttactccttttctatcatcttttagtgtaaaatcctgtcactcatttctcacgaatatttaacttggagcagaggagctggatttatttcattggagaacctgttgttctttgccaagacattttcagtaagataaaaaaaatactttgttatcttatat

SEQ ID NO: 19578 - DNA, 4254 bp, Cannabis sativa
tcctttcaaaaaaaaaaaaaaaaaaaaatcccatatgttaagttttaattttaaataccatatttttcttattaaattttggattatcatacatatgtataaacatataacaagtattacatgtattgttaccatatttatttttatttttccttttcaataaaaaaaaaagaaagaaaaaaactagttttatttttctgggaattatccataggaaaacccctttcagttggaaataaatgggcttttttgggccttgtgtacggttcaagccccagcccataatctcatagcggcaaaaatcacaatctcccgccatagctaaaaagcttttcccatgattctcaacagtatcaggaaaaaaacaaaggctgaaaatggggaaggagaaacagtactggcttttgaagacggagcctggagagtggtcatgggatcaccaagcatcgaacggtggcctaaccaagtgggacggtgtcaaaaacaagcaggctcagaagcacctcaagtccatgaaacaaggcgacctttgcttcttctaccactccggagccaaagcccgccgagtcgtcggcgtcgtcaaggtcagccgtgagtggtactcggagaaggaggaagaagacgacgtcgttgtggacgtggaggccgttggggagatgaggaggctggttgacttgagtgagatgaaaagagaccctgctcttgctggctttactctgtttagacagcccagattgtcggttgtgccagtttccatggatgtgtgggagaaggtctgtgaattgggtggtgggtttgaaggagatggtaaagatatcgataatggcggtagtggtgatgataatgaagaagagcagtgttgagaattttggatgcatagaaggtgtttgtaattttgtctagctcaagaagcaagtgtaaatttttgggttaatgtttgttaatccttggtttattttagtttgcttatgttttgttttatttttggagtattggcttatccaaaaatatgagaaaatatatagagaaatcagtgaaaaaacattgtaaattttgtgattcaaaatttcaaatattaccattgttttggacccttatctttgaggactaaatttgtttcacttttattattcatatcgattaatattgtatccttttttgggtggtgttgcccatttagttatgggtactgggtgtcattatttgagtgtaatatctttgaaaaggcgattcattagcctatgttacacaggctgtaacatttttctcaacctttttatcaataaaagacttcgaacaatgtgattggaaatgaatcaagtaaaaactaaaaagaataataattaaaaaaaaaaaaaggttgaaaacttgaaatcaaacacggtggtttatcatttcaaaagttaaaaatctgagtaaaaaattagaagaacaaagccgttgttggcctttaccgtgctgagttcttagttcaagtaagagtttgaattgaaaatcgatgcgaatgcaaatgttggctccaatacgacctcattttggcggtctactgaacccgtcatggttcaacaccttcagaggcctccgagctctctcatcttcttcctccgcctctgccaaccaatctcggggcggtctccctcgtttcttctctgaaactctccctactaccaaggtatgttgttctctctattcttcttcggtttatgtatgtttgacttgaaatgctgtcttcgtgtttgagaaaatgtctgtgaaagacccgagtttggagaataacaaattcgaacttgggatatatttgttttacgaaagttgttttcttttaaacttgttgttgctttacatcaaattgtagggtagtgttgtccgcgttcaaggcgatgaattctggcatatgactaaagttttaagattgggcatcaatgataggtacccttttctcttatcctttttagatgaaagcacttttgataattcatgtgggttcagttcaaatacttgtgattattcacataatatgtataagggtagagctgttcaacgggaaaggagagttaatagaaggctgcattgagaggattgaccgttatgggattgattttgtagcattggaagatcccaagtttattctttcacagaacacacagtggcatgtatttgcagcctttggtgagtttttaaccatctccagctgaattagctcataaaattgtttctgtaccttgctcaggataccatatatgcttacttttagggtctctaaagggtggtcgggcagactggcttgttgagaaatgcacggtatgtgtagaaagattgtccatttactatgtatagtggccaatttattcatgagggttctaatatctcttattttcaatcaattatctaggagctgggtgccagcagtgtaaccccactgctgacagagcgttcttcgtctatctccgaaaatcgggtggacagattgcagcgtgtagttttagcagcaactaaacaatgtaaaatgtcaacaactttcatgttggttaatgttctgttaaaattcttttgacccatctttatctttctgtggatacgatatcttctatgacaggtcaacggctacatgagatgattttaaatcctccaatgaagattgatgaccttttacctacagtgagttttactctgctttttcttatgcggttatgccccaaaagcttgggattatatctagaaaagtccaagttggacatttaatttcgtatataatataatatagcgtgtagctgcttctcatctaagatggagatttcgtaatctttacctaaattatgttcatacatatatcctccattgtcaaatgtttggaattaatggttcccctctttgaaaaaaaaaagcccattttaatatttggcatttaataaaaactattttcttattcaatctaccaagctatctatccatgcttggttaaacttaagtgtaatcattttatttaatgtaccatgctatccatgcttggttgaacttaaatgttacaattttattttataggtttcccagtcaacgctatcttttgtagcggtagcagaagctactcctcttgttagtgcattgaccagtttgagaatacagccaagtggattaatcatagttggaccagaagggggttagtgtatactaaattcaacggttatgttatttttctctattatgccaatgtgaaatatttctctgtttaataaatcgtgtttttatgttttaatggcttccagatttcacagagaaagagttgaacttgataacgggatcaggggcctcggcagtaggtctcgggcctcatcgcctgcgtgttgaaaccgcaacaatggcacttttagcaaccttaatgctatggtctgactctcagcaagcagttgaatcttgatctacacaaggcgaaaaaacctacattaagttgcctcctttctattcctttcctttgtatgtgttgtggtctctcttgttatttgaacatttggacgagtgatttattactactaaaatcattgtcttgtaggagccatggtcttggtctctcctctcacattgattaatattagattgactacacttgaagtttcatcttcattttaaatattccattcaatgtttatggaagatatatttattaaatgatggttcatggggcaggttgggacttgtgcaggtttcatttttattgtccaccatatctcctgaccgacttttgcaggcaaaacgttaacaatctttactagggtaggtttttctcattacgtttgtatttgtcaaactatttatgcttatatttttaggatctagtacttaattataagtgttaggcggtgatattttttatcagtaaacattggaatactaaaaaggacacatgtaattaattttccataaaaaattaacaatgcaagtaaaagtagtagttcgtatttaaaattatccataaatatacattatgtctagaaagtaagtgattttatttttaaaactggtaaaaaaatatgtaattttttttaaatcaaaaagtataatttgtgtgtttaacattactttttcttttttaatatatagtactattaaaccgtaggcttttttcaatttgatgttatcaatataaaaatatttaaaaataataaaaagttaaataaataaataagtaaaatatcatcactcttatgtttttaagaaaataaaaatctaggaatcaatttgttaaaaaataaaatttga

SEQ ID NO: 19579 - DNA, 2543 bp, Cannabis sativa
atatttttatataatactatgttaacctttaatttatactacaatattgtatatttggttgcccataacagtcaatactacatatagtgttacatgaaaatattatataaatacaattcaatataatactatacaatacaatatggtgtaatacggcgtaccaaatgaacccatcatgaaagtaataatatgaaccatgcatcataaaataatttctgatcttttattaattagtaaatctgattacattaaaataaattttatttaaggcataaaatccaaacactataaataaattataaataaactataaaacaaccaaaataaagggtttattgttcttattgaaaatatatttttgtaaataaaaaaaattcaaaatgtaaaaataataaattttccattttaaattttttttttttaaattttggtcaattatataaatttaaaagtaactcaaatttgtatgagataatttgagataatttttttttttttttaaaaaaattaagtggatatttctatgaaaaagtaatcaattgtatattatttacatcattagcaattaaaatattacttttttgcctagaaaaatagaaaatttttagaagtgagatttttctattttattttgacttctggtataattaattatcttaattggtattttaacactgatgttattgtaaataaaaagttggtttaaggtaattttaatttatttagagaaggtatattattgtaaaattttcaaaaaagaaaaagaaaaggtatatattattgtagaattcccataaatttattggcatgcttatgtatagtatcttaacggttatgacctgattcaaaagtcctttcttatatatatatatatatatatatatatacatatacagctattataataattagccaaaccttaagccataatcatggggatagaaggaaaattagaacccttaattcattattgtgaaagaaaacctgcaaccactaaaagatgtagtaatgtgaaagagcaaaaaacttctaaagagaagaattcaaaacagaaaatgacatataactataaagaaaggggtcattgtcaagtaatttcaaagtcccataactaattaaattataattaattattacacatgctttcaaaaaacttgattgctcatatatatcaaatctttatagaatatgtaaactgtcaaagtaaaattctaatccatttttttcttttgccaaatttatttctatgaaatgaaatatatatctaattatattaattattagttagctaggaagtatttatccattatttatagcattgatatatgaatgaactttatttggttaccataataattatgatcatgcagtagtgcacatccaggcaacttataagtaatgtgattaatttcaaaagtgaaagtgaattaagagtaccattttacttgaatatgattatatattctcaaatatttgtcttacatttcaatatttgtaattattaggctcatacataccattttcttttgaaaaaatgctacttactgattggttttgaccccacatagagctcaatccaatcatgtgtgagtgtgtcttactttgctttttatttatttatttatttatttttgatctttcgtaatgctaaggtaatattaacaacatataaaggaaatttcatttttttatgtgttattaattaaaattatatattttaaagaattcttctacaaaatgtgagaagttattttagggagaagagtactttattcataatacctagctattacaagtagaataattcttacttatccttattttattctcgtagtataaaaatattttcttaatgattgatgtatataacttttaagtgtatccattaattaatatacacaaacatatacttaataaaaatattaaattattaaaatagtattgagtctaaaagaaattttgacttctaacttattgaatattatagatattaaataatatattttaaaataatgttaaaccaattaatatttagtatattgtatctttctttatatttattatgctttatttttttttaatcagataaacactaattaatatgtaactataaccaaattaacataaaaaaggtttataatattatacaaccaataaattttatattttaataatataaaataaacaataagacattttttttattaaattacaactaaagagattaattaaataataaaactattcaaataactgctaacaactaagaaattagcattattattttaaaataagataatcatttttttgtattcattccatttttttccttatgtaattcatttataaatagatttattttcactaattcatttaaaaaaatttaattgagaaaaataattattactattattaaagctaatttttttttctataaatgagagaagtttgtattgcatcaaatatctttgtacaacctattcaccattggttctaaaaaaccaatctatttacaacatttcaatccaccttttatcctcctt

SEQ ID NO: 19580 - DNA, 3778 bp, Cannabis sativa
cgggagcgtgtgagactcacacgtcttctccgggagacatgtctagggctgatcgctttggtgaaagagacttagcaggattttcttaacattaaactccttcagtctacgtgtcgtcatccggttggtccacgtattttggacaaaatcaggggcaacaggtttaaattacttatttcataaaattattattattattatatcgtcgtcatagtactagaatatggtatgtttagtcatatgaaagtagacagtcaacttgttattaaaattaaacgaaattggaaaaaaaatctttgaatccaacaatctcaaaagatttttaacaatctaaaaagttagaacatgatttgatacatatcaataggagtgttcataaaataatcaattcaatccaatccaatccaataattcgcaaagcatcaatattcttacttgtgcgaattagattagattgaaaaatctaatcctcacttgtgtggatcgaatgttgatttacatgtaaaagtaaccgatccaatccaatctacacatattttaatgtaaaaaaattatatatacaattaatattttaagataaaaaaataataatttaaaaatctaatacatatgatataaatatatttcaaatcaaatttttactccattcttatttgtaaaaaaaaatataatttaaaacaaaattaaatatttctttacattttttttttgaatttgttattttttgttttatttattttaatttgttattagaaacataaaacaacaataatttattttattttgttattagttatattaaataatttaatattaaaagtaatcaatccaaaataaccgatcaaatccacactttttcaaattgaattagatttaagttattatgcggatttgatttgacctaaattataaaatccacacttagtgcgagtacatattagattaaatgaatacccctcattcaaagttcaagagaaaaaaatccctaattagcacccttctcataaaatatgcacactttcatatgactaaaaccagctttcaacactaaaaacttttcacttttgtataattatgtttcagcctttacttcattacataaccaaattagctaaatttgcataaatgaggtgtttgttaagaaattcgttagatgaacaaaattgcacaaaagaaaagaccatttaaatatagtaaaagcaactaaaataatcccaaaaagtcagtcaaatgcatatcaaaatttacatttctcagagtgaaactcaaagctacttctatattaatataaataaaccaggcctaacctattattattcatcaagaccatagtcctcaccaaaatactgatcaactaggccatttgccatgtttctaaggtcttcattttcatggaattgaaacctttccatggcctcaattccatcctcttgctcaaccagctttggaccctctctgtttggcattcccctcaacacctgcatacaatggccagccaaatcaaccaaaacactcatcaaacattgttgaaaaattattggaattttaacttgaatcaattcattttctgtgttcccttaccagttccatgaattgaagcccaagttttgcagcctcggtatcagcagaccttaccaactcgataaaaccagatagggatcctccgccaacgagtgagaccaaatgctccacaatcagtgttggttttccatcatcacctgttggagcaacacagaggttccctagcacatatgccacttcttttcttatatccaacggtgctgtagttagaagccgtgctagtaatggcactgcctcgctagaataaattaattgcttgtgctctatagaaccagcagctatgttggatagcacccaagccgcttcctgcattaatgttgaatcttcaaatgagcatactttcacttaatgctcaagtaaaagaaagatttagttaaaggaaaaagaaattgccttcttcaatactcggtgttcgctcttcaaacactttactagaacttctactactttatctgcagatgttatgaagtagcaatgacgtgagtatgataataagaacaaaatgtgtgtttaaatgtatgactcctgatttagcagacaagatgcacttcacttgcctgtgatttctcgtcctggaacaagaactgcaaaagtcgtgtgtaactcgccagcaacaagattacctaaacctcgtagaacctagacaagataccatgtataaacataatctgttaactggaccgaataccgaaacaagaatacagttcaaatccatttagttttgattgttacaggaataagcaattggagactacttgctgttgccaatctttccacaagaagttgaagaacatcgctcctcactaacataccggtagcaacatttgaaagggctgagagatatacaacaacccatgctacctcagttgccaattcatcatccctaatttagaaaggagttgattatactttagatcctttgtctaaacataagattttcagtatgaacctcttatttcttgacatgattaagtaaaaatgaaaggaaaataaccatcagcaaagaatattcaaaccttcttaaacaatcattaatttcaaggcagtgaaaatccacttacgcttttttcaagtgtcgaataattgcatccaataccccctcaactctaatgagatctgttgctgctctaggatctggtccctgcatccaagcaaagcaatatatagtttgaaagaaatatttgattccacaacaataccaagataattccatccccaagctcatcaagcgataaatgcataaaaatttgtgagaattgtaggatgaaagattgggcaccttgattagatttgacaatgcccaagcagctgttctcacggttgaacctttgtttggaagcatcatccttgcaagaggttgtaaggctccttgagaaagcaaaacttttctcagctcttcaccttcaccggcaacatttcccaatgcccacgcgcactgctcagcaacaggcaaggagctcttttctacaagatcattgcaaattaattacaaatcatggcaactgcagcaacaaagttttggtttaatgaagactggtataggcacgctatggactttggaagagaagcacgtttttttttaacctccaagatgagcaataagcaacggtagggcaggcaacaaggctttggtttcttcaggctttcctgctgctatgtttgtgaggcaccaagctgcttcatgcaactgcaatacaacaaggaaaagacagataagcatccagaaaatccgtaggaggttttttatacataacaactcttctcaaagattatatctacagttattttctcattaaatttgcttttcttcaactaattgtatagtattcatttagttcatgtaaataaaaaaattattactgaattcacaataaggtaaattcaatgaatcattaaaggtaagagaagatattcaaacctgttcatcaggagatccgaatgaaagacattgtacaagaatggatattgctccagctccaagagcagtttcaataggagggaatacagatttcgacaataaccgccttagctcacgaagagcagtcactctcttttgtaatgcaccttttcccctatttcaacagcaaagatgacttaacttaatatagcattgaaaaaaaaaaaactcaaccaaaattaagaccacacttctagttaatggtaacgaaataattatttttcaatcatgatcacgtac

SEQ ID NO: 19581 - DNA, 5698 bp, Cannabis sativa
aagaacaagataaaatatcaatagatcaccataatatttctaggctactattacaactcacatgaatagatgcttttctgaaagctaattgctctgggctgctaaaatcaggaacgacccacaaaggccacgtatcattctcacacagaagcttttctaacagtacttgttcttccaactgaccttgacagaaacaacttaaaaagcctagtatccatgagcagcaccaagaagtgataatctctgtgtttaatttacattcattatagatggaggatctaatgcattgaatcaggatactccataatctttgtagattgtttatgtcaagaccattccgaaattgcttatttctcttacagcaaaaggcatgaacagaatcaccaaattcaagcctggccttagattctatgttagtttcattattctcagcaacgttatccaatgactttctcaagctatactcccaatcaataactaaaactgcacctaaaattcctggcactaactcactatccttaatgagtgtcttcaagcaaaaaaaactaccatcaagtacttgaagagcaaaatgagacatctcttttgtgctagcagaactcttagattctaacccagaattgattgcccaagcagttatcatggagccggcatctctaacccaatcaaatgatgactcatggataaaagaaagtaacttcttcaaaatttcctcaaaaatcaggattgatgcctttctagatacaaaagaagtaagctcgccttcagttgaaccacctagaacagcactgcacatatgaagaaaatgtaagtgtttgaaatcctcatgatacgttttccaaatcatagatggtgaaaagcatcatgtaaaagtcttcttattcacgtaccacagaaatcgagaattacatgtcccataggacaatggggaacatgctaaagcaacagtaaatgattctagaggctcagagtgccagtgctctggctctgcagctatccagtgtctgcagtcttcatccttcttccgttttgtaattccatgtcttgctttctccagaagtagggccaaaatggttatttggtccgaatctagagactcagatgaagttccagaaccttctaggttaatagcatacatgatagcagcacaccactgctcagaaaagcattccttgtcaagcaaagaaagcaatagatcaagtcgagcacttgttgacctatcatgactgtgcaaacaccagggaacaaaagtatccttgaatatttgtataaatttatcagcctccaaacttctatctacccgatcatcaggactaaaggaatgctctttattgtgaacaaaaagttcttgcacaatctggcgtggaccaaatacagaaacggcaactgagagaagtttcacaccttctggtgagtcctggagattgaaccaaaggtaaataataaaaggaaagaaagagaaaaacaaaaccaacagccccaaaattgtaacacacattttccacaaagagtccattggcattaattagttacaaaagtaagaatagtaggagggagagaaactcaaacaattaattgacttaaagactgactccattggctttaattagttagaaataaaatgcccaaccatagatgttcattgttactcatatgaacaaattcaagacagcaatggctgaatcgtagaacaccacacatgtagaataaatctaacgactaaaataaatcatcaaaaactaataaatacttacaagtgatcttatcattggaaaggatttggccaacattggtcccactacataagccagaggccaagttaaacctttctgtgaagcatgttgtcctattaaaataataaattgaaagacccgttcaaaactttcaattgttggatctatgttcaaagggagttgaaataaacccaaacaatttttctgaaattccatacaaaagccagagagcaaattgggctccaaggcaaagatacccgagaggatgtcaattatgcagttcttcaagtcttgcaagtaagtaatgggacacttaacattggatgcttctaaagtcttgctcaagggaaaaccactatccttagataaatactgttgctcatttgaaccaatgcaagaaaagtagttctgccataaaatctttaccaaaacattctcaataagtgtgactcgaaaatgatgaattgaatccgctccgtcataatacctgcaagcaatgaagcaagataatataacagaaattaaagaaagaaatttttgaaaagacaatctgaagcttcaatgaacagagtagcaattgccggcacagcttacacaatgccaagagaaaaggtcctacctggaagctttatgcaatgtccagagaaaacactccttaaatgctgcaaaaaatgctaatctatctgcagttgatgaattggaaaggcttcctcctgcccagcagttctgaaaaaagtcaagaaaaaaattctccccaactacagcttttggtggcacatagtctaagaataaaaccaaagctggataagaagtccgctgggatccaaagcacccctttctaagaaaatgccaaaagcggtttagaatagttttctggacatttattgatgtccaactatcaggaaatcttttagagaacagcaaaatcatatcccacattgatgaatgacaagcaggatccttctcctgaaaggcacctagtattaatccagcaacagatttcatattgccattattaataatatgaggaacattttttacgaaactccttaacactgaatatgtagctgaacgaattgcagcactctgaaattttaggaagtccgagaaacaattatgagcagcaaacaacttctcagcaaaggaggtagcaaccagcctagcttttgaagcattctttggttgagcagccacactctcagtgtcagaacttgacctttctaattgaacaccaaccaagacatcaaggagggtagccaatgccagtaacgatgaagatattatctacagaaaaaaataaacacaataaatattataaatgaataatatggtctttgacttctttatctttttaaaattttagtttgtgatcatcttcatcactttgataaatagtgactattgctgctgaccaagtaatacaaatttaaatttttacaacacctgtcacttgtgatttaaaaaatcagtggactaaccacaatctatacacaataatgtaatattagaacaccactaaactttaaattacttccacagaactccattttgtcaaatttcagacttttatggttagttaaataccaaattatgtacaagagcgagatattaattcccactagaagcaagagttatcctaaggaaaaaataaatattattaagaagcataaaccttcttggttaccatttaataagaaacttctacatgtaatggaactaaacaagcgtagccactacatatttctcttgagtgagtacctgattatgcatctcttctacttcatccaaggcagcagctttatcagacatgtcttttggtgtgagatttaaacattcttccaaatacataagaatctcttctgtgcacataattaaagcatctagtcttttttccgatgctggaaaagccgcctgttgtcagcatttagatatttaataagaaaaagaaactgttagaccttacatctacttgagaacatctgaatgtaacctttcatatatatgaattaaaagaaatattgtaaaacttaagtaaaatgttcctccatgaccataagtacattttaaagaaaattaagtaaaaacattctgcaaaattttttaggattgcaccacatccaatttagaagagaaggaaatgaaactcttgaaacaacaattaaaaatgaccaagtggaaataaattccctccctcgtttttactcatggcacaactatgtcttgaatattcaattagttacattgctacttcactccactccactcccatccattgtttgtctcaaaagtatttcaaatgatactaaatgaagctttatattcatgaaagcaaacctgtaatgacctctttgcagcttgtgcaacttcagaaactgaatcgaactgagacaaccaccatggccccattaaagacttgagatgtggagccaagtctcttctggaaaaaaaatataaagaaaatatgcatgtaatcaaagcatttaggagaagaaaaaaaaaactacaactagtgaaataatgaaagttggaattcaccatttcacaaacatatagaataatcagtgtgtacgtgcacagataatcataatatatgagcttcaagattacatacaaaaacacaacaagaggagaatacttaaaagtcacacataactacatatcctgctatcaattaagttttcaaattgtagagatactaaaatttctctatagctacatgtgttaaaaaaaaaaaaaaagctttcatcttagtgctcactcatctagttcagtaaaacccatttccttttttttttattggagaatcagtagaacccatttctatttgtctttaataattgaaattgagcaagtcaaattagtctgttcttttccggagaccaagctcactgctcacacattactggcttatttcttgtgaagaacatgaccaatatttacaaccaagctatacaaaatcaaatgacataaaaggaatgcatttattgacaaaaatgacaaataaattttcctcacatttataacattttaaaacagcgcaacacaaagaagaagaacaaaaaagtaaacatatatactgtatgtgggagaaattcaaacccgacagcagttacaaggttggtcattgtgtcatgagttgctcgcctaacttccctgttatagtccatcaacagtcttttgtattcaaatgcctgagaatacaaaaacaaaactataaaataaacaaaagcttcaaaatctattatgagaataaaattcagaaacttcataaccaatcacgataataaaaaaagacaaccgctgatagagttcttcacttgagtaaacatgctaatatagataaatataggcatcaagaggccccgaaactatacccattgtggaattacggtcactaagtccttcccaggcttttccttgattaactcagatagagatgataatgctttaagctgttgaaaaacagtgaacgaaatgaattatcgaaactttaactacagaggcaagcacacacacataaatatatataagcatgttgaaagtaaagaaaatagaaattttctgcgaatagtaaacacacaaaaaatcataaacaaattttaacaggtaaaccttcgtagtcggatctttcctcgcaagcctcttcaaatgaactgccacttcactatctatatcctataaaatccaaaacagaaatcacctgtgaattaaatatatacacattcttataatgcataaagattaaaattttcaacttcagacttattaataaaccaaattcaaatgaaaaagtaaaagtaaaatggaagcgtacctgaaaggaagcagaatcctcgccagcgagagaagaattgaggcgagacctaccgatatagccgccaaatcccacagctgcagtagaacccgacggcaaaagcgatgccgctagactgtagaaaattcgagtatatacaatttatcggatt

SEQ ID NO: 19582 - DNA, 3388 bp, Cannabis sativa
  modified_base (2573)..(2593): a, c, t, g, unknown or other
tttaacatagtattatataaaaatatgatatataatccaatttaatataatacaatacaatacaatacaacctaatacggcgttccaaacgaacccatagttaattattcaacctaacctttctattgtcctcacctataattctttatttgttattcttttaaataatttattattactaataataaatttattttttctttttagatattactgattggaggaacagaaatatttgtaacattagaatgggcaatgacaaatttattaaatcatcctcgtgttttacaaaaagcgaaagaagaactagatattaaaattggtcaacaaaaatggttggaagaatcggatctctctaaactaccataccttcaaaatatcatatctgaaactttacgattgtatccagtagctccactcctcgtaccacattattcatctagtgattgtactattagtggatttgatgtaccacgtaacacaatggtacttgtgaatgtatgggccatacaaagagatcctgaactatgggaagatgctgagagtttcaagccagaaagatttgaaaattataataataataatgtggaaaatgaagcacataataaattcatgccatttggatttgggaggcgagcttgtccaggtgttggattagtcgaacgtgttcttggatggacgattggatcattgattcagtgctttgaatgggagagaattagtaaagataaaattgatatggctgaaactaatggacttactatgattaaagctgtgccattagaggctatgtgtaaaccacgccccatcatggccgctaataattaatctattcatatgaagatattgtgtgtgtgggtgtgtattgcctttgtttattctgttattttttttttttttgaaggattgtttattctgttattgatatattgtattgtgtaatattgtattgtattgtgtaatattatattaaattgtatttttcttaattttctgtattactatatttatgtttagtattaatttgtatgtgagtataaatatgtaatcttctcatataaaattaaagggcattttttatttttacatttcaaaacaattttttttttatttttaggaaatttaatataatacaatctaatataatcaaaagagaatcttaaaattgctattgttgttgttcgttctcttgctaaaataattttagtggcagatcatggccaaacgttaatttgtaagttgttaattatgcttctattggcttcgccatttatttcacattttgatgaacttttacgtttatttttaaataataataatggtaataataattaaaataaaaaaaaaaaagttattttgcttaattgatagggccagccacctactgtggccatggtggtattggtaccaaattatgaggacgatatacagccggcggcacggatgccacatgcatggctgtgtattatttatgtcgagaggcgggcatgcagttcgtctctcaggttcagtcgggacccggcccatagaactgccgttcatggcagccattggaccgaaggtccttgtctttttcgttgacagtgaaaccgtcctggttttagtttggtctgaagcatagggacccaaggtccttctttcggtgcacttgctcgtcgtgattctcggtcttgtcttcttgataaggccgggttcgaccttaaacccaaactcattcatcaatgatggtttgagaaaattacattgaataaaaaaattacaaataaatttttgtataatttctaataaaaagacgtacgtactcaaaatttttaacctaccatataattcatgcaaaaaatcattctcttatcatatataataatatgcatataaatgcataaaattacctaacactatttaaatatttaatttattaagtgggatgcaaaatttcagtagagaaataggtgctccatagtctcatcaccatccccgcaaatggggcaagagacctcatcaatggtcattctcttagcaagcaggatccttaagggtagagcattcgagagaatattctaccaaaggactttgtgatacgtacgatccaatatttttgaattccacaatttgttccacatggcaggagcaacattacacaagggaactcttcccaaggcttggatgaggtaggcagacttagttgagaacactcccttagagtcttttgttcaaacctatctatccttaccctgacaatttggtttactgcccttttagatactatcaactgtttccttgtcaaagagatcattaagcttccagatatcccagttcccatcaattaagagtaaatcttccacaagttcaggctcccctctggggattatgattgggcttagggaagaaatcaccctttctctggattatatttgattacactttttttaccagatatttctttgtgcgcaataaaagaaaagtgcgcaagggtaaatttgacaccctttttctatatctaattacacttttttttattgcgcacaaaaaatacattagaaaagataacttcacattattaataataataatannnnnnnnnnnnnnnnnnnnnatgatgatgatgatgatgaaatatatatatatatttttttttttttgttgcaatgatttttttcttttttgaaacatagtagttgaaatcattgatcagtatcgtgaattgagttttctaaaacgtttttttttccttgaaaaatgtcattagtattattcattattatatgttgacgtttattgttaagaaaaaaatgatattatttttagtaatgcttttattgatttatccaacattatataattaaaaaaaaagagtagcatggagtgttgaaaaaatttgagtaacttgtaagtaaatacttctattttactatttttaattatgagttggtcaactaattaaaattatcttgagggtttctactagaaaaaataaactaaaattaattttttactttatagctaaagtattatatacatatatatatatataatgggtaaaaataagttggaatatatgtgataattagtattatttgttttatagtttaatataggttaatttagaatatttgtcctaaattttaacacgatctaaaggtgttatgataaattagcttacattttttatatctcttcgtataggaattatcttcaagttgattatattaaaaaaaatgttaaaaattaagcttaggatcctatttatactactttgaaaaatatagagtctattttatcatttaacaaaataaaaagtttaatcggtaacttttacaaaatacaaaatttaaaatggtattaagtacttttttgagaaagaagaagaagaaaaaaaaaagtaaaaaaa

SEQ ID NO: 19583 - DNA, 3779 bp, Cannabis sativa
  modified_base (2225)..(2237): a, c, t, g, unknown or other
cccacacctagggcctactcattttaggggtctaaattaaataatttttaaaaatatcttttatctttatagtgaaagtttaaaaatatctttttacctataaccaatttcaactgaggccattataacttttgatcatactcttcttccacgagcaaaacgtgttgcgtaagaactgaaattaatattgtaaaccaacccaatttaaacccaaaccccctactttaatcatatatattttacatcttggtagctggcctttgctccataaatgtaaataaaaaccagattttctgcatctgttgtagtaaaagtcagaactgtttggtggatgataaattgaaggccaaatccgtatgcaacttttccattcattgccttttaaaataggggtttggtcacagtcaaatcataaatcaatgcaagggtattattggaaaggaaaaagttttactaataaatatcaaataaaggttttattgttcagaaaaaaaatatcaaataaagggtattttggtaattaaatgaaaatggtggggaaagagaaaccttaatggagacagaagggtcttgtcagtgtcagtcagttgtcactggtttggggtttgattaaaataaattccactccaaaaaaagggttatcacaagaactatgctccaaaaaaatcagagccgttcgtttcctcatttggaaaattcaatggtgattggctacaaatataagacaaaaacacaagaatcttttgtacccacccattatggaacctttccccttatggaaactcttttcttcaactacctaataaattcaaacaactcctcacttaatatgtttctttcttttttaattttttttttcttttgttaaaatatattaactacttttattcggacatgtctcatagaactcctctcattatcagtttcaactctattttaaaattttattgtatgaaatttaatttgctttttgatatgttcggtaagggatatgtgaataagggtgctcactatctaatttgaatcccccttattctttctttctaactctaaagatgtatttattgcgagtttaatattttgtttggttagctttgattacgagtcagaagtatttttttaaaaataagatattcattgatactagaaaattagacctcacgatcattataagaaatagtgttaacctgttaagtatagaggagggctctcgttacaaaagacagtgttaggtcattatagaggtctctcataaagtttttctacttttgtaagagaaaaatcacaaaagtttatcttttttatttttacttcaatataataaattattttattttaattttttttatggtattttaatatattttatttttacacaattattttaaaaagttattaataaaatatttgtaccacaatgattgattatttctatacatatttagcaaaatactattaattgagttaaatatatatatatatatatatttatatatgtataatgactaaactttatctagaatgctcatttattggaggtgctgtaaatatattaacatatgtacatataagctccaaaattttatattgttttcatctacctatacccttctaaagagtaataaggtttggtaacacctacgccagaaaagtttcaatttttttaacatacttttcatatgaaacaagtctgaattaacataataataataataataataataaagttaatttgaatttttatttctgaattttgacatatatactaaattatgaaaactctttttagatcgttaaaattttttcttgaattatagaaattgttggatttaagaatttttgtccaattttactaaaaaaagtctgatgtggatgaaaatttcaagagtataatttggtacatgctaaagttcaggagagaatttggtagatattaaaatttaggagcacaatttagtatatgaattatcgttacattagcataattaatgaaattagataaaaatctttaaatttaacaaattttaatattttataaaaaaaaatttaatgatcaattcagaagcataatttaatatatgtgaaggagcaaaaattttaggtggcgtttgctaacacttttatttttaaattttttaatcataaaaatagaagtaaaatttttgtttttaaaatttgattttgaaaaataataatgtgttctataactatttttattttttaannnnnnnnnnnnnaaataaaagtgtgttctgtaaattttattttcatttttatttgttgattttatttaagtcaggtttggagtcgagttcaaggtcgggactgggggcaggtccgagtttggagttggggtcagattcggtttctaaggtctaagttagagtcagagttcaaaatattgattaaaaaattatttaaaaaaatatcgaaaatgattctttttttaaaaaaaagtttacattcttaattaaaaaattgagaagtaaaaacagttttataaaagtctggtggaagtttatttcaaacagatacatagtgcgcttcctatgaaaatgttgagagctagtggaagtttatttggaacttgggagttagtttgaaagtaaaaaaatttgtttcggaatttgtgttggaattggctccctgttaaagccaatctggctcatagggggctgctggttccaacggattgcagcagctgtggttacccaatggagaccatttgccatgctctttggctttgtccggccatccgtcctctctggaaacacacaggttggtttcacttattccccaaacaacatcttgaaccttgggatttcttgcagcaaattcatgaaacctaacccaacatttgttttggaagctttgtcactttatctttgctggtttggttcggaggaataagaaatgttttcaacacagtgttgctcgcatcactcaatggatgttgtgggcaatcgagcatgtggattatcatcaagttcatattccaactacagttgttgccactttttcttcctcagataaagctttattttggttaaaggtcgatgacgaaaccttgttactcaactgtgatgctgctattgatcttgcttcccaaagaatgggccttagggctattatttgaaagaaaaatgggcagattttaggcgttgctgctgcctataggaagggtgtttgctcggtttgtggctaaggggttggctattaaattgggtcttgaattgtgtcaaaaactcaatgttcaccctttttcttagctgtagattgtgccaatctgattgactatttgaagcagagggctctttgtcggacagattggagcgccctgttagatgatctgttggatggcggattgttccgtcgttgtgctggttgttttcattccctccatgccaccaataaagctgctcattttcttgccaagttggctataatttccaattgtaattctgtttgggaggacaagtttccttctcgtttggatagtttctttgtttttgattagttggctctgatgtaagtttgttcttgctgttggttaattaataaaagtttctttctaaaaaaaacatgatgttagaaaatatttttaattttttaattttaaaaataaaaaattgattaaaaaaatattatcaaaggcaactttaattaacctaataataataagggaaaaaaacaggaaaattccaaaaagggtaaaatattacaacaatactgtgggccggcccaatcaacatttgtacagcccacattgaaaatattac

SEQ ID NO: 19584 - DNA, 3863 bp, Cannabis sativa
  modified_base (1400)..(1402): a, c, t, g, unknown or other
catataattggatccttctcaccctctcctcacgtttcggttggaaattaaattaacaaaatcatgatatatacaactggcaatggcatgacatttatatatatttgacaaattaattccaaagacttcaaatttgaccataaactactcttaagattcaagaaacagatttggataatgattctcttcattaataaaatgagcccttgctcagttttattccgtgcataaatcataataactaacagccttacacagttgtaaagaattacaactaactgaacattaactaattaactacaactgttctaacaggatatatatatatatatatatatatatatatttatattagctttttttttttcagtaataatcagtatcctggaggacctggaccatgctagctataggtgtttttattagacacgcatataactaattaaggagttctctatactaattttaagttattatttttttagaaagggtagtgtaatcagtaacgaatgacaaataatactacttaaagatattatataatatggtcaagtaaaattgcatagtctaagtcaagcttataagcacgaggcaatattttttccttctaattacgaaatatatatatgagtgttacgtacacgaaccggtgttgaagaatatgatccactatacatgataaatacacactcatttatatatatatatatttatatgtgtacatatatgagttgagtatttaatgattacaatcaaaacataaggatacattttattataatctgttataacaattgattaaatggtaaatttttgtatttttagacataaattaattatatatttaaataaattaatattttaattaaaacatttaattaaatatttttaaaaattaatatttgtaatttatttttattttttattttaaataaaaaaataaaattatattagtattaagttacaagtaatttattaattatttttaataaatttttaaattaattgaagtcgtttaataataatctaataacaactaaaagtaaatataatcattatagttttatatttgatgtaactattaaaacatcctctatacatatatttatatactaggttattgttacgtacatatatttaattatatttttagtttttatttttgttatgtgtattttaaaattttataaattaaaaggaaactatttattaatttgttatttttttttaattttttttttaaatttttaaaatttaaagaaaataaatataatgtttaaaaatattataaaattgagcatactctcactattaaaaataacaataaaaaaaataataatattataaataatatattaatatttatatatataacttaatttaaaataaataatattaannnttatatatatttataaaactaaccgtactaacatcgctaaatttaatagaatatattttttttttatttttaaagaatatttggttaaactaataaaatagttagataatcacttttttatatatacagatatgactattcctgtgttaattacataaataaatgtctgaatcttgtatttctcctaccacaatcacaatatattttaaaacatgtatataaaaacaaaacaaaaatgtaaaaaaatagatgtctattccaaaaaaaaatatatcaaataaattcagaaacgaaatataaaataaattggaagctacatattataatattaattctctaactttcttaatttaatttatatttatatatacgacgactatgaacaaactagctatgataaataacttattgtacattaatcaattttctaaccactttcacaaatatggtggagcataaatacaaagtcatgagcatgatcactgtatagataaatttttttagtttttggataaggaagtatattataatgatgatatatatatatttatataattgtcattagatgatgatgttgcccgcactagctattatataaatagtataaggtccttgaaaataaaatgacaccatcatcatattaatcatcttctaatataactatattaattatatgcttattatctattatctcttgttctaatcttcataacatggacactaaaaataaattaaatgtgcaaccttccaagacgttgacattactgtttttaattattccccaccatttaaaaaaaaaaaataataataaataatcgtatttccccaattttttaataaaaagaaaaggaggaaaaaaaacaaaaagaagcaggcgcgcctcgatcggtatttattacaatctttttttttttttttataagtatctataaaattaaaagtttggtgttcttacaaaagaaaaatcaaaagtttggtataatcaaacttaactttatctatttacaagttttcctgttacaaagattctaattttagctaataaaagtatggctgagcctagtacagaattagtaccatataattttctttaggtacataaattcattatagtcataacttttatattagtgcctattgcaattataataaattttgggagatttttaaataatttataatattaaaattaaaattttataaaatatgtatgcaatatattttaacagaaatatacaaaaacaataaaaatttataaaaatacagttatacaaaattttaaatattttgtattttttaatttatttattaaaaatacaatctttaaatattttcatgttatttttatattgtatttttgttaatttttttattatttatatattatatttttatgttgttttgatattatttgtaaattttttatattaattttatgtaattttttattattatttttaaataaacgtaaaaatatttaaaataaaaatataaaaaatttgagcaaaaataatattttcggtaactttttcactaatttttgttctctaatgtctagtgcattacatagttaaaattattcagatttcatctaaaaaaaaaaattattcagattttaaaccagaatttttattactacaaaaaattaaaaagtgatttataattaatttacgtatcaccgatatagaaaaacacgcctttgaagtgaaagtgtagtgaagacaaggaaagccaagtgggtcccgtgacaacgaaaattgagggtcccactcagaccaacatgggggtttaattagtccagttcacgcggttttaacatacaaatctgacgaggccatgttggttgtttgtttgtatgaggaaacagatgacgccgtcaatatgggggccacgtggcatccagttgtgctgaattattaatgactgagtcagactttgactcactcattcacttctttctctataaatggtggtactgctaaaataatgttgtatcttggcaaaattgtattttcccaagttttctataaatgctcttaagtcttacatcactctacatttttttttctcaataaaactgggattattttcggtaaaaagatctaaattattagatttgtagtagtattttttaaaactaaaaattcttaattattacattttcaatagttaataagtacttacttattatgtctgtaaatcttaagaagttatttggtaatagactcataaatgtcctccttcagtagtgtgcgaatttatggaaaatttaatacaatataaaaattaatatttttttgtatgagaaatactaaaagataccgtgatacttagagttgtttttggtgtgagtggtacagtttttgattattttttcaaattaatctatgatttttttaatttttcaaactgcatctgcaccgtgaaactaaaaaaccgtagaaattgcattgtaaaaaat

SEQ ID NO: 19585 - DNA, 6154 bp, Cannabis sativa
acaccgatactggtgaagaactttcttagccagacaagctctttagcgtgtcctccgtattcatttttattattgacagaatgcctgatagcgtgtcctccgtattcatggttccaggtatgggtggtatcgtgggcttccccttttttttgttttttttattaacttgttctttttccttggtcttctaactaccaaggagattcctgttttgagcagtgagtccctaagcgcactacaaaaatatttttacctttctgaggatgtgagggctgctaaagatctcttaacttcgtgacgcctgaaagagtctagtcttacatatgtcctgcttcctgcgggggctctcatttcgattacagagcctctccctcaaggggatcctacctactctcccaaccccgccctgggccctctacggatccacgaggcaagaatgacaatgttggggatgttgcagctccttcgtcggtcgcggcagactgacgtgagggaatggtctccaagagcggctcttgtgggaagcctcccactgcatcgaagaaaggtgcatcttcttctggcctccctaatgatcccactcccaaaatgagtcactcccttctttccaagctcaagaaggcccttgctacaaagagtatgcttggtagctatatgtgccgtcacaaagagattacaacctgcctgggggagtcgatcactccctccattgatattcctactaaggagcatgctcatcgtatgtcctgacgtgcctccttggagagccaagatgagggggagggaggtgtcgcggagctagtacctccatactcagtcagcatgctgggagatgtcaaaatgcgagaacctgacggggaccttccttcatcagatgttggccttaataatcaggcgctggaggagatgaacttgggaggctctggttatgcttccaatgtgatatttgatgctttcaatattcaacagcttttttagaaccccttcagctcttcggaaggtccttcacatccatcctacggacccaatgactttggcgtggtcacaatcccaaatgaaccaatgttcgagcgggtataaccagcacctgggtgagtttaccccctcagattggacttggctgcgcaactcctcgtcaaagggatgccaagaggcttctcttaagtgtaacatatgggttagtatatgatgtccttgtctttaattcatcacgtgctgctgtttgtatatattttgttttaactgtgtcatttgtttgtatgcatccgtcttgtagcaatacactcccagccctaaccctttggaggggagaatctgtcgcgcctccaacaggctctgagtgatttagaggagtctcactgccagtgccaggctctttaaggggaggtggaccgcctctaagttttgctgaccaacgagcagccctcaatggccagtctcatgtagtaacttggggagtatctctccattcactaaaggtgtctctcgcactcgcatgttttcacgaagagacttatagccaagattggcaagctgcaacatcacctcttcactattaaggcaaggaacaaggaagtgtcggaggacaagattgagcatctattatacacagtttggatacaaaatcctgacgtcgactacagtgtccttggttcatttacagtagagatggttgagtctttcagggctgagtatggagatgcagtcgcaacgtgctggggtaagcgtcgacgtgatgcgggtccctctagcaattgcaactagtaggcgttccttcttgtgatcatatccgcggagacttcaggaactttgttattattatttttttgtttatggatgactgtaaacctcctatttttacttcatgtatgcatgacatcaagactcaatcttggtcaagtggttccgaccccttggccgagtggtttaccttactttgttgaatgaatcatttgctttgtgttctcttttttgtggtattcaccaagtatctcttgggatcgatctttggccatgcatcgttgtggtcagcggattttactttgagggagttttggctctttgagctgcctccctcttattgtaaatctatccttttacttggatgggagggagcttatagcacttgaccgcgctaccctcttgattaaagaatgtttgcttactcttgagaggcgtccatcttgtttcggctttacgccatgagtgtccttgaggacctcttttggcttagctatgttttacgcaaagaagtgtgtttcctatcgttaatcaagggtatctagtccttgacgatttagggatacacactttttactcatctcctcaccccctaagtgtattgcgccatttatggggctgtacacttgagttacatgcttatttctaagggaaaggaattaacaaccttcgaaataccaatttgatgtaacattcattcattcataaaaaaagttttctgttacatgcatacaagtgaaatagaaatgaagaaaatgaaagaagttatactagtggagttaccccaagctcgctccttgattcttgtcatccatattaaaaaaggttacgtgatgcttctcgtggctgaccttctcctactttcccactgccttcgcatccccacccccgttcaaaccgttcggaactacctttgttactgggttcgtggtcttggtggcaaggcacagcgagacgttgtagcactccctggcctccttctgctctcctttaagtgtggtgactcccctaggggtcggaaacttcacagctagatgatacacagaggttactgccttcaatcgattgagggagggtcgtcaaatcactacattgaacgcagctggacagtccaccactaaaaatgttaccatcatcgtggcgtgtttggggctttctccaaccgtgagtgccaactctatcgttcccagcggttggactgagtctccggtaaactcataccactttcttgagggccaccaagtagaggatatctatggagctcccattgtccaccgcgtccgatgtacccttgtgttggcaatttggatcatgatgactaatgggtcattgtgagggaagtgcactcccagcgcatcttcctccgtgaatgttattgagtcgctctctcccctagaactttttggtcgcctttgttccagactctaaacttggggctcttgtctcgcctcacatgcatacttttctcatcccttgcgggtattgctcccaactcctagtcctctattgaaagtgcagatgtctcccagcacttctgaggcctcttcttgatcatctcgttggcgcgactcgtttggcctttgattctccttccagtactctcctagatacccacgctgtatcagtccttcaattttgaccttaaagtgcttgcactcttctgtgaggtgtctcacgtctttgtggaagcggcagtacttgttgtggtctctcctagctctttccctcttcaagggtggcagtctcttgaaggaaacatgatgctcattggtgaggtagacatgttctcttgaatgggttagttttgtgtagtgggtgtattctcgaggtagtggatctaactccctcttggctttcttgtcttgacggtcatccttatacatgaatccccgctttttgtgtgacccctcagctcgggtcttcacaggttgttcgtcttttccaactcctaaattttcatgtccatcctccacgaagatatacctattggccctctcatagaagtcctcaaggtcatccagctctctcttgagcatgttgttctgcagcttgcttcttggtctgactctggcagcgatagccattttatgatcatccttagagagtctccccactttagtcacttcggtgttgaagcactggatgtagctttttaagcttttagtttctccttgtttaatattcaccaaacttgtcctcaggacaacataatctcgggaagcatggtgttgggacaagagctcatcggtgaactgtttccacaaagttatagatccaggagccaacctcttataccacttgtaggttccgcctcaaagtgtcaccctactcgtgactcttttcattttcataatctcgttgaaagcgtccaagtgatacttcggatcagtgatcccttcataaggagatatgtttggctctttgaaattagagggtaattgttcggattggatttctctagaaaaatgagattcatcgtcgaaatcttcttcatcccaacttccctcctctgaggcggctgaggatatccttctacggagatcttccatctccttgtcaagatgttgcctctttttattcagcttgtctcgaaggtcctgcggcgtgcgtcttggaccttctttgtggtggtgcattcttgatgacgacactttcttttcgacagttgttttttgattgagtttttccttaggtcctctgggcccacccttgagtcggttctcttttgttagagagagggctccaagtccatctggggcctcgcctttgatggcgatgcttccggtgtgttactggtggaacactttaatagtccttcgtcttccagattgtctttctcctttctaataacttcgagttctcttcactggaataaaggtgtatcaaaatgccccttcaggagctcgtccatcaccttctacatgtttgccacagtctcttctaacctcaacttgtttatctttaacttattcatctcgttgttatgcatgcgggtgcgggagcttgacgtgacggagtagactcgcttctccttccctgccctaggacgcgaggtccctggatcctttggggcagaggatgtctgatggaatgaaccctccgtccctgcgtcacaacttttctggcaatggttatggaggttgtctctccatcgcgctggtaaccgatgggggcctcttcacgtcggtgcccttcttgtgctgcttgaagtcccaagatatccccgcctccctcttgctgctgagacccgcgattgatggcggcctcttccttggcgactgggacaggttgatctctccttacggcaaccagctgatcgttgtcaaaatggatttcaatgtctcggaggcgacgtgagcgtctaggcattgctaaaatgattgatagtatggaaatgactatttctaagttttttgttcccacagacggcgccaaactgttgacagacagaactcgtcaaccaagttagtttgttagaaaatatgtaactattaaaagatgagataaagagaaaaagtgaaatgaatgaataattctctctattgcctttctttctgagttacaaataatgaacttccaacccccttcacatctcaaatgggggtacttataggcactagtggccaagggtacaacgtggttaaaaggtatcaatacatcgctttcgaattgtggcttgcaggtgcttggagtggccttgcatctcatactcttgtttggtatcagttggttccctactacaggagggtgatcctgagctgcaagtgtgtggtcctgaattgtagacaagtggttttgagctacaagtgcatggtcttcagttgcaggtttgagagtccccacatgcaagccttaggtgagtcgtcatggtgtacctttggtcaggtcctcaaaccatgtaggttcgttgtcgctgctacttgtactccccttcattcagaggtttcagagggcatgggtatacgccttcctccacacgccgtgtccccagagttcttactcaactttactcttatccatattccctcacttccttccctacacctgcatccctccttgcatggacccccgtcacgcctcccatcacacacacacggctcgcccctcatctccacttcacatcccctcgtcatgccacccatcatgcacacacggttcgtgtgcgagcccccatgtctcgccctcatctccccctcacgtccccctgtcatgccacccatcacgcacacatggctcacgtgcgtctcgccacacaactcgccacacggctagccacttttatactatctccaagggtaatacttgtaacggtgcggacgcgccctaacattcaaagtactatttttgaggggtggtgtaacgccctaatctataggaacgccacatgtgtgattttataaactagtttaatact

SEQ ID NO: 19586 - DNA, 5620 bp, Cannabis sativa
atatatatatatatatttatgtacctaaaattcatgaataatggagaaccttatatctgataaagcttccaagattagcttgcgctattgataatttactttatttaggatgaaatgtggaagcattttggtcgtaaatgggaaaaaaaacacccttgatatccttatacatatcaaatgaagaccttctccagatcaaacacccttgttccagcttttaacaatgtatgatgttttattatcaggtagatgagactgagtcgaaaagaaatcaagttgagtcaattggtgaagagggttctgaagatgtaggtgttggtccagatacttcttccttctctgcatttctttactcgcttttgtcatctccgaagtctggagataatccaaacttagatgaaaaggttgatgagaaagtggagcaggccaatcccccacctaactctgcaatgaaagaaaatagtggaaggagaagtctattttccaagggaaaacaaactcttggaagggttgttagccaagctgctagaattagtgggtatcgaaatcaggatcgcaggggtgattctaacttgagaattgatggtaacaataatgctaataatgataactctggagtggagatgagacctatccaaaaagtgaatgagccagaatcttcgggtgactttccaggtgtttctgaaccttcattacttctttcggagaatacaagaactgctctctatgcttcacttccaccacttgttcaaggacggaaatggatattattatacaggttaaaaagatgagaagtttttcttttgagtaatatgtttttgaaagttccattaaactgctggtgtttctgattttgcttttgtctctaaatctctttattgttctgtgtagcacatggaggcatggaatttcactttcaacactatacagaaggagcatgatttggcctggcctcagtttactggtaaaagtttgttttctatcaagacttttacttggcagtggcataagcacttcattttgaaaatctatggcgaaactttctcagagctttctgttgaaaaataatcaattgtttagattatggtacagccctttatactgcctaagagcatctgtagtgtagcgatgctatagtattttataaatagaaaatgctgctatggtggtgtgctaactaaatttgatacatgttcaaagttgtatcaaatttgtcataataataaatgagctttataataacaatactgacattgtagaatagaaaaatgaaaaaacaatagaaaagaagtttttttttttattattttaactacaaatttatgtatgtatgctgaagatgactgctttatgactcaaataatctcaggttgttggagatcgtaaaggtgcagtttttggtggcttggtcgaggcacccttaaacccaaccaacaagaaaaaatatcaggtactactgaaagacgtactttattcaagctcgttcagtgactcttttcttttctctgtaagtgactttgaactatgaacagggatcaaacacgacttttgttttcacagatagacctggtcatcctgttatctttcaccctacaggtatctgtatttcagaaaatagtagagaactgcaaaatgttatgaaatccctacatagatcctacttgctattttagacatttatttctttgagagagaactaattgcagtaaacaaacaggcgcgaatcgctatttcactttgtgctcccttgactttttagcaattggcgggggtggtcactttgcactatacttggacaatgatctgtaagtagtttccgccccctatattcttttattctgaaataaataagaagaaaaaataagaaaggatgtactcctcttttctttataccttctattgaagattaaaatttggtgaatggtgaattgcagatgtaatttcattgtcttttcaatgctttttttatttatttatgttaaattatttatgttagattaaacggatcaagctcagtctcggaaacctatgggaacccttgtcttgcacactcagaggactttgaagtaaaagaaattgaggtgggtgcaaaggttactatctctttcacatatgattagtcatctgcacgctaagtttaagcacatcgacacattcagataggtgcaagcatgaactataaaaatatatatatattttcattggcacacttggttcctaattgagcctcaataccaagaggtctcaggttggaacttgggtctcactctcatccttttcccaacctagtggctcacacactgcacgcccgatatgattctgtagaacatcacatgaactctgtaaagttttataatgtcacataaaggctttgaatgaaaaatgtcttcaagttcttcccattgcaatgcagctgtggggttttgtgtatccatcaaagtacgatgaggtagttgccatgagccatatggaagcacctggtatctgtcgatggtgaatgctctcagacaaggttaaggaactggctgccgaaaccttattattggtggttaatgctcggtgatgctgacccaactaacgagtgaaatcacaggtcttttttgtacagatcaactgtttgttgataatgttgtgatgtctttctgttttttgcatataaaggtcgttccctgtatatatttttcaataaacacatgctgtttagagagcagccagttttgtggaatgtatgatactgtttttgtagttttgaacatgtttgtaattgtaacctctttagtccccatctgttatcagtttgatggctaaatatcaaaatcaatgctgattcaatacttgattcgatgtcgtgttaccttctgataagattaaactacattttcttgcttcttgttttacaagcacaaaggatttaatgtctaatgctaatagcaacagataatcttgtggtttaacaaatgaattatcttaattggaaatcaatcataaaactgaattcttttatatttaatttttcttatggaaattgttcctagcaaaaacaaaaaccccatcatggaattgcagaggactgtgcaagaagcatcagttagaccaaatatcttcaacttgtagatacataaacaagtacgagaataagatgaaatacaacactcaactctaggaataagaaaacattgagatgacaaacagattttattagtaatctacagaaaaagcctgagggattggaatgaaaaataacctaagctccaaaatcagcatgatgatgtggattaaagaaggcctttacataaatcaacaaacggctcatcaagacctgctccaagctctaactacagtgtttgctgcaaaccctgctagaaagtattaccatctgttagcccaatctggtaacttatcatcatatacagatgagtggtttaacattaacaataaatgaagaccatttgttaagttgtaactagtacctgtgctattacgagcaaagctaggatggtgctcatatgacatagtattgacattaagttctactcaaacaaccgtggctgcctgctccacaagcccttcttgcagcttttgggaagatccatgcggctgattggtgtccttgtcacccaatgattcctcatatgctgctgcatgaacaccaagagcagcacggcctgatggatcgagattattggaccatgctgcatcccattcaacagctttagcagtactacatgccacacttggaccaccaggaactgttgatctggcagcattctgttgaaaaaaatggccagttgaatcagggctctagtaaaaatataaacaatgcttccgaaattggatattttaagtaaaaaagagcagtttagtatgaaaagtaagacattagcaatttagtaactaagaaaacaacacaagaaacaaaccagcctcccacctgacagcgagcataaaaattgttgatgaagagaaagtacatatccgttcaagaaaaaaaaaggaaagtattatctaaatatttcaccttgggaaagaacttctcgaatatagtcctgtaatagtatccttcttttgtggttggagtattctcgggataaatgaagcttgcttgaattagcatagcatctgttacctgatcaagggcaatcaaaagtaaagagtataaaatgcagtcaaaaagaagaagcatctgtttcttgttcaattcagagatagaaataagttggcttaaggtagtacaaataaaaagcaaattctaacaacacccaaacaaagcaaagtcttacttgtttgttggcatgatccttcaggccatcaatccaactgtaccctacaccatcactgaattgttccttctgtctgtacaaaatgtgctatgaccaaaaaaaaaaatcaaacttataagaaaaatgatttcctgaaaaagagatgataaacatcccttcaaaacaatgaaaacaagatatgtatgcaaaacaaagattgtgtataacttgatgagcacaacaatctgtgtgttgcaaaaagcaacaagtacagaggtacacacctttggtaaatatggtttctgatcatcatcaaatgcgttacgtaaaacccacttctcgattctcccaagatcaggcctgatctgtagttatcaatgcatgaaagtgccaagtattacaaccatatatatttagtttaaattcatgaacatatgatgcaaaaagttacccaaagagaccacccctatgttatatattaggtctaagacatggataacgttgcttttgcttcaaatagttttaactttggatccaataaatatatacatatggatcatatatttatatttataagcttctctaagtggaaaaattataatataacttgatacacaaagtaaaagttcaccattttccattctggatcaatggccatggcaatgttgataaattctttgtccagaaagggtacacgagcctcaagcccccatgctgaagttgatttgttggctctcagacagtcataaagatgaagagccttgatctgatcaattgtccatgtaaccattaaaaatttcagaaactcaaagctaaggcagtatgacctaatccagcaaggttgaattgcaaggtcacatgccactaatcaagaaatgaaatatcaaggaaagaagggagacattggtcaagtacctttcgacatgtttcttggtgaaactcctccttgttcggggccttgtggaaatacagataacccccaaaaatttcatcggaaccttccccagagataaccattttcactcccaaagatttaatttttctagacataagaaacatgggagtgctagccctgatagttgtcacatcatacgtttcagtatgataaatgacttcttcaattgcatctatgccttcctgaattaggaacaaaggaaacaattctattatcttacatcttacagacttaaaatgcttgtagcaaccttagctttataagggatggatcacctgaacagtgaagtgaaactcatgatggcgagttccaagataatctgctacttcttgtgcagcttttagatcaggagagccctgaatacataataagtgaggcaaatgaatatacactaacatttagaaag

SEQ ID NO: 19587 - DNA, 1196 bp, Cannabis sativa
tataaataatattttattatttcattaaataaaaataaaaaatcacccatgaatttttcataaaccaagaatttcagttatataagcacacactttgtatataatagataaatatgtgtgtgtgaagaaggagcaaaatctagatatatagctgtgagaaacacacccaatgactaacttgataatgttcataagtcttttagacgacccatatattaaccttaaataataaaattatacatgtgcaatgattaattaaaagttatatactacatgtaaaaaaagaagataaattacacacacatatgacatatgtatatatataagaatgtggaataagtgtcccctatggaatttttcatcattttgaagttgcctcgattggacaagcaaaccctagatgccattcaaataatattctatatatttatatatatgatatttctttttgattaatggaagtttatatatatatatatttctaaaaaatattatattatattgaccctgctactgctgttgttagtgcatggttgaagtgatgcaccgccctaaatagtaacttggcaacatcacacttttttgacctatattattaataatcccaattccaaccctttttcattattttatgccataatccacatgctcatcatcataataattaattttaatatatattttttttgaaaaaaatcatatcacaatatgaaaccctttacttctaattaccaattaatgtataatattgctttcctttcattttatattatataactctcaaaatgaatggtttaaaatctttccattaattactcacatacagtacatatgcattattatataaatatatatatatattttgggtctcaaggtctttatattaattaattaattatatataagaacctaaattaagcactagctatagtactgtttgttcctccccgggcatgactttataagttaaaacttaaaaaaaagatcatataaatttaaggcctaatgatcttaattagaactacttaattcaacttcactttcatatattacctagcttaatcaagtcacttagttgtttattttttttttataggggtctaatgattattagttatcacagctgattaaaattggattaaaaaaaaagctgttggaagtagattactacttatatatatatagccagtactgtt

SEQ ID NO: 19588 - DNA, 7737 bp, Cannabis sativa
attacaggttaaagaaaaatgtaaccatatgttacaataaaaatgtaaccattgaatagtcacccattatcatatatatatatatatataaataatatagatgcaattataatatataaatatatatctttttgaagataatatttattaatttatttatccataacttgtcgaatgatgacctctcttctcacaacaaattaaggaagtgaacacactagtaggttgatggccaaaactttttctttcaagtcactatattgcacttcaagacaaaattacagagcacatcaaccaacccccagtacaaatttttcccataccaattttggtctttcaaattcaaacctatcttccttatttgattaaatccttctagtcgatgtataattatttgtttcttaaacagagcaatataccaacaaatatcttttacttcctgatgccacaaagctcgatttctttcaatccaaattcaaaatacatttaaaactgaaatgcaccgatccaatgccaacccagctccacatttccttggtataccttcggctaaactcacattgaaagaataaatgagtgtgaattttaggtttatgaccacagatcatacagttaggatctacattgaagccttgacaaattattttgtcctttgctcttaacctcttccaaatcaccaaccaagttacaaatcagtgtttgggattagttcttaaaaattattttatgtttttataaactgaaatcagtttttagtttttaagttatgaagtcaaataaccttatatcttttctaaatatttatagcataccaagttccagcacgagtagcggtcagagagaataaagttttaaaatttttacatttgacaccttatttttgatttaattgtaaatattgatttggccatttaattcagcattttgttttagtattaatgacgtttttcttttttgggtatgtttcaatacagtgtaatatatcacttgtcttttccccttttctttatcttttgactttcaccgtctctttacttattctttctctctttcttctatctctctcttctctccatgtttaaaaataatttctggtcaacatcattactcagttaaacttaaaagaaatattattgtgatctactttcaatatgaacattttaaattatgggaagcatatatttttttcgctatttttgtaaaaaaaaattatttaattactaatatagtgattagttactgtttcatatattttttttttaatcttagttaatatttattttaaaattttgttaattgaattatattatattatacaataactaattagctttcaaagtacaaaaatttatataaaatgattagtatataaaactggtagtttgttatattacatggtaactcatcgaaaataatttttaagattccccaaacctatttaaaattataaactaccataatgtaactcaaaaataactaattaattactaagatgtacacaaataagttttgaaggtaactaaaaagtttctcaaattatatgataaaaaaataatttttttatgtaaaggtaattaattgttttcttatcaataccactagtaaccaactttttgtttaaaagaacacaagaaaattactataggaggacacgtgtaattctaagattgtttaattcagttattgtacgcctaaacataggtccaatcaaggtaaatgaccaaatccattactaaagtcaagtcattcgaatgatgggcatatgttccgtccacacaaataagtatccagctaagtagatcttccgatagcatcaagcagtgtttcaggaagagtaattattgagtctttggatgtcaagcttagtatctcactcatttattattatatcctataatattagaattttatttctaagatcatgtcaaagaatctaatattctgaataagaaaataagataattctaatcaagcattaatgtatctttattatctataaaagtatgacatgatttgacaactatcaacatgatgtgggattcacgtcaacagaagatcaatcctcatgggctggctttcaccagatgggcccgaagtcaataagttatttatatttaccccattagtgggtaaggtttacagacaagaaccctaagtctataaatataagaaaacccattcatgcaaagggttagaatctcgatacttgagagttagaaaaatctcgatgatcataaacttggcaaccacttgtgcaattcaaacatacttttctagccttaataatattgactcgtggactagagatcgttattccttgaaccacataaaatctcttatctttttctttgtttttgattaagtttttttagctttaatataattatttccgtcttcgaaaatcttagtaaatattttagtgttttcattgaaagctgaagaaaaagttgatatcaaagttgtgaactgtgaaaatggtagccacaagaaccattattaacaaatttggtgctcgtgatagggacgctcacatggaaggcatgaaccctcctactacaagcatgtgttgtaggagatacagcagaagtaactagccatcctaccaagaaaactcaacataatgagaaatatgttgatcagaatcccatcaatgaagaaggtgatctagaagatcaagatgatgatcttgaggatgacgatcctggagatgatggtgcaaacaaagaagaggaagggtattactatgagctagatcccgaatttattcaaatggccaaagaacttgctaaaaccaaaaataaattggcaaaacaagaagacttctctcgtcaaatgcaagaaacgttaacaagattggaggccataatagaattagggaacgtggttcctgatgaaaacattcctgatgaacctgctcctcggtaaaatattactacaaagaaaacaaatcctacatattctagaacttctgatcccgtgagggacaaaggataaggtgtcgtggaagaacctacaaaaaagactgcttcaacttctccacggaacaacatcaatattgcaaaccaacctttgcagaaaaagaaggtcgctaatgctctagagcaaggcctcccaattgatctgtgaggtagagtttgcagggcagtaggcctggtgttcaagtacaaaggcctattgtttggggatagaaaaactgccctagtatttttgttaactagagtgatggagtagacaaagttcacccaattccaaaagacaatatatcaacattggacctccaggaatgcttaaatgaaaagaaagatcgagctgcaggcgagaaggcaaggtatcgtggaaacaatctcaaaaaccacattaatgatagagtttatggacgtgaattctaagacaacaacactaagtgtctggaagactaaatagctgaattgaccaagttcatagaacgcctcacccaaaagcaaagtggggttgtatctgactcaaaagaaggagatccagaatcatatgtaagaagaataatagaggcaccctttctaaaacactttagaatgcctcatgtggaactatatgaaggcaggacagaccctttgtcacacctatctaaatatattcgattgatgcaagtggcgaaggaaagtgatgatgcaaagtgcctatatttttcattaactctattaaaatctgtcaaagattggtggaaaagattatctcctagatccatttgtaactggaaagatctacaaacaatgttcaaaaaataattcatagttgtgaagtattatgacatggactttcagttcactacctaatatcaagcaacaactgggagagagtctcaagaagtatatccagagaatgatggaagcggtagccaagacaaaggtcaatgatgacatgaagttggcaaccttaactttagggatatctatcggatcgctattgtagggaaaattacaaagaaagatgtctgacaccttgtctaatttcttatttagtgcccaaggtttcataaacttagaggaagcttatgtccatgcttatggagtgcctctgacaatatcaacaaatgtcagtaaatcgactctagctcttcaattctttgcttccactattactcctcctaaaagtgtattcaaaagtgtacatacccactgtctcaagtcaggcagtcgcacagaccaatttttctaattacagggtagcacaaactggatgtagtgtcgcctctaggcaggcaagttaacaaatggaagttctggaattgaatgtgagtcgttctaggaacaagaggagtggtaagaatccaagttgaggtgaagctccaatgaaagggagaagtcacgaaccaagatattctgagtataccagtttggtggatacttgggagaatgtttatagggatacttgcaatatatccactacaagaagtcaccgcctatgcacaagggggaggcacagatggtaccaaaacaaaaggtgtgaatactatggtgatgttgggtataccacgaatgagtgtgactatttgaaagaaaaaatagaaggattagccagaaattttcatttatccaacttggtacatatcctaattatgtatcctaggcagggagtggcacacatgcaactatttgctcctagacaacaaggaaccataaatcctcatcagggagtaggttatcttcaagcttcgggaatacaggccccaagaactcaaactcctggcatgcagaccttttttagagggtaccaaatgcctaggtacctaagcccatcccaactctcaaaccagttaatccgtattcgcctggtgttacttgccagtggtagatggtcatgttgcaaccatatctgaaggctcacacattgccagaagtacaagaaatgctcagaagagatacctcaatgaattagatcaagaagaaacatgtgctcttttacaaactcctgcccattgtcggtaaatgatgaatctcccaatcacattcatggaagaagaagccaatcatgtgcattttcaacgattcattagtgattgaagctcagattgcaaacaaaagggtgttcagaatcttggttgtaaagaccgcttaattttattatggaatttagcagataattagggcttaattatgaaattagatttttaaatatgatttatgaatatatggaggtttatttgaattcagggtgtattatttatgccatatatgaaattttatgttttttatgttttgtgcccagaaactttggaacgcgacatttcaccaatagaatcacattttagtatttttgtagtagcggggcaacttagatagacattgggaatgttaggaatattcgagattttagaaatgaccaaaataccccttggtggtatgtttgcctttagtgtatgggagggcaaatgggtctttttaccatttaaggatatttgtctttagtgatatatttaagctaataatttgatttttagtggattttatatttacttggggtattatttgattattagagtgtatagtattaacccatctctatttttattattttttatatatgattctcttcctcttctatttttttgttattattttatatttttttattgtgtttttgtctctttaattttctttatttcttttttctatctcgttttagtttccaattctctttgttatttttgctccatattgtatgcttaaatcaactctgatttttgagcaaacaaattaaaaattaaccaaaatagagaatgatgttagaagtttggttattaagtattgatataaattttataatttcgaaactgaattttaaagttactatcattttttaagattggctattaggcattgtatatttttcattatattgttgatgaaattaatttttttcctgtctcttttaattaaataattagtttcttttaatattgataaaactggtttttaaagttagaatcgtttttagattatatattttttcattatcttgttgataaaactgttttttttctacttcctttaatgaaattattagtttcttttaatgttgataaaaccaatttttaaagtttgtatcatttttagattataattttttgtattgtattttttttttcagtatgatgttgatgaaaataattttttttctgttgcttttaatgaaataattagtttcttttaatgttgatgaaatttgtttttaaaggttagtatcgtttttacattattattaaatttttttatgaaacttgttttagtttgtgattctcttaaagatatttatctcatattaaatgattaaatcaactctaattttcaagcaaacaaataagagatgaaatgtcaaaacagagtatgaagttagaaattggaatattaggtattcatataaatttatacattagaaactaattttttatagttggtgtcgtttttagattatattttttgcattgtattttcttttcattatgttgttgacgaaactggttttagtttttgattccatttgttatctttatcccattttgtatgattaaatcaacttttgtttttgagaaagcaaagcaaggattgaatgtcgaaataaagaatgaagttagaaatttcgttattaggtattcatatataatttatatgtttgaaactagtttttaaagtatttgtatcatttttagattataattttttgcattgtacttttttctttatgttattgatgaaactggttttttttttcttctattttaatgaaataattagtttattttaatgtttatgaaactggtttttaaagttggtaacgtttttagattataattttttgcattacatttttttttcattatgttgttaatgaaactggttttttttgctacttttaataaaataattagtttcatttaatattgatgaaactggttcttaaacttcgtatggtttttagatgatattttttccattatgtttttttattatgttattgatgaaactagctttttgcctcttataatgaaatatttagtttttttttttttgatactgatgaaactgaattttaaagttcgtattgtttttagattataagttctcgcttagtatttttttattatgttgttgatgaaattgattttattttttgttcaatttttattatttaagagtctaaaaattagttttatttttttttaacttgactaattatgtttcttttcatggttgttatattatttgagttttatatttattttttgttgattctaattagctacaggttggtaagaaactcaaactaaaatatttatgtaatgtgacaccatttctgatatgagatagcaacaaacaacccaaataaaaaaatctcaaagtaattatgaaaaaattaaatgtggtcattacaaacaaaaaataaaatgaaagaacaaatgaacaattaaataataacgaataaataactaaataacaatctaaaaaaaataaacaaacaaacaaataaacttaaatgcaactacaaattacttgtacatcaattcaaaattatatgtgcacaacaagaaaaggaaatatatatatatacttatttagaataaattaatttaatattctacttcggtaatattttattttttaaaatttctatggagtagtaataaggttgttagtggtggtataaaatactcatatatatatatatatgaatgtaaatatataaaattcaaaataaaactag

SEQ ID NO: 19589 - DNA, 2386 bp, Cannabis sativa
tctcaatgcttttgtctagggtttcccatgaatctactcaacattttaagtgtacatgctatgtctgatctagtacaaaccatgacatacatgacggagccaacatcaatggcatacgaaacgtttgacatttcagacctctcagtttcatcgtttcatctttaggcatctgagtaacactcaatttaaagtgctgtgtaagtggagtgcttactgcctttacattactcatttcaaacgtatccaaaacttttttgatgtagctcttctgattcaagtacaatagcctccttccgctttttcttctaatgtccacgtctaagattctatttgtcggaccaaaatctttcatttcaaacctcttcttcagccgtagtttcaagtgtttgatctcatgcatactcttgctgaaaattagaatgtcatctacatacaccaacacatacaacacatctctttttctttctctgaaatatatgtagagatcaaacatatttctcttcagatctatcttgaccataaaattatcaaatctcttattccattatttgggagattgtttcaaaccgggactttcttaacaagcacaccgtgtgttctttttcaactttcaagatgtttcattaagatttttctttcaaatgttatacgtgagatttttttattttatatgaaataaaattgtttaaatattagacacagatatatatattttttttaatttattttattccagaaaaatctattgctttggaccgtacaatacaatacaaaacctttcttcttcttcttgttgctctctttctctcttttctccactttccacaaaacgacacttaattcgttgtcgtttctctctgaggagaatattccaatccaaacacgatgaacaacgatacctctgttcctctagacagagacgatgacgtcgattgggagatgaggcccggcggcatgcttgttcagatgcgagaagacgaactccacgccgccgccgccaccggagctgctcctccttctcgtggtcctatgatcaaaatcactgtctaccatgacacggctcaccacgagctcttcgtccctgctcaatccacttttggtatattttatttaatttggttttttttttttttttttattatattgagtattggtgtattgggatgatttgactttatgctttgctagggttttagaagcttaattttgatttagttgagtttacgaagctttttgtcacacaggggagaatttggttttttgttcatatgggaattttcattagtgtctaatttttcattagtgacttttgttacttgttttttatatgggttcttaatatttatggtttgagcttgtttgaattgattgtattttaggggatgtaaagaaggttcttttacataaaactggtttggagcccaatgagcagaaactcttatttaggggaaaagaaagggaggatgaggagcacttgcacatgtcaggggtaaaggataagtcaaaaattgtacttttagaggatcaagcaagcaaagaaaggaagcttgaggagatgaagaagagccttgagatagcaaaagcatctgaagctgttgctcaagtcagagctgaagttgacaagctcacagaaagggtaaattaatattcaattaccatatgaggttgggatttcagggagactcatttagtgtcttttaatagtttattctttattgtaggttgatgccttggaagtggctgtgattggtggaaccaaggttgaggggaaggaatttgatgtatcaacagagttgctcatgagacagttgctgaagttggatggtataaaagctgaaggagaagcgaaactgcagcggaaggctgaggtttgtacttattgtttcaaaatgctaagtttgttttcgtttaacttttgtttctgatcccatactgtggaaatctacacactcatcggttctctgttttctttgccagcaccttttggagtcattagttctctccaaaggggtgtgtagagaaagatttgttgagacagtgataattgacaataagtggctgcatttatagatactccatatctaaggatttctttcttatattatatggtagtacatggtacttatattgtactgtagaggagataatgaagatgctatgatactggtgttagattatatgttcgtattactctagtccttttgttttgccacccatgcctggggagtaggggttctgctagtaattgaaatattacttaaaatctagatttatcacaatggtgataaagggaaatatagttagttaccttctcaattcagttgtagaaacaagatgcatttcatgctattatggacataggagcatggaacacaagcatttaagc

SEQ ID NO: 19590 - DNA, 3762 bp, Cannabis sativa
tttatttatttatttttaataactattaataaatattaaataatactccttgtgttatgctttctaataatgttattttttttaacaaaaaatgttattggcattatatatataggtgctcatacaattggatttgctcaatgctcaacgttcaagaaaaggctattcaacttcgagggatcaggaaatcctgatccatcactagactcctcacttataaagaacttaaaaagtgtgtgccctaaccaagacgattcagataccaacttggttggtttagatgcttcatcttcatccaaattcgacaatggcttcttcaaaaacctagtcaataactcagggcttctccagtctgaccaagctctcatgacagataattctactgcgtctatggtcaagacctatgtttactttccttcttccttctttagggactttggagcttccatgtttaagttgtctaatttgggtgtgctcactgcaaaagatggagaaattaggaccaattgtagagctttaaattaattaaaacaaatctaattttattatataaatatatataatactagaaatgtgacaatcatgactagctactatataggtatgtatgcgtattgtactcttatctcttgtagtttctataatattaattaagggcttcttgctttattagagcaataattttagtatgcagtattttagtgtccaagttttcaaaaaaaaaaaaaaactttataaatatgttaaagatggacaccacagaaaggggtccctctctttagattacataagcatcctggctagaaactctttaacactttttgctagaccatcaacaaaagcgttatccttacgactaataaaaactacattacaaaagtcaaagttcttgacagcatttaaaactaaaatagaaacattgaaacaactgtaattagaaagtctctgcaaattggaaaaggcatggaccaccacttgagcatcaaaacaaacaacaatctttttgagatgattatccaaggccaaagatagagccaacaacactgcacgagttttagcttcaactgcagaacctacttgttaccaattatgtgcatccctggtttgtaaggcattaaagtccaagtaccaatagccttaagaacatcaatttcttgatctaccgagactaaccattttggattttgtagagctatcttaagagattttggttcagatggaagaaaggattcatgtaaagggtgttttgttgtaaggtatgcctttggcttaacaataccacttctggacatagtttgcatatgatgtgttcgagttgcaaggacctcaattctgttactagacagtggtggatggagcaactgtggttttaatatgtaagacatgtgtggtgagaaaatgtatagtttcttgtgtagaaagagagataggtgggcttgtgtttggtggtgggatgggagtggctgtagttataatgctgatgtgggaagagaggtgtgtgtttctggtgtgggaagcagtgattctggtgttggtaggattgtgtgtttggaacagtaggtgatgtgatagcagggtaagatgaggctagagggacagtgggtgatgtggtattttgtatttgtattggcaagggtagtgtggagggaaggggttcatttgtctcagtagcaacattttgaggtaaaacagtagaaatattattggtaacaattgagaaagtggcagtaagaacataaccagaagtagaaatagattgtacttattttgatgaaaattcattgaagacacccggatagtgagtctcactaaagataacatatcttgcagaatattctccctttgtcatttcacacaagtagcctttgtgaaaggagaataaccaagaaatatgcattgttgtgacctgagatccatcttttgagagttctaaggccttagatgagggaagcaggttcatctaaagggcctcagaatggtgtagtcaggttgaactccaaataagcactcataaggactggtgttatttagaacaggtgtgggcagcctgttaatggtgaaagtagcacgcaggaaagaatgcaccaatatgtaaggtacaggatagattgagctaatattgtaagtcctatttcagtaatatgcctatgcttcttctctactcttccattttgctcaagagtataaggacaagggtgagagaacataatgccatctgccaaaaatcttgcaaaagttttgtattcaccaccaccaccatatgcttgaacgatctttataggtaagtcaaactatttatcttccatactttttaacctgaatatatcaaaagcttgagatttaaaaggtaattaaactggctatagtcatccaagaaatagatataatatttaaaaccatctttagatggcacatgagaagctcaaaataaatctatgtattaactctagtggttgactagcacgattagaggacgtagagtaaggtagtctatgattttttccttgtcggcaagaattgcaaaaatttagtgtctttatggacccaaagtggggtaagtggggaagcagtttggtagagtggatttagctggttgactcagcttgtagcgccaaagattgacatcaacaaaatgatgcatagcaaaatgtagagtattcagaaaaagaaaatgaatcatttttatttattgatgagtgattacgagcaaacagagacacaacattctcaatattacatttacaattggacttaaaaattgaatcaacttgagttactaaaagtagtggtaagatgacattgcaaggtagattttggttgataggaagaattaccaagaagataaaggccatctctaacctttcctttgaatagtgcaactttggtttgtttgtccttagtaagataacaatgtttataaaattcaataaaaatatcattgtcctcggttagtttagagacactaataaaattctcagtaatagatgggacttgtaaaacagaatttaaatttaatgggcacaaattatcaaaggaggaaagagtagtagaatttatatgagagattagtagctttttaccatccacaacaactaaagtttcaaggccattataagccatgggtgaatcaagattgtcattatcaaaggtgacatgagttgtggcacttgtgtcaccaaactaggagctgtcttcaccaaaatcttaaaccatagtggtggaattgacttgtggatcacaatcaaaatccaactcagtaaggaaagcataattttgagaaggatttgatttcagtgtactccacttcttaggggtgttcgtgatgcaggttgtaacttttttttaaaccaaactgcatatgcagtttttgtagtttctcaaaccgtaatcgtaccacgagatcttaaaactacaaaaaccacaccgtgaaaatgtggtgcagtttgagtagtttatactatcatcattatcaaatattataataaatataaatgcaagattggcttgcattttgatagtaagacctatcatggcattgtgaggcttcagacgactttcgtggaagaggagtaatttctggacttcttcaagcgacaaagtatcacttcttgaggtcattcaagagactagagagtcgaaatttccattcatgttgaacaccacaacacgtgaaaaacgtaattactttattattgaaaaagcaattacaccaagacttgaacactttaacttgaccacaatacacaccaagcactcactctt

SEQ ID NO: 19591 - DNA, 2648 bp, Cannabis sativa
aatgttgtattgttaaaagaacaaaataaaagaaaatgctattttttaattattttgtaaggaaagcttattgggataacttcaaaagtattaaatctcatttcaggcccattcactcactggataagcccatatgcttaaaagctgaggcccatttatgaagaagaaatagaaggaaagaaaaacaaaggcacagttcttgctcgaccaaaaaaactaagcaattcctaactaccaggactcccatgtttcaacgaacgttgctcagaattcagataaggggtgttttaccaaaaacaaatcaccataattatgcttttaataaatatggaaatttataaaattagtacaaattaataaagacaaatgctacttcacaatcacattatttcttcacttaccagacccattaggctctctctccatttctgtcatttcaggtaaaattacttcaaacattaatgtttattgaccaccatgattaagttgttagttctctaaatataattattgtattcccacggtttagaataatacccagttcgttattttatcttcaaggtcgaaaagtagatcatattgtgtggtgagcgaaatgggtcgccaagttctgcagtctaaaactaaaaagcttgctaattttcgattatgcaatgtgtcaaggtacatgggttccttttactttttaatttcttttagttctgttctaatttggttactaatttattttgctttagttacgctactgaaatattggagattattgctgagaagccagtatttcatgctctagtgatccctggaaatccaggtatgtttatttaatttgagtattgggtactggtgcttggctgtaaaattttagtcaaaatgattttattatttcatttatttatttgggatatttggttatttgaaggtgctgttctattttataaagaatttgttgaatcactttatgagtggcttggaggaagtgtgtccgtgacaggtaagaaatgaaagacttacaacatttcttatttgattttttcttgtatttgtttttagattcatagctgaatgatttgtgagcttggatcgctattttattaatctgttgcattttactgtgtttgatcagctgttgggcatatatctcataccaaaaaggtactatatttgctagtttctccttatatcattgtattgtactaccatgtatgttacatgtttactggtttggccttttgtaaactacaatagtgaagatgatgctgtctggaaaataatttgttaatccatagaaattaaaaaatttaattccaattttatgactgatctgaagaaagcttcaagtgcagcacaacttgtttatatttttatgtcaaattttctttttgtcaggattcggaacgtggaaggttgttctcattgcaagaacaaattgatcataaggtgacaacattctgcatgaccctttatctgttctgagcaaattcctggccttcaaatctccatctaaattcatgcttttgcagatagacttcatcaaacatgagttacaaaataaacaagttcctataatactggtaagaatatagtcatcttgttgtttgtttgttgtttataagtgttgttgaatgctcataagctgtttttttggaggacatagtttaaacagcattagtaattcagtttcagtttcatattaggtttatggatgaaagtttgattctcataatgaatcctaaaataggttcttataataaacattgcatgatgtttgctaatattatttccattagtaagagaggaaagttctttcctttttctaatctttacagtgtgttttcccttgttttgtttctcttacctgacaatgttgctagttgtaataagatcgtcgctcaatataagaatataagctgttgttatcgatttattactttgcaggttgggcactcaatcggtgcatacatgtgtattgaaatgtttaaaagaaatcaagagcaggtaatgattgcttgttcatttcatttagtgtgttcatgttgctgatcatatttttcttctagaaagtaacctcttcgacacctctttgagcattgtaggtgttatactgcatcggactgtatccatttttggctttagatctacaatcccagaaacagtctatcatcggcaagattgctgcgtatatcttttcttcttactttattctctcctatgaatatgtgttaaaaggaatctagtcaacttcatgtgcactgcagtaacttttttgtactttgctgtgactagttatcagtcttgtcatttgttcatatacaaacagctccattggatgatagaataatgacatattgagtgatttcggtgtaaaaatattttttcgtcctattacaaattgcacattgcttctgtggggtttcttctttagtttgacattccatattatagcatctaagcgattaacagcgtgaaagaacgtgtttcaggtcccccgttgtaagtgtggtcctcagttccattgtagcttcattaggattcttaccaagctgggctttaaggttaattgttagtaaatctgttgggaaatcatggtctagtactgcagttgaggttacttgctctcacttgacaaaggcaagaatattgaatcttct

SEQ ID NO: 19592 - DNA, 10324 bp, Cannabis sativa
  modified_base (4625)..(4631): a, c, t, g, unknown or other
  modified_base (6941)..(6941): a, c, t, g, unknown or other
  modified_base (9590)..(9599): a, c, t, g, unknown or other
atcattaatctcaaaagaacttcctcagttcaatttcttattttatcaatcttctaggagcatctggttttgataaaacaggttttgatgtccggggtcaatccccaacattatcccacaattgtttcaatattcaaggtcgatccctgacgtattccaggattccaggtagagtaatcctggttttagttctttgtcttcgactgctactggttaacgtcctgctttccacgcgacagcttgatatggcaaccacagtgggccgatatctactcatgtcgcaattcttttacacaattgctttaccagagtaattgtcttctgtactcttgcgactcgctccctctcgagataaccaaagtgtccattcttctcgcggaagagggttatgatctttagtcgctcgactgttaacgcagattttcgttaactaaatttgagtctcacgatgataatccaacacagaaataataaaagctatataaaaataaagtatgaacaccgggttttttacgtggttttgcagttgaaattctgcatagttcacgagtcaatcttattctgatttctgagtatttttttagggcctcccgtataagaattttttctgtcccccttctttgatcttgtttgccactatttataattgcatagtacaagttaattacaaagctgaccaaaatatatttacagtcattatctctaaaattgtgggatctgattacaaatcaagctaaataaatgaggtttttacacagctgtgaatatcccacttttattgggccaagatgaacgcgtaattaaagatatagggtaagccttatctcataggtatgcctcgccgagaagggagccaagattgatagcgagcagttacttgtcattttggcttctcgggaataaaattgtcttaactctgataactatactctctggtgtcgagaggatcttcctcgcatgcacaccatcttctagcgagataaacgcctcgccgtctattatcttggctcgtcatactatctatactcagtttgtatattgtataatatacgctaagtatttttagtgctgtcgctttctctttcacgcagcgaggttgaagcctcgtcgttaacgtgtgtacccacatggtttctcgtcaatacataagttaacagttcgtacatttctgtctcgcagaaggctatttagccagccgagttataaacataccctgcgaattatatttccaacgagttgttccatgctaagcatacttgtcgtttgcatgtttgagttcttcccagcttgacatgtgtcctcctctgatgtgcttaccgaacttcaggtataacaagtattatattcacttttatggatgtgtattctaggtttacttggctttatctcttaaagaataagtctgaagctctaaaaatgtttcaacttttcaaagctgaagctgagcttcagctaggaaccaaacttaaatccttgcaaacagattggggaggggagtatagatccttcacaccttttctgaaccaattaggagtgattcatagacacccttgcccaacaacacattggcaaaatggtttagctgaaagaaagcatagacacatagtggaaaatgttctaacactccttgctcatgcatccatgccactcgaattctgggctgaggcatttaggactgttgtctaccttcacaacaggttacctacacctgttcttgacaacaagtcccccattgaggttctattcaacctgaaaccatattatcttacacttaaaacctttggctgtagctgtttttccaatattagaccttacaataagcataaacttgagttcaagtctactccatgtacatttgttggctatagccttaatcataaaggctataagtgtcttgatgcatctgggagattttatatctcaagagatgttgtgtttgatgagaattctttccctcatgctcaatctgttgtcccatgcaccactatatcaacaactgacacatgtatcacctgtggtcacattcctggtccctcttttgaaccctacaggccacccaatgcagttactacaggacatgttttctcctcccaacctggtcctagtcatcttgtctctccacctggttttccaagccatcctcaacctgaacctcaaccagagcaagctattccagctgaaagtgacaccagtcagcaacaatctgaagagattgttgctgacattagcaccagtgagccatctctccatatcagtactcctgttgaggatgtcactcaatctacaatcactgtgcccattcctacagaggcaattcatgtctttcaacctactgctactagcagtgttcctgttaatcccattcctaagtattcactctatgaaaaccagatccaaatctggtatctccaagccaaaaacttacatggtgagtagagaaccacttacattgaaagaagccttgcaacaaaagcactggaacaatgctatgggtacagagattgttgccttgaaaagaaatggtatctacactcttgtaccattaccagctagatgaacacatgttgggtgcaaatgggtgtacataattaaagaaaaccctgatggttctattaacaagttcaaaagccaggttggttgccaaagggtttcaccaacaacctggttttgacttcacagagacttttagccctattgtgaagctagttactatcagagttgttctcacattggcccttgctcacaattgaacagtaaagcaactcgatgtggacaatgccttcctcaatggtgatttgcaagagggagtttacatgattcaaccacctgggtttgaagacaaatctacaccacatttagtttgcaggcttcacaaaactttatatgggctaaaacaggctcatagggcttggtttgagaaactgcaacagtccttactgtcacttggctttacttcatccaaggttgatcattcattgttcattcacctcacaaactcatctacaacacttattcttgtgtatgtagatgatatcataatcacatgcagcaaccaagcacaaatttctcacatcatcactgtcctcaatgaacaattctctcttaaagacctaggccaactgaattacttccttggaattgaagtttctcacacaccagagggtatgcatttatgtcaaactaaatatgctaaggatctactgtgcaaggccaagatgcagggtgctaaatccttttccacacctatgacaagtggtctcaagctctctgcttatggcagtgatttagttgaagaccctcagctttacagatctgtggttggtgccctccagtttctcactatcaccagaccaaaaatagcatacaatgttaacaaagtatgccagtttatgcacaatcccttgcaagttcactgggttgctgtcaagagaatcttaaggtatattggaggcactctggactatggtttgcatctcaccaggcctacaagttttgaactcactggattctgtaatgctgactgggcagcaaatccagacgataggagatccacttctggctttatgctttatttgggaggcaatctaattacctggcaatgcaagaaacaacacactgtttcacgctctagtactgaagccgagtacagaagccttgcaatcactgctgctgaaattgcttggcttcattctctgttttttagaattgcatattcaccttcctaagcctccagtggtctggtgtgataatctcagcactatcattctcacattaaatctagttttacatgccaggaccaaacacatcgaattggatctctattttgttcgagagaaggtgcaacaaaagcaacttgaagtcaaacgtgttcctgcattcgatcaagttgcagatggtttaaccaaagctatttcaagctctcgttttgctctttttcaaaacaaacttacaattaacagttgttcaaattgtaagtttgaaggggcatgttagagtgaattcggttggcttgagtttgttaagagtcagttaggagttagttggttttagtttgtccaactgtccttttctaactaatttcctaactgtttctgttaagcattgtctgattgtaatggtgtatataaaacatgttgtgtattattggccattaatgaattgcttcatcttctttcagcttctttctctttttgttttctgtttcaatatttctagcttctctgctcaatcatgtcaaggaaatccaatatatagtagtaataataagagttattggaattttttttttatttttaatttttaaatatatatacatatatgtggtcattaaaataaaacaataaaaactctaataatgaaatgtatcatatagtgtacctatggcgtagccgcatatataacttggtataaattcatgaaagtgaaaattacataaaatatgagattttataataaagttatcaaaaaatatgatacttataagtttagcaccattttatgatattttttcacatttagagtttttttttatggtatttaatatcgtttgttaacaatttttttaattagttttatgtttttgtaattaaaaaaaaaattctaaaaacatgttctataaaactgtnnnnnnntttcaattttttaattaagaataaaaaaatcactttcaaaattttttaaacaatttttttttcttaattaatattttagacttcgaccccaacctgaatcatgggaccagaacatcagcctcagcctcattcccggactccagccccaaacccggacctaaactcgacttaaataaaatcaaaaaataaaaatgaaaataaaagttattgaacacacttttattttctgtttttaaaataaaagataaaagtggttattgtacacatttttgttttttaaaaataaaaattttactttcacttttgtaatttaaaaaaatataaaagtattatcaagcgctcccttaatatccaaaactcatattttatgtttttgtttttagcccaacttttaaaggtaagctagtaattttaatacaagttcaaatcgatttttctaatgtttttcttttattttttatatatttttttttaaataaaaaaaaatagttatttttttctccaattctacatgtaatgagtactcttatttctcctacttataaggagctaggcccgcgcttagggcccactcattttagggacccaaataaaaaaaaacttttaaaaaatatacttatttttttttaataattttcacaaaaatactatttatctttctagtaagggcccaaaattttatttttgcccataactcatttcaactcaagaccggccctgcttatatgttataagaacaatcatttatttattctttgtctactttgtatttgctttttagagtttctatctttctatattttctttccactatattatttttggatcattcttctttttgttcttttttttatggaattttcaatttatatacttatatatttaatttgtttggttaacaatatcatatttgatagcataaagtttaatgtctgtaaaatttttatttttagccttttatgaaaagaagtaaaggtagcgtttagttgagaggaataaaaatataggaataggaatgagaattgaataaaatttaaaatgcataaaaaaattgataagaaaatcattaaaaaaaattttcttcttacattggaatgatcttttatttcttttttaaaatagaatagtcattccaccaaaatagtagaaagaacattccattgaaatgcctttccaatattttattatgcaaccaaataaaagaatgaaatgaaaattgttttcattccattccatttcattacctctaaccaaaagccacctaagtatgaggagtacttacttgttatcaatggatatctttttttgtcagaaggtgtaactctttaaaatatttttagcaatataaaatgggttaaatttaacttttgaaggagtatatattatagggtgaatagatcacttaaaaagaatataatgatccactctctacttatttcagcatctagaagaattttttagtcttttttttttatattcgtgtacgttataattatttaagatatcctacaaaattttgagaaattcggaataatttacaatatagaaaacaatgttcgaacaatctattttacgtgtataaaataaaatagtcatgcgtgcaacacactgtttgaacgtagtttttggtatgcaaactttattgaatttctttaaatttgataagatgtcttaaataaatataatttaaatgactatgagaaaaaatttgactgaaaaattagttcagatactaaaagataaagatatatctgtgtattccttctaaaagagtgcattataaaatttttggtttaaatgtagaggaggatcttaccgttgatctgagtgatctgagagatccaagggctgggaagatctggcggcaccaatcccagaacaaacacatttcccgtgcgacgagattcaccggattacctggaaccgccggtaaccaaccaaccatatacactactaccactactaacggcttagcgctcatttttctttcgtttctcttttgattcgccgttctgttggcagacaatcctagggtttccattcatctttacaagagtcgccaatcgtcaatcgccatcttcatctgtgagaaatcttctactttcttattattactgtttctctcccttttcgcacattccattcgattgtgatcttttttcgttgctctcgtattttctaattggaatcttgggttattttggcctccgaatatttcaagattttacgattttacacaactgggtttctgagtttgatctgcttcttgttcaatttgttacgtgctttagatatatatatatatatatntatatatatatataaatatttttcgggggtttcgtttcgtgtgctatttgatttgccaaagaattgaattctgaaccagaaacattagggttatttatttggtttgctttacatagacatagataaagacaatctattcctcttagattggatttggagtttgtaagtgagaatccacatagaagcgacatctttattaatttgacggtataacaagctgcttgatttggaaatcggttaagttctttaagaagtttataataaaggaagtaaactctttgatttggaagcaatatggctgcggatatggatttttcacatccatatacacttttagaaggtggctaccataaggacaatgcctcagccatggaagacgaagcttcggagaatctgagtggtataaaacaacagaacactaacgggaagcctccacgacatctagtgcggcatactatgagctctttaaggctgctggcaacagctgatttggtgagtttttgaattgccaatttagaagactgtatttgtaatataagctgctcctgctattgtttctgttcacgtggtattattttactagtcaatacttcatcatggtgatcatgaaacagttttcacacctgcccttgatggttgatacaatttccttggcattatagaaattacattttattttcttctttgcaatagaagtgatattgtgtcggctaggtggattgttatatctctatctgcacttgaaagttgaaacatagttgtaagttctgtagtaagttctttcatatatttgaaggaaggaagcaaagcatgaaactatatgtttggtgaaatagctttatattatttagggcctttaatttgttagcccttttgagcatttatgcatttatgtaggaagataaactgtatggattattttcaacatctatgtaatccaaatggttgcatttgtatttccatgtttatatgcacaccagactctgtgatgctataatgcactgaaaaatgataactccataactcatttttcttttcactcttctccagactttggatgttgggataattcccaataattcgccttctgatgagaaatccgggtttctgcccattttcagatctggaagttgtgctgaaagaggacctaaacagtacatggaggacgaacacttatgtatagacggtcttgttgaacatataggcaatacactgcagatcccatctcctggagccttttatggggtgaatctttctttcctatcccatcacctgtactgtacataagcatcaccatagacagatgaaaattttactggaattgagaaatttgtgacagatgaattatgatgaaaaatacttgttaatttttttgacttacctttatagctaagctactctaatttgtggattacatatttgggcattgcaggtatttgatggtcatggaggtgtggatgcagcatccttcgttcgaactaacatccttagattcatagtggaggactcccatttcccaacatgtttggagaaagcaattaagggtgcctttctgaaagctgattatgcttttgcggatgccagctctcttgatatctcctctggaaccactgcattgactgcccttattttcggaacgtaagttagctagccccaaagccatttattgcgtaagcttgacacgacactcttgaaaacatttcaatagcttacatgtgtattttcttctttgcaggaccatgatcattgctaatgctggggactgtagagcagtgttggggaggcgaggtagagcaattgagatgtcaaacgatcacaaacccaattgcacatctgaaaaactgcgaatagagaaacttggaggggtcatttatgatggctatctcaatggccaattatcagtggctcgtgcgctcggtgattggcatatgaaaggcccgaaaggttctgcctgtcctctgagtgcggaacccgaattgaaggagacccatttgaccgaggaggacgaatttttaataatggggtgcgacggactatgggatgtaatgagcagccaatgcgctgttactatagcgcggaaggaattgatgctccacaacgatcctgaaaggtgctctagggagctggttagggaggcactcaagcgtaacacttgcgataatttgactgtcattgtgatttgtttttcgcccgaccctccccctcggatagagatacctcaaactcgagtgaggaggagtatatctttggaaggtctaaatttactgaagggcgtattggattgtaattcgtgtgacttggatgagcaaagcaatgcaagagggaactgtttaaaacccggcatgtacagataacaacacaagggttcaaattggttaaggggggtattctttttttcttcttcttatgcccactgcttctgtttcgtgtcatgattgattcagggaaataagatctattctttctttattgtatatggtgtacatcggagagagagaaagatttgatatatcaactggcagtttagaaccgggcattgtttgatttttgtgttagtctatttcactattctttctacactacgagatcatgaacactgagatttgccttctttttccaactaaggttttgttattattattattattnnnnnnnnnnttattattattattattattcgataatctctattggagatacaatttgtgatctatttttaaaatatagcttattttgtaaaagttgctctaaaaataaacattcatatcatcacaaggaaaaataaacattaatattttttacttatttcaaaaatactatctttctaattttttatttacaaaattacagtagaaataaagcccaaatgcggataagaaagtgagctatacatgtggatatgcgagcaagtgagacccacacgcaaagtgggggtaaaggcatcaaagttgattgacacacgtaggattacaacatcaaaactcatcagtggccccacgtggcaagtttggacgtagtgggctttgtcctgttaggctttttttttgcaacgcaataataacacaaaaacaactaaataacaacaaaaataacgggataataacctaactttcaaaatacaaattaattcggcatcaacatattaagtgaacagaaaagaaaaaaaacaacttacaaataggacaacaacaacctaaaaagaaattaaaaaaacattaaaaataataataataattaaatgttttagaataaataagctgaaaccataactttgctggaataaataaacaaattttggtggaataaaattatgaaaccatgatttaaaatcattagagaataatttcatattaatatatagattaaatatatattaaaatatt

SEQ ID NO: 19593 - DNA, 3116 bp, Cannabis sativa
ccgcttacaacataaaactttgggtacttatgccactatttaccatttattcttcaaagtgctgtttggtggtggggtcgtaccaaacctagaggcccttattattatattattatttttgtttatttatttatttatatttgttttttcagcaaaagggcgctcaatttttttttttggaacaaagggcgctcaaaattttgatagaacgaaaataattgagactcccgctcattttaaaagttcaaacccttttgtttattattattttatatatttatataaattcctcttttatattttactttaataagtgaagagactcccttcaatatctattcgctccgtctgcttttctttctcactctagggctctctctcgctcttcgctctcctcactcctcacttggctttgtcccaaaatatggggaaatccagatctggaaagcgcaaggccaaggaggtcgaagagcctgagctgtctgattcctctgatatggctgagatggacagccagcccatcgctttggtagtcaacgaacccaagaagacgaagcggaacgatgctgattccgatgcttcctttctcggaaagcctattccccaaagcgaagccgccgaaagatggcccaaacgttacttgtcaaaggtcacttctttgttcatacgaatcagattgcttattgttatattctccaaacgtatttcatttctcttaataaaaatgttgtgtttgtcaaatgcaggttaaggccaagaagggagagctatctggggaaaagaaagagtgagaactcgctttcttttggttaaagcttctagtttgcttggcgacattgctgtttttgtgtgtttgtcaagctcttacttatcttatttactgatccttgactgactgactgacgatgtattttggggtttgtaggagtggaacggaagaggaggtcacacaagccaaatttcattatactcaagctttggtagatggggttgtctatgatcttaatgatgacgcctatgtcaaggttggctcttattttgctttcttgttcctgttcaatctttttcactctatttatttcttaaaacaagactgattagctaaattttgttttctttaggctgaagatgataagcctgattacattgccagaattattgagttttttgaagctgttgatggtgagctctatttcactgctcagtggttctatagagcagaagacacggtaataaaattatataaaccgttatttcaaattgaaacatgaatttctttccccctgttgatttaaacatatttgaactcttataggccatcaaggatcttagggaccactcacacattcttgataaaagaagggttttcatgtcggagatcaaggatgacaaccccttggattgcattgtttctaaagtgaaaattgccaaagtatctcccaatgtatgtggatctaaaaatatatctatgttaatattctacatgtttttttttctaattattttctgtgtagtgtttgcatgccgttatatttttaacccttttgtttttcttagatggatttggtagcaaaggagaaaaacttacccccttgcgatctttattatgatatgaagtacacagtagctaatctaacattttcaaccattgatcctggtaagtctttcgtttttcttttgttaaagtaatttttttttttcttgcttatactatttccaatggatattgtaaaatttgggattagctccaatgtttttcaattgtgctccaatataaatggtgcaacttaaaaagtcaacaaatgtatttagtatttaaaaatgattaaataagaacaacaaaacatatgaaaatttaattttggtagtgaagtaaaaatgcaggaaaaaaagtagagaataagaaaaaatcacatgtttggtatggaaagaaaaaaaaaaattcctgaaaatttgatatatatatttaattttctaaaattttcatgtcaaaattcaatttccaaacattatctaatggtaaaagaattacattatgtttggtagaagggagagaagaattgaaggagagaagtggacggataaggataaaatgattgtttaaatcttttgtttggtaagagggagagaataagagggggggtgggagaaggaaggagaccctccctccaaatacacaaattttaatccttttaaaagctgaagaatccaagaaaaaggtttaaaaattgtgtttttttctttttggaaaaaacatataattatattaaaaataataagatgatgattttaatgtttattttacttttacgtttaatactaaataataggaaagtaatttccatcctccctatctctttttttaaattttccatcatttctaccaaacatagacttaacaaaaaattggtgtttgcaaatttaatttccattatattttgtgttaaatttattttagtatgtgccaaatttaacacatattttggatcactatcggataaatcattttgtcaaacttagctaaaaaaagtaatttaccagttttacatcgctctatagaagatgcagttttgtctttttttttttgatttagcaacttctaacgatatttacttgcttctgatgaccagtctctaaaccagatagtgacacgtcgtccacaatatcaagtgaaagtgggtcaaacaatctgggagatgatgagagaaatcaaacttccaagaagtctgagatgactctcttagacctgtactctggatgcggtgcaatgtctacaggtttatgcatgggtgcttctttaactggagtgaaacttgtaactgtatgttactttattccattactatttgcattttatgttcctatactttgaagtatcttttcgtttttcttactgtgtttcattttccatattataaagagatgggctgtggacttcaatgctgatgcgtgccaaagtctcaagttgaatcatcctgaaactgaggtgaagattttttttttctttctatttaagcatttatatattagggttaatagtggcataagtactcaaaattttaagtttgtaagtgtcataatctcaatgtttatttttaacggcataagtacccaat

SEQ ID NO: 19594 - DNA, 4761 bp, Cannabis sativa
  modified_base (87)..(106): a, c, t, g, unknown or other
aatccaaccatagccattgctggcttgtaaccatcaaacccttccattgctaaaattcactgaaagaaattagagagagagagagannnnnnnnnnnnnnnnnnnngagtgagagagagagagagaggtattagtttctcaaatattaattgtagtgtaaatatgtgaagccatgggctgcattacatatatttaatatgcagatttacacgtgtaacatgatgttaaaaattaggaggatatatattcatgaaattgagataaagatgataaaataatttggcatgatgatgaaattatttatttgtgtagtggtagctgatgatgtgggaagattagcattgacatagtacactacaactgaccaaaatgatagtctatcattgatgccacatggcctcacatgtttccctcatatatatattgatatgtgctaacaagaatatttgtaaaattcacacttcatatggctaatgaaaattttactttttaatatattaaatgtaatataattataaactataatagtagaaaagttctcacaaaattaaataaatttaataagagtaactataatataagaatgaatgtttttttatcataaataagtcacacaaaataaaaagtatgagtctgtctacaattaagtatcagatcttatttaatttaatatattaattgatttcaggcactactaatactaatagtcactataaaaagatttacgtttagtcacaataaaacttagaatttaaagtaaatatttttgatcaattataaatcataattcttatattgtgactaaaagatctgtgactaaaactattagttataaaaattaaaatttgttgtgattaaatgtgtacacaatgtatctaaatattatgtagtcacaaataattttttattgtaactaaaaattatatttaattacaaaaaaaatatgttataattaaaaaattctcactaaaaaaaatattattcttttagtgagcaatgctaataattacactcgaatattctataaagtatagtttgcatcctacataaaatgtcatttaattttgcaatgagttacaacatgaattatattgctgtaagattataattattaattatattttacatgttacttttattataaaccaaactatacatatgtacgtgttttttctttaatttaaaaccaatatatatgtaattaagtactttaaagcactatagataaatgaaacttggggaccaaatccaaaaaccatacaaatattttaatatatatcagatgcaaagatagagatcgatgagtagctaggtgaaaatgacaatggaccacatctctactactaaataaactatatattataatttaatcaatatatcatgtttttcaaacgatgtaaatatatatttattaaaaaaaaagaaaaaaaaaagagaaagagaaaataataaagtaaaaagcatatgcggcgtcacgagacatgatttgtttagggtttccattccaacgtggatttgattcaatgaatggttagaacattattgattttattagagattttggttttattatcatcaatgtgtgatgtctcttttataaagatgtgtctcatttctttgtcccctttctaattttaattttatttttttggctttttcctttggttgagctggcaaaaggttaaaaattgtggaggccttatcggtaaaatgatgatgacagtattattaggtcaagtatattaaaaaaatgagatcgacgattagaattttttaacatattggaatatggaacaaactaataatattcctcctcagatttatacattgagaaccaaaaattgaattaggaacaatttgagaagaaacttaaaatagatgtaacacaaagaaataatgaggttcaaacataagtatcacctgctcactcctctcccagaacacagcttccagtgatttcaatctttattgagctatatatatatatatagagagagagaattgattacaagatattcatctcacttgtgacactatgaagtaaacacaccataggccaatacaacactcttttttctctcttcttttctatgaactagctctctaacacctcttaaggtgtctctgaataagtcgtcccaaaataattgcagggaatggcaatatatagcctttggtattgggacttgatactaaccgttataactgacagttggttaaaacaattgaaaaatattagtgccaaatgcttcctcacttaaagaccaatcacaacaattatctaccgtagtcattaattaagagaggaataagctattgagatctaaggctgaactggtcttaaatcctcatctagcacttgaggatgtttagtaagtttaggcaaaacctaaacttaattagctaaactcacatattttgtcatcatgtctacagggttctccttagttctaattttcttcacattcacctttttcagctatgatgtctcttatgaaatgcaatttaatatctatatgcttggacctctcatggaacatgggattcctcatcaaatgtagagcactttggttgtcacgatacgcttttatattttctaatttgaaccccaactcttttgtgaaacctttgagccaaacaacttctttcatggcctcgattgtagccatgtattctgcctcaattgatgacagagcaactaccttttgtaggtttgatttccagctaacacatccacctaaatctgtaaatgcatatcctgtgacggatctccttgtgtctatgtttccagcatagtcagaatccacatatccattcacttcaacctcattcttagatttgttgtcatagacaagtcccacatctatagagccttgtagatacctaagtatccatttcattacagaccaatatgcttttttcctagatctgctatgaatttgctaaccatactcagagcataagccagatcaggccttgtgcacaccatgtagtacatgaggctgccaacataagatgcataaggcactgtatccatgtacatcttgtctttttctattttgggagattgttcttaagtaagtttgaaatgttgtgccaagggtgtgcttactagtttcgcttcactcatgaaaaatttgtcaatcattttcgatatgtagctcctttgtgagagagatattctgtttggtctttccctcatcatgtcaatgccaagtatcctcattgcttcacctaaatctttcatttcaaattctccatataagctctgtttcagtttatctatggcttttcttttccttccaataccgagaatatcatcaacatataacagtaagaaaattagttcacagttataatacacacaagggtcatagtcactcctgttatacccaatgctaaccatgaattcgtgaaatttcatatttcactgccttggtgcttgctttagcccatagagagatttctataatagacaaaattgattaggtttgctgcttttgtaaccatctggttcttccatgtagatttgttcttcaagtctaccatacaagaatattgtctttacatccatttgatccatttcaaggtcatattttgctaccatggtcatcatgattcttatggaggtttatctaactactggagagaaaatatcattaaagtcaatacctttcctttggttaaaacgtttggccattaatctggtcttgtatctaatttagtatttttattttgagaaatacaattttattaagactttattatgtcggtgttgttaagaaatgattgaattgacataaatagattttcattgattaaccaagtgaaagatacaacttatataagtacaatgataaagctaaaattgtaatgactaaactaccctcataaccgattctaactactaatagaaataactgacaacatatactcttaacatcccccctcaaacttagggtggagagagaatgcttcaccacaagtgtcttgggtagaaccttatccctgacaaagtattagtcaagctcgatgtgctttgttcgagcatgcaaaattgggttaggaaacatcagcactctgctgaggttatcacactagatggttggagttcgaggatctggacttttaactcaccaatgagggcatgtatccaagtgatttcaaccgtcgggctggctaggcttcgatactctgcctcggtgctagatcgagactttatgtgctgctttttggaggaccaacagattagatttgaaccaaggtaaacatagaaacatgtggtggattacctttcatcaacatctgatgcctaatctgcatcacagaagcctaccaagtccagagaaggtgagtgagacatgtcaaggccatagtcaagagtacctttcagatatcctagtattcttttaacaattttttagtgtgatttgagaggtgagtgcataaattggcagactttgttgactgcatataagatttctggtctggttagtgttgcatactgcagagcaccaaccaggctttgataaagttgaggatctttaactggatcactcccaaagctagacagtttctcccttccaatcatgagagtaggtaggctattggaaaattgtagttttgccttgcatatcacatctatgatttatttggtttaagagagatggagaccatgttctgttggtgtcacttggatgcctgggaagtagttatgtcgccaagatctttcagtgcaaatagattgttcaactgagtgat

SEQ ID NO: 19595 - DNA, 4417 bp, Cannabis sativa
atcccaagtggcaagcccatgggctgaaataaaaattgagcccatgtctcattatttgagtaacatttggaatcaaaataatggtaaaaggcaattaggcctgatcatatgagctacaactggagcaaactgaaataaattgggcgatttgtggtagagaagaatggcatgtgtgctcattaaatggcacatgttccttcatgtaaatgggttgtaccagatcctattggaccagccattgaaatagcttaggcaggccaggcttggataatgaattgggccttgtttgatggggcttcaaggagcttgtatcacctacttgtactcttcagcagcgccatctcatacgcaacaggcttgaagtctgacgatggaggcacctgcatcacccaaatcgaaaccagtgatagattcctcgacgacgaagtctctattggaaccgttttctcaagtaacattagattcctcgatgacaacgtctccagtggaaccgttttctcaggtaacatctctcattcttctccaccgagagttgcgttcttcttgttcatatacttagacggatgatgaagcaccaaacaacatcattttacccgtcgagagctccgattgtatagaacctttgtcgtcttccacatcaatcagccgactgtgttggaacaggctccaagaacgaaggatcgaatcgccaattgcaaggtgatttaagaagatcgaaagaaaatggcaagtccttctgaacttcttattagtcgacgcggatccactgatcgctcgatccgagccaaccaatcagccatgtctctatcaagatttgagtgtttgaacaaccaatgtgaataccacgaatgaggcagagtatcctcattttcctgagaaacacctaattcaatagcgcctgcaactcttccaccccagtcttctcttgattcaatttcactttcatttaaccaagtgctacctccttggcaatgtaatcgacttgagccgccattcttgtcctcggtaacctccatacccactggaagactagctctaataccaattgatgtgaattaacctctcagctctaataccaattgatgtgaaccaacatctgagcagtagaatttagtagaggacaataacaaaatagcagtacaaaacagtaggatattaggcaatggcagccaatggatattgcaataaaatgaaagggtctgggcatttcaagaagcctaggatcaccccatgatgcaaatagagaaatactcaattctttgcataccaccaaccccttactcacctctataaatactatccaaatctcacttaagactactctcaatacaatgagttatcccttttattttcaatatatactctgccacaccctactaatatgggatctaactttatctctctcccagcacctattattacaagttgaaaagcaataattacattctctctcatttgagttacccatgactttcactacccaagacacatgatacatgttactcaataagctctaaattcttcttcctcttagaataaatacatttgagtagaagcccatcgtgtacacgatatgtgctacttatactagattaataaacaatgtcatcacatagttacataagtatttatgaaatcagttttaaaaaaaaaaaattctcaccccagtagtgtgaacatgaaagctagtgactccttcattgaagccttttccaacacttccaacttcgataatctaaatgaaaaataaataaataaataaataaaccaatagatttgtaatcatgtgtggctagaaaagggaaagacgcaaattatttacatgaaaatccaacattgaatttacaatgacaatacaaattaaaaatatatatattttagaatatacattaactgtatattagtggtagaaattatttcaattacttagtttgctatttttcttttgtttcttattaagtttctctaattttgtatatgaatacttgttattctattgaataatatgcaatttcattcaccactttctacatgctatcacagcaaaatttgaaatttgaaattaggattgatcccaaaattgagatttgcaattagggtttgttcttcatatttctcgaataacacatttagagagcatgtgagctctcaccgtcggcaccaacgaaccgcgcagctaccgatctgtagaaccctagagtttggtggctgaaaccgtcgcgagtgagccacacgcatcaaccaatacaacttctcttttttcgtattaaaattgagtattgaggcataaagaagtgttctaagaaattcaaaatggcaaactaattacttactgtaaacatcgataaaatttaattttacgtaactagtgatctaacccaaaatgcaacaagcacaagttaagagaagaaattgtaagtaatgtctcatatgacaagatttattggacgtatcgatttgtgtatagacctaggaaagactttaacctcagacattataagaacaaatcacattcttgaccatttgagctacctttcttgagtagtcataagtaaataacaccataacagtgaagaaatcaacaacaagtagcatacgacttatattatcgcaaacagatcttataccatttcaaacaatgaggtattgaggcctttaacagcatcagactgtagatcaagttcgtgcaaaaatcttcggctgccaaggtaaccccaagcttctccagtgaaaacaagaaagacaagctgcattaaaatttaagcctttttgatcaataaactaattttgaataaataaaatagcacaagcagcaagtaactcacacaaagattgttgagcatttactatattaacatctgtctttttttcttttttaaattttctttttttttcactaggtaaacacacttattattattattattactattattattattatttatgacttatagaaagtaataaacaagacagtccctagacaaaacagcaacgtattttacttactactaacaaagccatccagaactttaatatatccacagattatttaaatttttctgtacaccttcaaaaattctccgctctctctaaccataatgactgagtgctagacaagcataattccccagcttcatgatagagcagggaattagtagagaattagctaaaaagggggctttgttatactgtggctggggtctaggctacaccttaatgaatagaataaatagagggaggatttcattcgtcagtgtgaatttggtaagaaaagaaagggatgtaaaccttagtgggagagaccagggctctcgaactccctggattatcaatatcaatgcatattttctttatttgttcttttatcttgctgttcatagccaattggtaggaaaattcctatcacttcattcctctactgtttttcccaggacaaaattccacttgagaaagatcaattccaagctaagaacacacccactgaaaagtaaagtcagccagcaacaaaacggaggttctcagctttaattaaaaccttttccattttaacaaactgaccaatgtaagaatctctgttcaattcctaacacattatcaaggaacccttccagtatgctacatgcaaagaagattcctacatctgaataaagcaaatgacaaaacaaaagtgcggcatatccgttgctgcttgctaatttaacttctcttgtacaatattttaatgaagtgaatagttttttgtctctaaaccaaccagaataactaaataatggataggtatgggcagattacatcaaagagaatccccgcatgcaatgcctataaaacatatagttagtgaggaaattttccttttaatacgaggaaggattgtaataaagagagacaccacttgcatgtctaaagaagtagtgaaaatccatacaatattaaaatcaagacaagcaatacaaacacaatgaataagacaacacacaatcacttgaataaagtaatgtcttcaaaaataggattgacgaaattgggattactgcaaagaaaatgcttttttttttttttgccaaattaggagatgacaaatccacaatcactacaacatataagaaccttttttcgtaagaaactcttataggcatagtatgcacctgtttatcaaagccatcgatagcctccaaatgtgataatgcatcaaccgctgccaatagtgcaatcagcccctaaaatcatccataaaaatgtttatccaaggtttcctaaacatcgaaaaattaaggtggcgtttggttggagttaatgaaatggaatgaaatggaaacaacttttattccatttatttgtttggtgacatttaaaagtattggaattgaattccaatggaatgatttttctaccatttcggtgaaatgactattcc

SEQ ID NO: 19596 - DNA, 4376 bp, Cannabis sativa
gagctgagaaaggattgttatccagatgtgtttacatacaccatattgattgaggcaacttgtaaagagagtggggttgaacaggcaatgaagctgttagatgagatgaggattagaggttgcaaacccgacgtggtaacttacaatgttcttattaatgggatgtgcaaggaagggaaattgggtgaggcaatcaaattcttaaatagcatggcatcagattatggctgccaaccaaatgtaattactcataatattattctgcgtagcatgtgtagcacagggaggtggatggatgccgaaaatctgttagttgagatggttagaaaaggttgttctcctagtgttgttactttcaatatcttgattaatttcttgtgcaggaaaggtttactaggtcgagcaattgacatcttggagaagatgcctaagcatggttgtacacctaattccttgagctacaacccattgcttcatgggttttgcaaagagaagaagatggatagggcaattgagtacttggacataatggtgggcagggggtgttaccctgatattgttacctataacactttgctcacagcattatgcaaagatgggaatgttgatgttgctgtggagatacttaatcaactgagtagcaagggatgctcacctgttctgatcacctacaatactgtaattgatgggctgtccaaagtggggaaaacggatcgtgctattgaactattggatgagatgcagaggaaaggtctcaagcctgatatcattacatactcttcacttgttggagggcttatcagggaagggaaagttgacgaagctataaagcttttccatgagttacaaggacttggaataaagcctaatgcaatcaccttcaactctatcatgttgggactttgtaagactaggcaaaccagtcgtgccatcgattttctggatcatatggtatccaaaggatgtaaacccactgaagtgacatataccattctcattgaaggtctagcttatgaaggatttgcaactgaggctttggagttgttaagtgagttatgcactagaggtgttgtgaagaaaagttctgcagatcaagtggcaataaggatgtagttcattctcatctctttattctcaccaaaactaaacaagagtacaataatatgtgttggttacagtcttttagttttatttatgagagtgggaaatcaattttgttagtgatgtagctctagtgagataactccttgtacttttttcattattatggcaagtatagaagtgaaacttttagtttttagtcaatcttttttagcttctaagatttccgctaactatttagatgattgtcttaggtggtttcctttatcatctaccatggtcagttatgtaattgttaagtctttaatcaaaactgtttgtgtcataatataaaaaaaatctttaaaaggaaagataatgttgtttttggtatctatggccccatttttggatggagttttgggaccttgtcctatgtgtaaggaggagtgtgaaacatctttccacctcttctagaagtgcaacattgctaaggccatttggttcagccttggatggggcatccgcactgaactagttaccatcacttgttggaaggattggcttgattggttctacaaaggtccgaatctccctccgaacgtggaatttttcgatttcatggctacaactttatgtattgtggaagctatttggcgagaaagaaaccaacgagtgcatggtaaaaaggacactgagttagtgctaatcattgactcggttcgccagaagatccatgaccatgtcatggttgcctcgaatagagttgaggaggtcctagaatggactccgcctccatcctcctgggcctgctgtaactctgatgtagcaatttctgctacaggctgcttgttatctgcagtcattcgagatgattcgggtacaattctttcgatcacagttaagaaaggtatggcaactttgccaaagctagctgaagctcatgcagtgtgccagaagtgtgcctggcagcagaaaaagctattgaattgggtctaaaaaacatcatttttcaaagtgacaatctttgtgtcgtgaaagccttcgaagctcctatgtccatttgtgtggatttcagtctgcaggaagccaaatcaaggtttcttcactgttgtgacaagctgaatgattggggcattgtccatatctcgcgcaagtgcatctatatggctcataatattgcaaagtgggctactaattcgagcgtagttgggtgcataaatcctgaggccgtggacggatcagtgctagatgacctcacggaatgggatcctggtgatagatgaggaataggtgttcttttgttattgagtcgttggtctgttatttttaattcgtctctttgtttgttgttctttctttggctgtttttctggtgtttgttttgctgtctgttttttgttgttgttcttgtttgtgctgtacgcacacttcctaatcaaaaaaaaaaaaatttgttgtttttggtatcaagaaagagctcatttacaagtttttgttttgagggacttcatttattttttaaaagtgtttacaaacttatgtgttcaactctttgttgaagaatgaattatatcgatatttttagattatggcaaattgaaaacatcaaacgtatagtatacattcctaacaccatttttaatagtcaaaattttccaaatattgttaaaacactttttatttatatagaatctatctatatatatttgtagatggtggaatattaattaacttccatttggctgttcagagaactgttgagagtgcaagtttgtagcgctgataattcgtgttattgcgttgtatttgtgttgatacgtgaacacgaaacgattacttaacgggtcacacgacacgagacgacacgataacatatttaataaacgtgtcatgacacaaatttgaaaaatgacacgtttaacacacgattaaatatgttataacataataagaatttgacacagttaacacaattatgtatatcaatacacataactcataaaattcataattttaatttattattatttttttgataaagaaaataagaagaaaagtatttttatgagattttttaagagttttttatttttacataatataattttttatttttaaaatacttatatatgcttatacgtgttataatcgtgtcattttcagtgtgttgacacgaaaataatatgtttaataaacgtgttaaacatgtagacccaattttgacacagattttaaatgtgtcactcaaacccatttatttcgtattgttttcgagtcgtgtcatcacgttgtattacaaaattgccagcccaaagtattggaggggagtggagactagatatgcttcgaagatgatgatctgtagcataatatttagaagtagggtaatgcaactggtgacaaatattattaattttattagttatgatatatttaaacaaaagtaatgattcattcgttaaagtttaaattaacaaacctgaaaagaagaatatctcaaatcattattattgattccataacattcacccaacgaaactataaaattcttgaatttgaccattatcaaagtgactttggttctcgaaaaattaaccaacttcctgtgttaaacaagtactccataacattaaagggataatcttcatatttgagtggtacgtaatgttgagtcattggtggaagcagagacgacgataatgacattaatggtggaagagatttgtaacaccctactagtttaggcttgttatcgtgattttaacttaattgtgtaacttgttgctaatcaacgaatttattaaaaaaacataattaattaaaactttatttaattacttatgaataccaaaataaatacatatttatatataactgggatcccgtttacaaaacatttacaactgaaacatagtatgtaatacaaaagttgtcacttagcgactagacaaaatacaactagttgtcccaaggaccgtacgctccaggcctaaccgtcccgacacgtacaattttcatcccctcgttctcatgactgctcaaccttagtcttgcctttacctacacaagcaaacaatatctgtgagtcgactgactcagtaagaaaagcataaataataacataactatagctcgaattataatcaagcacctatacacccaaccataaccctatcctcatgtccaacacgatactgcgtctagaacgttcgtacgacaataatattgaccataatatcagcctatactcggtatgctagtcataatctagtcataccgatgtgatagcgtca

SEQ ID NO: 19597 - DNA, 5800 bp, Cannabis sativa
tttctcgaaataaatgtcttaaattacttgattatttttttgcggacagatagagatgtattagacataaataaattcacaacagcctaaaattatttaaaacatgtatttaattgcaactttattaaagttgatactacctgctccttaaactaacgagggatgaagtcgaattcagtgaatttgttttggggataaagttcaattattgtttatgttttgtgcatcaataataagtgtatagtagaaatatagaaattaaaaaaagtaaaaattatagcataagtgtactagtaagaatttatatatataaaaaaaagattgaaaaattatacattgagggaaaaaatatttttttaataaaaaaatcaacttttttccaatcttttcatcgtttgacaatgacaagtagagtacaaaagaaaatattgaaaaataaagttttggtagtatttctcaattaaatatggcaactgctccccttgcatccattgagtttgttaatagttaaattaattactaacattcaattaaataaataaaactgtgatcatcagtaattgtgtattattgaaaattggacatcatttgaataaataaagttttaaaaccaattaattgtaatataataagttacaaaaaattaaaacgtgcgcaagtgcgattttaaacaatctcgaaagctacatgtaaactcatgttttattttccttttaattggactatcaataatgtattttgagaatttctatctcattaaggatgacattatcacaacaagatctctcatgagagcaagcttaatacctctcaaaaaagctcttgtagtattcgaatccttaacccaaataaaaaagatatggacaaaagcattgttaccactacttgaccacacaacatgtggtattgaaacacaactgtggaacttgtgttaattggttgggactataaaatattattttgttatatatatactccatggctaaagcaaccatacagattttagtactgatacactattttttatgttttcaatagtttataattttaacttatatataacatatctaacaaaattttaaaatatttaaaataattttaatattttgaaaacaatcttcaatcaatctattacactaaaaagcacaaattgaacatggttaacccaaatatttactctggaaatttgtggtttttaaatatccttttccatgatctaattccctttttctctttcaatcttctcaatgccttccattaattattcttgccatatttgtctattttggtttcttttgctctttcatgaaaaatattttgaatgatattttaaacaaatcatggcaagaaatcagattatcatagtgattaatccaccattaggcagactgaagctttacaccaatatcacatttgatggaatgaaatgcaagactgattttagtgtaatacgaaaactctaatggagatgtggtgtggctaacatgtcaaaatttttcattggcggtttcaaaccatttcatgtacatttcattaacttttagtggttaattaatagattgcaatcttcacaaattgtggtttttaagtttcattgcattttgtttgatattagtctgtctagtgtccaatttgcaaagagtgcagattaatttcatgtctatgctcttttggtggatataaattgtatttagttggagaatacttccttaatttgtcttattaactatttgttgtattatctctcgtttaaataatagttctataaaaaaataatattgtattgcactcgtacttttttttattatatacgcactgtttgaaacttacttttgttattgtaaattattctaaatttctcaaaatattgtaaggtgtatttctcgagttatcataagcaacataaactcaataattttttttagcagcataatccaatgctaataaaagtgtaactgtcttctattttcttcagtacagattttgttagtgttttaaacaggacacatataaaatgtatatttatttaaattatttatatctggatggaaattagagtttgtaatatttgtgaaattggataaaaattacaattttacaaatattaagtacttatgctgtaaaattaattttttattaaagatatgctaattacaaaattttgggtacttatagctattcagatattgaaaacttaaaagaagtgtatagatttgatacatcttttgaggtgcaacctagaatccctataatatattattgattagtaaataataattagtttttgaataaagtaattgaacaacttgctatacgtaaaacgagttaataattacgaccattaggtgagatggttatttttgggtacagccgcctaatcaggttttatttttttaggttataatatataggaaatttgattcatgcaagttaaatgggtttaaattaaactttaattcatatgaagaaaaaaaaatgataatgtttattatgtggacaagttaggatttggtataatgttttgttgagtttttaaatagctctaataatgtttgctttatctaataaatctactacatgcatatatattgaaggtaaagatgatacatcaatatatatatatatagaattctatatatataaaatgtatagactattcatttaaatgccattgccagtactttctaattctatgactcgtcatttttattttacctatattgatacatatatataaatacatctttttgttaatagtacccacgagtgttcgtcagtaaattattgatgattattattcacaaaactattaagtacttgatacatattacatatgtacatataaagccatgcacatgcacgaaatctatacatgggacctatatattgagttgctcaaattaaacctgcctttctaattaattaataaatgaaataaattcaatatataaaaaataaattgtaaggacaggataataataattaataataatatataaggtacatacaataattaattaactagtagtacttcttgctaataatactaattactaatagttatgataatataattaataacacaaataattatcatatatatatataaataccacgtccactactccacttattatgctgttttaattactcgatcatcatagctgccttaattcatgatttcaatatcacactctatatatatatatatattattacatttttttcttttgaaacccatcatcatgttttcttgatttgtttgtagaaaatcattaccaataaaaaagactcattaccattaaaagacaaaacttaaaacgaaataaaaattgtaatcatattagctaattataaggagaaggagaaggttgaaccagatcaatataattaattaatttgcttgtaaactactgtttgtgtggtgtacaatatcttttttatgagagggtttaaagcttgctctgacaaatctcatacatccttaattaatgagataaagaattctcatacgtaaaaaaaaatctaattgagtttttttatataaatttttttataaatatagtggcaaaaaatttaaatataattagatatttattgttagtaaaatattaaatatagtattttaaaaaataaattaactattttttttagaaaatagttatattattaattaattaataataataataataaatataaaatatgacttttttgctaattttttttttttttttttgagtctagagcttggccccttgtgcccttgagtcggtcttaaaagaataggtataaaactcctataactgacatatgatctcaaaattatctatgcttgcggaaaaaatgtgtaccatgtgatttcatattttgttaataattaaaaaaaaacagatataatttgtttgtaggcctaactagctagaaaatattatcataccccaccaaaaaaaataaaaaaactcataattatatgtcataataaatgaatgctatctacccaaaacacacactacccttacattaatttatttcaccaaaaaaaaaaaaagaagaagagctagctagcttgaacttgagccgattaattaagaggatgaataatattagccgatatatggagccatatatatatatatatatacatatatacaaattagaaagataaaaataccgttgaagcgtttagattcaactgcttaaaagttagttgagtctctcacattccactcagaatatctaacagtcaacccctaccagccctttaaaacccaaaatcactcttctctctctttctttctttcttccatattattcataatgacaaagaaatacaaaccctttgagatgagtgttcattttgtttttatactctttaaacaaccaaaccccatttccccatctttctctctctctttctctatctcttcagttcatatatattcatataaataaaaacaaacccaaacacatatataactctctctcgtgaccttaaaacataatatattataccaaacacacccttgccatgggcgtggacatgtcgaataataatcccaattcacgaaccaaagactactttgcttctcctgctctttctctcagccttgtaatatataattttaattaacttcatctctcatatatatatatatacatcctcattttcatacatatatatttatgttttttttttttgttgtgaattattaggctgggatttttcgtgatgcgggagcggcggcggctgcggcggccaacatagaggtagaagaaggagaggaaggcagcggcggtggcggcggaaggaaagaggacacggtggagataagtagtgagacttcaggtgcagctaggtcaagatcagatgatgagtttgatggtgaaggtgatgaagacgatggagatggagacaagactaagaaaaagaagagaaagaagtatcataggcacactgctgagcaaattagagaaatggaagcgtatgtattttcttttctattcttttcattttttattatcattattattatagaaaatataataattaagaagattaattatttaaaatattagcaattgggtatttagtaatattataggtgggggcagctttaatattgggtaacttttcgaatttcataaggtgcattgttttaggtggatatgattttttggaatcacatgaattattattattattattattttcttaatatggtcggtgttaaaattgctttattacaatttacaaaagcaaaaccttttggaaaaaaaattgtacggtatatatatacacacacatactctacagtatatatacacatatgaattagtgataacttcatcaaaccaatgatttagtccacataaatgtttttcttttctttattaaagagaagctcttagttaatatttatcgataaaaagaagaattttttttttaaaaaaattgtgttatgttaacatcaatgtatatgtcagcaaaatttgtcggtgactagttatgaattttggcttcttctacttgatatatagttgtaaggcatcccaattatatatatatatacatatagaatgatttaattcagtttaatttaatttaattttggtttcataataaatgaatttataataatgttacagtgtttgtacactttgaattgaatttatatagactattcaaggaatctcctcatcctgatgagaagcaaagacaacaattaagcaagcaattgggtcttgctccaagacaagttaaattttggttccaaaatcgtcgtacccaaatcaaggt

SEQ ID NO: 19598 - DNA, 5011 bp, Cannabis sativa
tagctaaaattatttgtttttatggaattagggttatatgttctatttacagtatacattatttaaaattgtcattgtactgtcacaaaccgcgcgaagcgcggatttgtttcctagtattgtataattgaaaatagcaatacatagcttaacgttagctaaatctatacaaaattgagataattcgagttgaaatattgaaatttaccataagatttttaaaaacgctgtcgttttattagcttcgtctttaagctctgcctgattcacagggatatttgaacgagatcggagccacccatggtgtcagcatcaacagtagaaccactcagccaccctcaccacgaattctcaatcgccatgaaatcatatcatctcgtctaatttgtgttgttttgaaatcttcttcgtgttcgtccagatctttttacacattagctccatggaagaagagagcaatcaaaagctggatgtagctttaaaatgttgtcacaaccccatttcagggatttggtggttcttcgccatagccgcctgcgtcaagctccttctgatcccatcataccacagcacggactttgaggtccaccgccattggctagctatcacaaattctctaccactttcgcaatggtacttagacgagaccagcccttggacactggactatccacccttcttcgcttacttcgaacgcttcttatcaatctttgctaaactcgtcgatcctcaaattgttgatctccaaaagggtttgaattataactcaaatactgtaatttattttcaaagaatcactgtgattgtatcagatttatgtcttctatatggggtttttagattgacaaagaatttagattcaaagaggcgaaaatcgatatgggtattggttatctggtccccaatgcttatgattgtagaccatttgcattttcagtataatgggtttctccttgggattctattgatttcactttcttatcttgaggagggaaatgatttgatgggtggttttgtttttgcggtcttgttatgttttaagcatctttttgctgtggctgcaccggtttacttcgtctacttgttgaggcattattgttggggagggattttgaggggttttaggcggctatcggctatggggactgtggttgtggcagtttttgtagcagcattcgggccatttgtatattatgggcaggtaattatctcttgttctaatgtttaatactttaatatctatcatttctttattttccttatgttatgaaaagtaaccatgtttatctgtagcttggtattacactgcaaaatgctttgtgtttttcctatgttgtgacttgctatgaagagtaaccatgttcctaaattggtaatacactgaaaaatgtttatattgttcgcttcgtctttatgagttaatgtaaatgcatatttgatgatttgaatcttttacatgttacaaatacatagcatgaagaagtaccaatagagatattatagttttgttctgttctatatttgcagatacaacaagtcatcagccgtatgtttccctttggtaggggactttgtcatgcatactgggcaccaaatttttgggtgctttatattatactagataaagggcttgcattcttttttagaaaactcggcttcaatattcaaacacctgcagcttctttcactggtgggcttgttggggattcttcaccttttgctgttttacctcgggtaaatttcttgtgcttaaaacctgaataaagtttacattccttttcgcttggcatgctatctcaagagaacggtaggagtaggattcaactgagtatctatgctttttttttcttttacaaagagtatctaggctttttattgctgtgaatccctcaaagtattccttttcgcttaatctgttcacaccatggggcagttttattccttttcgcttaatcatcttttaaatttatacttttcttgtattttcggtaaaatgtaatattattggacttgatgagactaagttgtctttccttcaatgtgaaatacaaacaatatctgatctgttgagacctaacttttttataattgaatttacaatggcagatcgttccactgacaactttccttatggttctccttgctttatgtccttgcctagttcaagtttggagaaatccacagccgaggaagattacaagatgggtagcctatgcttatatgtgtgggttcttgttcggttggcatgtacacgaaaaggcttcacttcattttgttattccccttgccattgtagcagtgcagagtatggatgatgcaaagcattacttcatgctatcaataggtacgttttgctgcttatcagcccatgttatctccactgttaagatgttatttttggggctttttcttgaaagttattttgctttaatgtgcatatgatttgcctacacttttgttagatgtcgtgttgcattgcaaaaccagtttcttgcttaatgtgttcttcatttcatattattgtctattacttaatcggataaaaatgcttcctaataaacaatctatttaacagtctcataacacaattactctgtattgcgtggacactgtatagctcttttacgatcgtcgcactcgtatatgatgtcttacgtatcccttatcctccttactgtaacttaattttcattttggtgctaatttcccttgtttctccactttcttacagtgtgctgctattccctcttcccacttctctatgaaggtcaggagtacccaataaaagttctattgttgctactacactccattctgatgtggttaggattttctgcactatttcaaagtggcagagctgtgaaaacttcttctcttaaaaggaaggaactaaagacgagttctagttcatcagctcagggagaagaagggtttagtattggcttgattgaaaaatgctatttgactggcattataattgttgaaatttggggtcaatttgtgcaccctttggttcttggtgacaagtttccttttatacctctgatgttaatctctatatatagcacaataggagttgtgtactcttggatttggcagttaaagtggattgtaagaagtgttggttcatagtattctcattcttaactactcaaaatttagtttttattggtgggttttttaatgtttctccatttattcaaaattatgtaattggtcaacatgaagttagaactaggtgaatagttttcacatcaacttttttgagcaataatggtcatccgctattaattggtaatcatttttttttccttaatagacactgtatgaaaaattattaagatgattccaaacaaaaacttatctttgcttttcaactcatctgaaagttgtaaaaccacaacaatagcataccaaaaccatttttttagtttaaaaacatggatttgaaaaaccaatgtgcttgctctagaaagtttatcttcactacttttgtcctaacacttttgttttgtccaactttgttatgatctgactgatgataccccacctgtattgatgtaggttatcacttttatgggaaaatttattacaatattttccttattctttttcttttttcttgtaatcaattatatccaagagtatgtggagtgtggacaatttttgaaattgattgatgtagaaaccatttaaataatactcatataatgttttggtattatatatccttgccttcaagatgatcttatccaattattatgattattacacactttattttttctttctttctattaatatgaaaatatttattcgacaacttgttgaatgattttcacttttcgtactccatgatcatgacccaacaagtcttgttaataacaacagatgttattaaaaaaaaaaaaaacaaaattatgttaattttccaccttatatttggctacttaatatgttttttccgcaaggtgcagtatttaattttacactaatattttgaaatggttgtacactctaaaatacaaattagttgaacaccatcattaaaagggactcaaaccactaaaagtgaacatatttatctacattgagagagtgaaaaaaatacgggcattgcactaatattttgaaaagttgtggtaaataaattgactaaataatctttttaaatagacagtgaacttatttggtaaaatagactcgtccactttttgcctaataatttttcattgatttaatctatattgatctaacttaatattgttactctccttttttgttatgtaacaatttggatctgtgttttacgatcaaattgatcacttgagcacagtttcgatgaaacaatttttcaacaaattaatatcttaagctcagttattcaatgatactttcgaattgagatttgaaggaaaattttgaatttagtcatattgaaaattattttgattgaaattgagcaatgatatcaattttatttcattttacaattgtacatagtaccaattgtcatataacaaaaagtatacaccaattgtgtattcacttaaattcaaaagtcaaattagtatttctcaattcaaaaatggaatatatttttttttttattttaaagagaatgtattatttcaattttctcatgtatgatttaattttatttttattttttaaaaatcaaaattaataaaaaaaaaaagaaattaattttatttatttattaattatcaataagaaaatacatttttaaattttaaattatatataacatgtatatggcaatgatatatgatatatcacaaaacgtaatagaagtcttaaaatttagtatatgatttatgaatactttggaaacaaatttaatgggggtggagatctgattttatctaacattttttttatccaatctaatcagtaattggatttggaaaatcatcatccgatccaatccaattagacattaaaatctaatccaattactaattgaattggatcggttttttaattggat

SEQ ID NO: 19599 - DNA, 6141 bp, Cannabis sativa
  modified_base (40)..(54): a, c, t, g, unknown or other
  modified_base (5223)..(5226): a, c, t, g, unknown or other
gtgaaccatgaaacataaaatgatttctgatctttattannnnnnnnnnnnnnntatattgaaatagattttatttagagcacaaaacccaacagcatcaaccacaccgtcgaatccttcctctgtcgcaccttgaaacccaactacagaatacttcaaagcattaatggtgattcttctggtacatatgccgtgtcaaatctgatctatatgccagtaacttcatcatgagtgtgtttcctaatttcaacttcagcaatgaatttactcttgtgcgaatacacaaccatttgtggttagttaatgtggacactccccctcctaatcctgctaatgattatacatattgtattaactttaaaatatcattaattatgaattagattttttgtgttcttctgcatgtgttatatcgatgggatgtgcagctaacctttctcccatttaatgctaccacacgtttttattctataaaaggaaaatttccttttttgttctcctcacctgaaaacaaacaccccaatacccaacaaaaaatagttgatagcaaaacacttaccctcttgtgcacacaccaatcacctattatggatgatttagctacatctttgtctgtggctcttaatcttatagatactgaaagcacaattcaaacactccattacccaacctgctgaagcctctgaccctgaagccccatccacaaatatatttcttgttgcaaaacttcacatgattaattccttcaacagaaagtgtttatggaaataatgatagggggttggaacaatattttcaggttccctgtcaccataacagaatgcacaaaaggtctttctttatcgaatttggatgcgagggtgattgacggagggtgctgctacatcaatcctggacctatctgaatcatgcaatcctcatggagatccttgctctgtggatgtcttgagtggagacagtttaataaaattttcactttgggttcaagttttcaacactcattttctttagcgatccgaacaactaaaattcaacccaaaattctagtttaatttgtaaaagactaatactccaaatagcaattttcaaatttataaaatgcactacaacaattataagatataggcacgaccactttagggctgaaaaaaagtcgacccattagaatataggtattgggctgacattattaaagtcgtgccaatcagtttgtgtatttttttttaattaaaaaacattaattttgggtcgaaattttggtttgagcacgtcattattgtgccatttttcttttttctttttttgaaaattggacttttggtattggcgagcccattgttactggtaaagccttttttttaatttttcttttagttttttttttaaaaaggctttttttttcttttagctttaaatgaggtaaagggtttaaaccctaatttcatatatttctttcataccattcactctcttccgcctccctcagtctctctctggctcctaccggatggaccagctccggtcgtccacctcctaaacggaggctattttcgaactctccaatcaatccaaatcaggtataatccaaaaacgaaaaaaaatacatcaatactatggccaaatatggccaaaaaagaagatttctaggtgcatgagaaacaaaaaatagaataggtgcagtaaatatggccaaaaaagtcacaaccagaagacatgccataaccaagcaattagatattgagagaatattaatttaaattatttactttttttctgtgaacttttacaggcaaaaaatgttactttaatacatttttattacatttaatacattattggttttaaaaaaattgcataataattgttttgtagttgaatgtcaaatccaacatattatcataaatgtaaagcattagcaacaccatatttgaaacattaattagaagttcaaaacactttttttattacgttgacaagcatgtatgttattcaatagttgccaaaccgttaaatgatggttgtatagcaagtgttacacataacacattgattaaagtgatttctccaactattttcataagtataataattagacatgttgaataaacgttgtctcacagttcaatcaaacattttatatatcgtgcaaaaacaaaaagaaaaaacaacaatagaaccataacattaataaccaagtcttaacatctagcattaaaaaacaaacaattaaaataaataataacattcaacaagctatagaaatcagttctcaatcaccagacttgttcttccctttaacatttttcatagacttctaaggcttctcatattcattatcaatattttttttttcatttttctttttatcatatacaaacaaaagcatatcaagcctcatgcgataagctccgatatcaaaatctagtggagcatcttttccatgtataaaaaactcagcaaatgcagcaacaaaaacaccacaatcactgtgtaataaaacaataatcaaaatagctaaaaacaactatactgaaacacatcaacaacaaaaatgcaacgacataaataaaatacaattgttttcctcactaagcagagaagcaatatccactactcttagtggagctttcacatcagaaccaaaacctacaacaatctgtaaatataatcacgaatattaataaaaaaaaattaatgaatcataaacaaaatctacaaaatttatcaaaaacaataaaaataacaaatcacaatacaataagcatttaatatacataaattccaaacataaaaattaaaatcaacagcaagtaccataaacaaataaaaagagaaacatggttccgaagttgagaaacggaaaagaaacctaaaaccaactaatacgaaatacaaataaaactcaataatagacctaaaacaaactaggaaataaatgaaaaataatatttatcaaagtacatgaaccatacctaaaagcgatagaacctaaaatatgacaaaataaaaaaaaaaaaatacaatacaaatctcaatcaaacgaggagtttgattcttcccctttctacaaacagtagaacactatcaagaagaaaataactcaacttaaagaagaaaaaaaaaatcaaaattggagatgtcttctttcgtgaaggcatttcatcaaaataagttagttgaacctttatatacatatatacacaaaaatccaacttataaaagaagataaaatatgaaaaactgattccaaattattaaaataacaaataacagcaacatccataaaagagttaacaagcaaaaaaactgattctaaagttgagaaaccaaaagaaaccctaaaaccaactaatgagcaatacaaatgaacctaaaacaatcaaaacaacaagccaaacctaaaaaatactaagaaacaacgtaaataaaaacacattaacaacatccaaaagtgatagaactaaaattagagcaaaaactaaaaaaaacttgaaacaaacctcattcaaacgagcaactttgtttctttcccttttttcctttagaaatcaaacgcttttagattttttattatcaaaatccttcttctgtttaggtaagggcgcaacaaaattatctttatctaactttcttttctcttttccttttttttccagccgatttcacacccatatcatgagcttttggatgtttaacaggatttttttttttttttttgcaacaggggatggagaagatgatgagggagtattgccatttatagaaaattgtacaagaagaacaaaacaaagaagaaattatggtggagaaattgagatgatggaacgatcaaggttgaaatcgtgtggagaaattaagggagagaaactgaatatgattatgggtatctaatttaaaatcaaaactgaaaaataaaaaaaaaataaaaaaggaaagaaagggaaaactttgagtgagatagtgacatcaccttgcatgtatgatgtgtgtgtaagaggtattttagtaaataaaacaataataagggtaaaaatgttgttcaagccgtgtttgggtaaaagtataataaaagaatcattttttacttttcatataaattttccaatactgaaagaaaattttgaatttttgagcttaattcagctccttaattaaaacaaaaaaatcaaaaaatatctcattttacattatataaaacatatatttgtaaactaaatatttaaatcaaatttaattattttttacatattttcttcctatcgaaaaactttttttcttaatttttttagtcgatgcaacagcctcaactcatttaatgtaaaaaaataagagatttttctttttagatagacactacaacaaatataacttttaagagcgaccaatttcaaggcgacataaagtcgcctctaataataaggatattaggggtgataaatgaatgttgcccctaaagaaacttgatttttttaatctgtctaatattaaaagcgacaaaataatattagtcactcctaaaaagttgaaaaccaatagttgcaaatagccgggaattttcccactcatactatttggggcgactttccactaacacggccaaggcattaggggtgactttgttgcccctattgtcacctctaatagtctattaaaatctcaaatctcctccttccccgggctattttactccattaacaccttcaatacaagaaatcgagcaagaaggaaaaaataatagacctatcataattttattatattaagataggggtaaatgattcaaggtaaggagaattttcataaatatgggaattcagggtatagtttacttttgtatggcataaaaaaataacaccatagggttatgggttcttttttttttttttttacatttatatgggttttatttatgtcatatttttgttaaaaaaaatggaaatcccatatttataaaacaacaataagttttgccgaaaaagttgtcggcattggaaaagtcatcgaaaagtctccagtgctggaaaagtcaccggaaaagttagtgtcaccggaaaagtcattcgaaaaaatcaccgtcgccagaaaagtcaccagaaaagtcgccggaaaaatcaccatcgccgaaaaaatcactagaaaagtcaccagaagtaaatgtctcagatataactaaaaatataaccagttctctagttctataaataaaaactaataactcaaacnnnntataattgaaatataactggttctgtaacataataaataaaattaaataacataaaataactcgaaccagttataattaaaatgaaaccggttctacaacagtgttataatgaataaaagccaattacacgaaataagtaaaaccggttatataacataatgaatacaaacaagtaacacacaataattcaaacctattacaattaaaaaaataaagggaaaatcagttcctaaaacactgaaacagaaattaaaaataaaactagttctacaataaaaaaacctcataatacataatacctcataaaatcgattataatttttttaaaaaaaattgtgatcaatttcaaaaaataattaggcataaatataaaaagaaccaattcaataacaaaataaataaacacaataactcaaatataatataaagaaaccggttatatttatcaagtagttaaaaatttaagacaaaataaataaatataattgaaatataactggtgttgtagcataataaataaaaataaataatataaaataacccaaacgagttataattaatatagaatcgattctataacaatgttataatgaataaaaaccaataacacgaaataactcaaaatcggttataattataattataattagtttgagttattttgtttttttatttttattcattatgttacaaaaccagttatatttcaattataaccagtttgagtcattttctgttatttatttttattcattatattatagaaccggttctatttgtgtttatatttgagacatctacttcttgtgacttttttcggcaatgatgacttttccggctacaatgatcactactacaaaattcactattcacgtcggtcaacgcgactattcatcgcgttgaccgacgtgaat

SEQ ID NO: 19600 - DNA, 3501 bp, Cannabis sativa
aatattctgacaattaatgtggcgcagatactgatggagtatctcacctatctaatcatatataggtctcagttcccgagcttttcactcattctgtgtaaacaacagaattccatctaaagagagttgagagagcgaggaagcccaaatttgcataccgaagctattgcaaggattgaagctcaaacatcaatggctgaaagtatttcggtcttttcatcgcatattctatttcgatatgtctgtagttatttagcattacatatcgttcatatatgctttattttcatattatattatagtctaacaattttataatggatggttgactgttaatgagatctaatgattatatatgattttataatggatgtggttgagactgttttattgggttatatatatgatcttgtcctagtctcttaattatagtttgtctttgataaagttaattgcattggagatcctatagatccatcatttgcaatcggctggccatcattggtgttttggaggaaaggcttttgaacttgtgcccttaaacaaggtcggaagctcaatttcctatttccaagtagaatttttatgttgcatgaaagcttttctctgttcaattttcattgagtactgatttttatgatcatggacattactcttcatggtgaccaatctttatttacaaaaccatattcttttttcacagttgtatctggagtctatttatgatctactagcaccagaacttgcaccagaaaagattaatattcccatttataaagatcctaagattggtgaggtgttgttgctaggtgctatagtaatatgagctcattcattacatatcttttcatgttcaacattttactgttcaaaaacctgtcaatgaaaatgtaaaggatggccttaatttacaagagaaggcagcaatggggtacctatagttagtgatataccttcaactttgtttgacataaggtgtgaagtttttccatgtcaacggtagattgtgacataaggtaacgcaaaatggagttcatgtgaacaaagtcacacaagattatcagtgattgctaaacaaaaagtttgcattaaacctttactaatttatatttagttaaatactccgtaatacttcataaaagcggcattttcaaattacaacaaaaaaaaaaaacaatttaattcttttttttttttttaaaaaaaaaggaacaactttctttgcaccattcaaatcagatatataaacaccagttgtaggaacatgtaagttgaatatatacctgcagtgcagactggatttgatatttcaaacaatggacctatactcgagctgaagatggtggtcaaagtgaccaattagaccgaagcatgagtgcagttactctagcattcccatccattatataagcaatcccaggctttatactgaatttctttccaaagttcaatttcatgtaagtttcaacctgaaaatgatcaaaatttgagggaccttcaatcatcccaccaaacttcattccccatccaaatgaatcttcagaatcatccgacaaactcgccccccattttagatatctgggatccgagttcttaagctcaatccagccaccaatcttagtgaactcgtcaatttctgactccaacatcaaagcaacggacccagttggtacatttccctgtgagctatttccaatggtggaaactaaattctcaaccattccctcaggagtttcctgatgtttagaaccacctaaagagagggtgaacggtccataagaggcaggtaattggcatgctaattttggtgattgcaaaagtcccatgaccgagagctttgttcctcttggaagttgatacaaaacttgcccaaatgtgctaaaacaatggccaaagctatgagaatccaaatgcattacctgcccagaaacaaactgagccaatgaagcaatgacatttgatttcttcaccattaacccaattgcactgccacttggctgattcaaaagagatggtccggaagatgaaatatcagttaggcccttaccctgatgagaagggtctttgagaattgcaacatctctgcctttcccacccaaggggataacaaatgctgatagccagtcactagcattagctgtatagcagagctttgataaagaaagtgagcttcctaatccctgacaatcgttattgttgttgggattttgagagcttaaaaactcgacaacaagggaatcattatcctggattgtggtttcaaaagtgaacctcatatcaagtccagttctgagaccagctttatcaagtacattgtagttgttaccatcctcatgtgaatcgacactgttcatcatcatcagcaaacctcccatgaaattaacatcccctcttagaacagtatccacttcttgaaatggactccctttagcagtcttatacaaggaaagaattctttctaccttgtcttgcctgtccctgagcttcatcaaatccgaaaaagcttctcgttgtagcctcttcaatatttcaactggagtgttccgacgggggcagtgaatgaagctatcaatgacgccttgagtccattgacccaaacctctgaatttgtcgataacaaattctagaggctccattagaacaaaaccctagagagagaggtatacagaatacagttcaaaaaaagtccacagacttaattcgtgtagagcttcaattcaacttttattccaaacccgaaaacaaagtttcaaaattcgggagagagaggggggaagtgtgtgtgagacagaggcgagaaagagagaccagagaggagaatttgccaaaatgccattctcaaactgaaatttgcaaaataaggtttgtttgtcattatcttttatttttatgttttcacattatgttttaagaaaatgataaatgaattggttgattagaaaataaaaaagtgttttggttgattagtctattcaatacaacattggcatcatggtaatgtacataatattattgtgaggggataaataatttacggcataaatacttaagttttatgttgagtaacaaataaatatttaagtcgtatttttggcagaaaaatatcttcggtcactaacagggccggccagagaatggtacagccggggcataggccccaggccccataattttcgaggtctcaaaaaaattaaaattagtatatatacatatataaaagtttataatatattaatatttaatttaataaattactggaagctcttgtggcattaatcggagaatagagagtcatgtgcactgtgagattaagggttcgatccttcatacatgcatatgtgttttatttttgtatatcaaagtgatgtctaaaaggaaaaaaagatgataagaaataaattaaatattttaaagtaaatttataacaatattatattttaaatatttgtattaaactgtttaaaaaaattatactgcagttcttttatttttaagatattt

SEQ ID NO: 19601 - DNA, 1289 bp, Cannabis sativa
gcaagtcgacacagtcgacacatttagaagggtgctaagcacctaagcaccactggtgcccaatagcaatgctctttttttattattatatatataagattgcaaaaattattgatcaattcaactctgatcacctagttagctaacgtacgtgtgagttagcaatctgatttgtaattcattaatggcagtgatattgggaatgggagttgtgggttgccgatggattgcacgaaattattaatataagaaattctgtttttttataattgtcaagtgatttaattatttgacagaagaaggatatgccctaacaatttcgtaggttgtcagaattgatttatagagtagtactgatcttaatctcttgtacaaattatgatctagtggttttgggttggtatttaaaagtactgaatgggcgtccagtccaaaacaatctccatgaaatctacattaattaattcaatcttataatttataaatgattcctaatattatttcttgaagtgtcattatttgtgcaatttaatatcataaaattctacataatctaataattattatatcataaaaaattatcaataataaatgcatcatctatatattcctaataatattagctaggcaccagcattaaacattggattggaattatatatatctctggtctatatacccaacaaaaacaagtttttgattctatgtatcttcaggcatatatattattagtgaaatcaattatgcgtcatctgttgcgtacaccacttcttatttttatttttattttttggcacgaaagactagtcattcatatctcaagtatacatatatatatatagaagtttgtttattagtattactaaagtttgagacttaagacttcaaaaactaatagactatttacacgaatattatattggtgtttgatgttataaaataccaaacactttttataataatagtaatatataaggtacaaacattaagaataataatatggaaggaggccggaggagatataataattaataataataatatgtctagaaattagaaggtttgtcttgtcatagaacatcctttttattaatttttaatatgaaaaaatttattttctagggacccaagtcttcccaaaaataagatctatatgccactaaatttgtaacggcattgttatgggtattaggtgcctaacaccattataagttggtattttataaataattaattaaaattaaattatacaagtaataatattatgcatttcgagattataagggtga

SEQ ID NO: 19602 - DNA, 4668 bp, Cannabis sativa
cttttgaacaacaggcttctgctggcagcaaaaagattgttggggtattctacaaagccaatgattatgctaagctcaaccccaattttgtgggctgcgcagagggagccttgggtatccgggactggctagaatcacaaggtcatcaatacattgtcactgatgacaaagaaggacctggctgtggttagagttttaacttatactatataaacttgtacaattgagttgtatcatagtaacatgttagtgggcatcatcttctggttcttctttagttgaacttattatctacaacttaaatatatcactatatctatattaataatgctatacaataatttgaactgatttgtaacccttctcttgtttttttttctttccctttatacagaacttgagaaacatattcatgatctggaagttctcataactactccgttccaccctgcttatgtaacggctgaaaggattaagagggcaaagaatttgaagcttgttcttactgctggaattggttccgaccatgttgatttgaatgcggctgctgctgctggattaacagttgctgaggtgacaggaagtaatacggtttcggtggctgaggatgagctcatgagaattctcattcttgtccggaacttcatacctggtcatcatcaggttatcaatggggattggaatgttgctggtattgcttacagagcttatgatctggaagggaaaacggtgggaactgttggtgctggacgtattggcaagcttttacttcaacggttgaagcctttcaactgtaatttgttgtatcatgacagactcaagatggaacccgaattggagaaggaaattggggcgaagtttgaggaggatcttgatgccatgcttcccaaatgtgacatagtcgtcatcaacatgcctcttactgacaaaactcggtattgattgttttctttttttttctatccgttatctacttattaaagattatgtgtattatttgtagtacagacttaaatccaactcatgaaacaggggaatgtttgacaaagaaaaaattgcaaagtgtaagaagggagtcctgtttgttaacaatgctcggggtgcaattatggatacacaagcagttgttgatgcttgttccagtggacacattgcaggtaactcagcaactcaccaaaattcaattagagatcaataatgaagataccccttttccatttaacatcattatatgatcttgaaactggagtatgtgcataacgatagctctccttaacaaaacatatggctatgattataagtttgatttaaattgaatctcctcttgctctctttgagttgagattatgtatatgttgtttcgagggtttgaaaataaaatgtgatgggcacaatttatttaagaagaatgcatagaaatctgtaaatttgtgtcaaacttctgttactggatttcgttctcctgagatcttctaccctatcatccaggctacagtggtgatgtttggtatccacaaccagctcctaaggaccatccatggcgttacatgccaaaccaagctatgactccccatatttctggcactacaattgacgcacaggtatatttaattctgtatattatttctccttattttgatattgctactttgctgttatttttgtgtccataactcaaaacaaaaacataaaatggacattgttcagttgcgatatgcggatggagtgaaggatatgctcaataggtacttcaagggagaagatttcccagcacaaaactacattgtcaaggaaggtgaactggccagccagtaccgatgatttggatccgcggaatctgagtctacttgtttttgagtctcttcactgctgacataataataagaaaaacagagtgatcatctgataatctctacgttcttgaagatccacaatgttgtgttagtaataagactcatctcattatgaggatggtgtcaatagatttctgtagtttcgcttttgaagtgtttcgagtctagtttctgcattgagattatgctttgtcagtatgtggaagactccaatgacaattatgaatagacgctttctatgcttgaatgaatttacaagtctattacttcctttacatgttaagtatgtgttgtgttgtgtttgctttactttgtttttttcctactacactgagaggaaggaaacaactgttcttgaactaaacttgcaatcatcatagaatttatgatgagaaagaatgagcatgaaatcctgaaatatctaacaccgacagcattttttagatatgctttgacatttgttatctacaaacaagtaacgacaacttacctaaacaacagtatattagtgtaaacaacaacaaattagagagaattaacagtgagctagacagggtaatcaaaatcaacactctaaaatagaaaagaagaagaagaagatacaacatacacagctctgctattccattatgaatcagtgtctataataactcagtacgcattgatttaagtatctttattttgttgaaggaattgtagatccttcatttgcaattgaacagcttctttggacaagatctttggctccggaacgtttaaatcaccgccttgagctattctttctgccttgtcttttataatcttctgtatctcagttttctgtacggttggaaaaactgaaatgagcattacattgagaagattctcatcctcttcctctatagggcctttcccaaaacagcaaacataaatggcttcaagtgatttctcaactcgagcctccatggggatcgttgttgcgccaccctttgactttgcccgtttctgcattacaacacatttatttattctcagtgagaaaggaaccatttttcaaaataacataaagtctatgcatctttttaattgttcttgtgttgaaaagaaactgcagtcctcaaatggaatttcccaataatagtaagtattaatcattaacaaacctctctggcctcattcatcatggctaagaaagtctcttcctcaaactcaatatcatttgaaatccgaatcctagctgctccttccaaaatctcctcagattttaagagaccagctcccacggctgctaaccaacagcatagaagaacatacaaaggctcccctgcctaaccaaaatccaaactcaaatcaaacaccataaatagttcatctcaagtactccaaaaaacccaacaagaatgtcctaataattattagtggagtagactagctactacatcagaagtgtgtttatggatttttttgtggagaaaaattgttttaaattatgattgtttaagctattatgctacaattataacatgctaattggtaagaatcattagttttatctcaaaaacaatgtgtaactatctccaatagagtaactcgtgatccggtcttataatgtgttatactatctccaataagtagtgtaaaatttgtgttaaatttgcctcaaaaaataaacctattgagcccaacttttccaattatgttccaataaaatacagaaactactgaattgaaagtatataacaactctattaatatataaataaattgtaaaaacttatcaattgattaatgagtaagcaaaaagaataaataaaaaaaatatataatatttattataatgtaaatttagctatatatattgtgtcaaatttcacacaatgtttaacacaatcaaatttgacaacattatacattactattgaagttcaaatttcatgaaaattgaacttaatatatgcatatacacctactcaactagagatatcttaataatctcatatatttataaagataagcaaactatgaaattgagcattggtgtaagacatcgtcctactattatctagaggtggtacattaagattatagttagtaatattttataaaatttattgcattaaattatacagaacattatacttaattatactaatattagttcattttaacatttctcctgaaatttatatctcatgaatactaatgccatatttctaagcaaattcaaagactagtaatatccgatcaaattataacaatacaaataaaaccccattttcctcaaatagaaaatctaaacaaaaaactaccttgcctcttcgactttgaaactcatagaaagctctggaatcagatggagtacacctcttcccaactcgtctccgaaactcggcaaagtcaataatatccccaccaacgccaccttcgtcgcttatgattctggctactaaaccgatcacagggagagctccgataactttgttggcgaagctggaaaaagagttgggagtttccatgtaagctttgacagagaagacgaggccattagagttggaggaaggggatatgggcctagaagtatagatttggcggagaaggagtagagaggatggggaaatgggttttcggatgatggtgtgaaaaggggtgtttttggtttggagtgaggatgaggtgaaggtgagcaccaccaccatggctgtgaaaagtgaagctcaggtaagtgttttattatccatggaccatggcctctcatttatatacgttatctcatttcccaactctctcagaattatgggcctttgttttactacattacttggggcgacccgacccg

SEQ ID NO: 19603 - DNA, 6396 bp, Cannabis sativa
  modified_base (5790)..(5799): a, c, t, g, unknown or other
ataattgattcctattcctttttagtacataacttaaaaaacttgttaagttaattttttaacaacaattaattagagaaaaaaaaattaaaatttaacaatttttttcttcataattacacagtgatttacaaaattattttcgaatttgatggagtactataaatgtggtgtatatatattttcttatatttatataattaaactctaataatacagtataatgtgatataaatttaacacatacttttagccaaatttaacataaaatataatataagccaaattttataccacaatatatattaacacatgcatggtcttatagatcgccaccttaactgatgtcagtcgctattggtacctaataataatactattaagacttttgggacttagtaactattttgttaaaattgaggattatgttgcaaaaacatattaatttcccaaaagtatattcctaagttgtaccaaattgtcaaatttaagtagttggtcgtttagggacaccttagaataaataataaaaatagaatctttttcttgggagatcggaaataccaaacctcggctgctccgatggctctgcttctcaccaaattcgcttctttagccttcttagcattatcaatggcttccttaatcctcaccactgagtccaccaaacctaatggactcggatttggaatctttccaagaggaaaacatcatactcagtctcagagagagttcgattacttcgctttggctctgcaatggcccgccacttactgtcgccgtagccgccattgctgtacttccaatgcttgctgccgagggttcttatttattccttctctttatccccttttttttttgttaaagatgatatttttgatttaaaattaatttcagctctaatttttttattttgattttttttttccagttcaaatgctcctgctgagtttacaatacgtaagtattattaaattagttaaagtatataatataatataatatatgatatctttctagtcatattaatataatattgtaacccatttgactagatatgtttggttcaaacagttacttgaatttacttttgcaaaagttatgtttggtttttcttttttcttaatatgaaagtttaaaatttgaatgaagaagaaaaagtatcaatgtatgttgctgttctgagcaaaaatatgaataaattatgtgaaatagtatttttccaatttgggatttatccccaataaacagtgaaactaaagttattacagttcattaccgactcatgattcaaatgagtcacttgtcataattaatttatatggaatatataatcttgctttttgtacttgtatggcagatgggttgtggcctgattacaatgatggaagctggccttcttgctgcactaataagaggtttaatgagaaagaggtatctgtttgtaaattatatattacttcttttaaagatgacataattaaacattgttttagtgatatttatatatcataaaacattgttaacatatgtcaagtgctgcttcaaatctatatcaccaatcaccatacaagtattccacttcattgtagatttcatcattgcttggtgatctggagaagtattggccgtctttaagttgcggttcaccatcaacctgtcatggtggtaaagggtcattttggggtcatgaggtaaaaatttaattataagtttactttgtgcttgatatcttgatttatgttgtacataactgacatttattcatcttatatgtctaccatggctgaactggacacactacacttgcagtggggtaatcctcttaatctatttctattttttccatatgttttactagaatttcattgtgtgtgcatcttttgtccagagtcagggcttgtaactaattggttttgagatgagacccctgtatcttacaattataacgtggtattagagtcaaactaaactccaatttgtatccgatccaaatccaaaaactggtcaaaaaaaatcacttgtgattcggcaatagggagccaaaaagaaatatagccaccatcttgaggggatgttagagagtctcatatccacaatgtgtggaaactaaataccacgcataggatacatgagctactcctctcatagcgaattagttttgagatgggacgccatgcatcttacaattataacatctccaatagtttcttttttcttcccttttcctatttgtttggtgagacaaattgaagtgcattagattttgggtgccattgctacaagaaatgattatgcactttgagtcattggtttgatgaatgtctgatatgtttgtacctttttccttcttgttccagatgtgtataatattttatacctttataaaccaatggtcttgctagttactttctttgctctacctgtaaacttgtgtgcttcctatcattagtgtattttactcagtttgaaggctattccgtttttgcatgttcctatctaggtgtattttgttgactataacttatgaggccatgccatagcatgacatccataaagtcatagggttgaataaaggtgcaaattgagtgtagttatcatcttcttgcaactcatgttaatgtgtttctcttctttcactaccatagctatttttcaaattttcattcttacttgcagagaagcatggaacttgttctgctcctgtcactggtgatgaatacaattacttttcaacggtcctaaatatctacttcaaatacaatgtctcggtaagtttttgaggaactaaatctttacatggacctaagaccccttcatttgtatagaagacattgtagcttagtttatgttattcaatcagtgtatatctctcataatctattttttttttaaactgtgcacagagagtcctctccgaagcaggatatgtagcttcggatagtgaaaagtatcccgttggaggcatcatttcagccattcaaaatgcttttcacacaaccccattgatagtttgcaaaaatggagctatagaggaacttcggttatgcttttacaagacctttgaggtaaaactccaacaacgaattcactttcgattctatcatagattaatgtgtaggctgctcaaggatccatatcagaaccacgtttgtagggcgttgagtttgacctgacaattatggtgtcggttttcctcaccatatcactgcatttttcctttcatttgcggctcctaatatcatattgaagtacttctctagttctattagcataagcttaaactttttctttttgttattattaaaacaagctaagaagcttgatatttctcattctacttttagactagcaattgtaattggatgattagtccatttcggttccttgtcatgtgatgttctttaatttcacatgataaagaaattttataacttctgttaattctattttttcttcagccccgtgactgcgtgactcaagttaacagtgagaacacggtttcttcaagaaactcatgccctaaatatgtcagcttaccagcgcacgcttcaaggggtaagttcctctcggttttagactacattgttcggttgtatactttcgctttttaggaattgtttttcatttggtttcaagtgttgaagttgagaatcagttatagcaggaaacaatcgactctaatcaaataatttcgaccatatgttttttccttttgattcagggtttgatggtgccgaaacaaaacttccatggattcctgcaaaagaagctattgaagaacatgagagcatgtaaatattgtgaaccagtctcacataatggatattttcttaatttatctgtataataaaatgttgcataaatcagacaccatatgaaatgttgatacataggtgtgtgtagattacagctccattgttctcctctatcattgaaaatatgcaaacattagtttatcaaaacagaaaacagagaagtaaaaaatagcttagctttctgccatggagtttgtatatattgaacattttgtttttaatgttttctacactaaaaaaagaaaaatctttttatgttattcttttgagtattgttattaggcataatatggtgtctaatacggtattgatgtggcgcgttgcaattggttaagattatagtgctatccaatactaacaaaaaaaaaaaaaagagattaaaatatatattttatttttatctcgacatatatattttatattttaaatctattgatgcacctaggttatacacagtcattaagtagagaatttaaaagtattattttaattaaattgtgaagcatttttttttaagaaaaattaacggtataacaaattatgagatcatcacaagggctccattggtaggaaactttaataaaataaaaaaataattaagttctcaaaattaataatggtttgagaaataatacaaaacataactataacaatagtaatttttctatagcaaattggaaactaaaaaatcccacaaaaaaaaaaaaattctaaaacaaaggtaggattatgaaataaaatccatattcctaaattaattatcataagactctaagtatttatagtgatgtttacaatatgctccaatttcttcaaatgccttaattaagttgaagaatgttttgtaattctcctcatctggattagtaaatgtagttttataattgagaagaatatgatgactcctcaaaagaaaatagcccaacacaaaatcttcatatcctatcaatggagaccgcaacatctgaaaaattgtttcgctacttctttccaattcaatcgaatttgaaataaaaatttcaatcgaaacaagaacattgagaattggggattcggtgtttgatttaatcaatgaaccccaattcttaaaaatataattatcacaaaccactcttctaatttcattaagtgattttccataggaatgataaacaattttgggaggattagaagggtaatttttaggaaagaataagtcaaagaaaaataaaccatggtgataagaattagttgctgcttcttcgttaatcacaacaactctcataagatcacatcttgactcataaactctaatgtaaaagatcgaatttggaagttgagatgacaaaatctcccactcttctctcattgttttctttggtgacttatttttgtggagaccaaaacaaactaaagtagaagttggctggtgatcaagaaagtaatgatctaaaggcggagtttcgagtatatcaaaatttttaaacttacgaaaatttttctctacttcaacttcaatctcttcaatctcaccataatgattgttgttaacatgatgacttttgactttagcaaggttaagtagcttcacttgtcgggatcgggatgccatattttgcatgcctttactttagagtttaatgaatttttttgaatacaacgagttggtatatattatagtaatgtttttttttaattataataagattaaaattacatttatttaccaaaaaagtaaaaataaagtagatttttttttaaaaataaatttcaatcaaatatcttaacaaattatcaaatatcttaacaaattatcgtttaaaaagttatctaactagatattaatttatttaattatatattaaaaagaataaacaaattcacggtataaaaatcgaccaaatacttaatattatcattttttttttattaatatgactaaataattaaaaaaaattcacaattctaatctatattattattattattattnnnnnnnnnnttattattattattatatattaatgtttgatcatgttaatgtcttttaataaatcctcttatatggaaaaaccattaacttgtgagtgagtgaatcaatggcttctctttcccccaaattaagctttttaattatcgtatcaatggcttccctaaccataaccctatcccttataatcccattatcatattcatccgtacaagcagaagaaaagtccacagactttgggtacttcgtcctctcccacctatggcctgacccctcctgtcgccagtcccgccattgctgccccaccaacgcttgctgccgagggttctttctcaatctatctatctatctttctctttaagaccctcaaagttattgactttaatcgtattttacaagatattactgcccaaatatcttaaagaaatgatttttattttagattcttttagttgtgaatttcatgatacactagttatttggggatccactcacattgtgtttttaacttctgttttttcccagctcaaatgctccaactgagtttacaatccgtaagtatatgtttatgcattcttacattagtgtccatatatatatattatatat

SEQ ID NO: 19604 - DNA, 1811 bp, Cannabis sativa
taaataaataaatatagggaaaagctgcaattgtttcgtagtcgtgttatttgtcatttagcatttggaagtggaatcaaattgagtgttgtgttgttctttcttattcttattatcaacacaaatttaggtcatcgatgcatttttctgccctacttttcttttcctaatatatatttatattaatctcttctttttgtttttctttatggaccaaattcactcttaattttatattaattttatgtataaagcttttctatagacttttgtgttatacatataatacatagctagactactatatatatatttaattataaagtagtgtcttcattagtactaattaatatatgattgactcaatcatatgtttaattaattggtaagaatcataatcaagtgattatttgaatattaattgtatttttttttatttcctttttatatcgaaaattaccctgcatgtagacacacaccataggcttttcttctaatgatgattaaaaaaactaattttcaaaatgagtaataatgttaattttttcttaaaatttatttatttcacaatatatattaaccacctaataattatattggtgaaaagggagaagaagaaatgaaaatattttccaattagaaaaataaaaaactaaatgaatgagatgctttgactatttctcagttaaaaattaaacaagtagaacaaaattcccatattaataataaacttgacaataatgtgagaatattacaatagtttagtttggtttttcaacaaatatattggtgagtttaggagtgtaaatagatcattttatgatacgacacaaaatcagtacgagctcaaaaaatacaagcataacactatagaaaaaaaatatatatatataaatttagacagtaaagggcatgataacttgagaatattataagagatatttgcagtcaaatctctttaatatttgtaattgttacacattgattctaataaaaaaaaaagtaacagcaaaagtattttattttacgattttgttggagtcgtattttttttagttattaagtaacaattaagcccgttatgtgacaattcaaaaatacgtagcgatatatttctttagcttacttaatacaaaatctaataatatgttgttacgtgtttctgagtagacacttagtaaccaaaaaaaggtacgactgcaacaaaatcgtaaaataaaatactttcatccttattttttttattaaattttttcaacaaacatgctggtgatgatgtggtgagtaccagtttgaatcccaaataattgattggggttagaatccaaatttaattatatatatatttattgagagagagagatgcacatggttgggtagctgaggcagttgcccctccaagtatgaattataatgttcaactctattattctttattccattaaaagaaaaatgtttacattctccatttaaaaactataccaaaatttattttattgatcaattgttttttctaaataaatatattttagtttatggaaaatttaaggtctgatagaatattcaaatccatgtccatacagtctactctacattctacaacaacgttggatatattttattattgtgaatgtcacaacttaccaaacattcggataattggaccgtgattgacccagttttcacccactttagtattgggctcaaattattgaagcccgttatgggcccaacaaatttctttttttttttttttttaatgaactcaaaactagtttttaggtcaataaatattcgaaaactacattaat

SEQ ID NO: 19605 - DNA, 3402 bp, Cannabis sativa
  modified_base (45)..(45): a, c, t, g, unknown or other
  modified_base (109)..(125): a, c, t, g, unknown or other
gagggagtctatttatgcataggtcaattactttgtatttttganacctatctaatgaattttatctctgggtgtacccctgttgactagtaacagtctgaaaggattnnnnnnnnnnnnnnnnnaatcttatgtgtttttacttttctgcactgtttgtttttctaatttcttctgaagttacaaagttgttttctataactacataaaaactatttcaataccagtttcattattccgcatttaattaagcctttaattaaataataaatctgggaatattaaaatacgaaatttcattatggttagtaatattacatacaaattattatattaaaatatataaaactcgatacttaattacactaatttttaatacttctcaattacataaacaaacaatccaattttaatttatttggaatatgtttggtttataggaatgagaattgtaatggtaatcaacatgtccattattttgtttgctttccttttttaaattttgtaatccattacatacaatggttattacattgtatgaagtaatcctcattacaatgaaatactattgtaatggtcagtacaattataatccattacaaaattaatataatattataataaaaatataataaaaaaattcaaagtctattttactttttatttaaatattttataattatgaaaaataaaaataataaggatattttggtcaatatatattttattccattacatttttataccaaaccaaacataataattttaattacaatactcattccaacaataaaccaaacattgtatttaattaccattacaattcctattccattacattatgtattaccattactattacatttctattacaccaaaacaaacattaccttggagataattataacaagccttacaagagactttacaattaattaatgataacatgcttaattatacccactttcaacatttctcaaaaaataattattgaaacaaataattcttattttagtagtgtttggagataaaataatattaagagaaatattaaaggatactagtagtgcctagtacactcctatatgtcaatattactattggttcaactaaatatcgaatctcatataatttaatagactaacttttagagtgctaggcacgtcgctaatagcaatgctctgatattaagccttcctcctagtttgagtttgccacgtggcaacaagtccaattgtgtgaccaaattgattgatatccctctctccactccacaagtgactcaatcattccctttagcccattctcctcttcgattccacaaatgaatccttatcttcatccttaccgacacctttaagacacacactcttctgattttttatttttttccttttttttttatgaaaagaagaaaataataaacctaaatattctttctttttatacaccatttttaattttagaataaaaataatcactgtgacaaaatcatttcagcatctaaaaaatgttttcaatagttatatttgaccaaaataattgatgataactatgctttaaaataaggttgattattaatttctattttggaaattctattttatattagtttttttttttcgcaaagtctattttatatatattttttttattttatgattttgattgtgctcttcttttttatcatctctatcttttaaatcatttcactgtttcaaaaaaaaaaaaagcaattttctttaaattttcttttttggtaattttatttttattttacgtatttatctatatttttttcctatattactaaaataatactttttttagaagaattattaaaataatatttatttatagtatataaataataaaatattatatattatattcactcaacaaaaaaacactataaacataattataacaatatattaaaatttgaaaatattttagctacaatagctaaacattatttataggaacttatttattatattttcaatatttgatacaataactattaggagtgttctaattaaattaaatttatacaattattttcaaattttaatattgtttttttgaaaaaaaaagagaaagaagtttctggaaaagacgttagaagagaaaataaactcacacgtgacacgctccatgttctggcaccttcgtatccattgttctacatagagattggggcccacctcttttaccttttctaatctattctcttctttcaatttccttccttccttccttccttctcgaaccaacgaatttctctctctctctctctctctctcttatttatttatttattttttaactttttctctttcttaactcccaaagagacttctagaaacatcaaattctattctttttcatcgtagctcgcctatggtttgattttttcgacctgtttggttcctgagaaaataataacaaactacagcaacaataataataatattgagaaaaagtataattaaccttttatattgctttgattgaaagaatcctcgctcgctatctcaggtaattatgatgataataaacacagtattatttatttaattattcataatcaagatacggaaacgagaaaagctttattacgaggatttggttattctgagtaaagccattacgtagtagttgaaacaatggaagcttagatttttttctggtttccgcaaaacgaagcgaggaaattattgttgttgatattatttaatggataaagtagcagaggaaaacctaagtaatttgtagaaaaagttgatatcgttgagttacggttgagatctgtgagattgagtctgggctacatggcgccattgccagtcgaacagattggggagtcgggacatagtggtagcggcggaggcggtggtggtggttatagcggcggagggggtggtggtggtggctgtagtggaggagcagactctcagaggacacttccgacgccatttttgaccaagacttatcaactcgttgatgatccagccgttgacgatttgatttcatggaatgatgatggatcaagcttcatcgtttggagacctgctgaattcgccagagatttgcttccgaagtactttaagcacaacaatttttctagcttcgttcgtcagctcaacacttatgtatgaaagcctctttttctatttttcctttatcactttctcgtctgccaaacagtagaatttcctgacactttttgcttgtgaatttttaatgtataattttttaagggatttcggaaagtagtaccggatcggtgggaatttgcgaacgattgtttcaggagaggagagaaaggactcctccgtgacattcaacgacgcaagatctcgcagacgggaactgctgcagctgctacagctgcggcgg

SEQ ID NO: 19606 - DNA, 8254 bp, Cannabis sativa
  modified_base (5160)..(5160): a, c, t, g, unknown or other
  modified_base (6589)..(6592): a, c, t, g, unknown or other
gtaaaataatttccaatagatatgccatttttgcaacgagcgatttcaaggcctaagaagaatcgaaggggaccaagatcttttaatttgaattggttgtttagagaagagatgaagtgttgaagatcggtggtgttgtggttgccacgataatgtcgttgacatatatcattaagccaaggaatgtgtcatgcgattgttttatgaaaagggagttgtcattttcggattgagtgaagcgttggttaagtaaggcagtactgagcttggcataccattgtcgagacgattgtttgagcccatatatgcttttctgcaacttgcagactgcatttggagggattgggccttttggtttgtaaccttgtggtaacttcatatagatttcttcatggagatcaccatgaagaaatgcgttgttatgtccatatggtgaaggtgccagtgttttatggcagcaagtgagagaagtaatttgaaggtgttaaatttggctacgggagcataagtttcaaaatagtcaacaccttgttgttgagtgtagcttttggttacgagtcgtgctttacatcattcaaccgacccatcaggattaagtgtaattccataaacccatttgttactaattgtgtgttgtccagggggaagaggaaccactatccgtgtttcattttctttaagggcatcgatttctgtgtccatagccgcattccaaactttttctttacaggcttgtgcaaaggaagtaggttcagtaatgcaagagatggcaagagtagcaactctgaactgaggggagaattttttgtatgacagatagtttgtgaaagggtgtgctgtgctagatggggtacagttgtaatcctgtagataagcaggggttttgattgttctccctgattttgttgttggcgattggtgaaagactgtggaggagtgatggaggttggttgggatgccacattggaagattgttggtcattgttgctagtatgagatgagaagaaattatcaatgtgaggattatgagtggtttcttgtaagggatatatagactcgtaaaaaattacatcttgtgagtagaagatgtgtttggtctcaatatcaaggagagtatatgctttcatatggtcgggatagcctatgaatatgcaagctttggcccgaggggccaatttgtgtggaatttggatgttggaggcatatgcgaggcatccaaagtttcttaagtgtgcatattcgggtggctttttgtgaagcaattcaaaggaagttttatccttgagaagaactgatggtgttctattgagtaagtagacagctgttttgaccatatagctccaattgggtaggggtaaattggattggaaagctaaagctcgtgcaacatttaaaatgtgctgatgctttctttccactgcagcattctgttgtggtctgtctacataggagtggaagtttgttgttccttgttgtgcataaaaggtgttgagagttaattctttggcattgtctgttcgaacagacttgatttttcttttgtaattgacatgtacaaaggtgaaaaaaaaattaatgacaattggagcatcaaatttttctcaaagtaagtatagtcatagaatggtcatccacaatggttaagacgtatttgtatccttcaatagaaggtatatgatagggtccccatatgtctaggtgaatcaagtcaaatatatcttgtgaaaaattattgtttgagacaaaaggtaatttcttttgtttcgataaatggcaagttggacagtcatatgattactgttgaaatcagtaggaaaattcaattgtttattaattttatttgtaatgagtacagatgggtggccaaggcgtgtatgccattggtcattttgtgattttacattacaggaaactgaattagaaatttgactgtagagtgtctcttgctgtatgtagtagagcttgccaattttatcagctgtcccaatccacaatgtccaagaaggtcctgtatttgacaatggttagaagtgaaagaaagatgaaaaaagctgtcatgtattaagctactaacagaaagtaagtttagtttgaacttaggtacatataagacattatagagagttatagctgaatttatttttactgtgcctattagttcaatgttaacagttgtagcattaggtaatgtgacagatctgtgtgtaatagatttgtttattgatgaaaaacaattgatgttgcaacaaacgtggtgaatagcaccactatctataatccaagaagtgggagataaaggatcgtgtttaccagtgaagttattgatggttggaccatctgaagtggaagcatcattggtaggttgtagttgttgagtaagcattgatattagttgttgacattgagcatgagttaaaggggcttgctcatttgtgttggcaaagacttgtgaagtttgagggatacttcgagatgtggaagctccatcagttttttgcgattatgaggagtggtgttatcattgtttcttggctttccataaccaggtgggaagccatgaagaaagtaacacttgtctttgtaatgacccagattttggcaatgagtacaatggggcctaggtcgtttgttcttggagactggttagccatgggatttgtatcaagtgcaggagttgtattgctggtgtgatttgcagctacagtaatgggtggtgggggtcgatgtcctaaggttctttgcctttcttgatgaataaccatagagaaaaccttgttgagagaaggacatggatcaagaagaagaatttgatctcggattgcatgatatgattcattcaaacctttaagaaatcgtaaaacttgatcatgattgatatgatcttgagattgggcagcagctgcacaagtgcaattgattcgaggccttaactgatttatttcatcccacatggttgttaactttgtgaagtaagaactgacagattcttcaccttgatgaaggtaagtcaaggattcatttagctcaaagatctgaggaccatttccttggtctaatcgattattgaggactgtccacatctcagaagcagatacatgatactatttttgatttcatgggagacagaatgtaatatccaggacattaccatttggttgcatcgtgtccaagaactgtaaagagaatcagatggaagaggttgaggtaaagtaccttcaagaaaaagggttttatttcttgcaccaatggagagtttgaagtctcttttccagggttgaaaatttcgatcagtgaggagaggggttgccaaggcaagacctggatgatcagcattgctgaggtaataaggagatcgaacgtcttcataagcaggggtttcaattgaatctgatcgagggcctggaatgggtggtgttgattgaggcagagtgccaacgaaagtattcgatggtggaggagcggtggaagcatcaaccactggattttcaagatctgtggaagtagctgatgaagtcgctcgggttctcaccattgttggaaccttgttgaagctttcgaatgatcttgaagaagcttgaactggtttcttgcaattgtttgtactgataccatattagtggaaaggcagagaagaaacagaggaaatgaaagtcatcttttattgaatgagtgaaaagtgaattgaattaattgatacaataatgttcagctggacttatatagcagtgtacatcaagtaacagaaaaaactgaataataacagaaaataacgatctaagaatctcatttgttaagcgaagtaatgctatgcttgcttccatcattttcttcatagataattcttcagaaaaaccctacttttgttgtttatacattatatttattaagaaaacatcttaccaatttgctgcacattctatatgtagtctgttttttatatcatgcatttaatatatagggtaaatactattttaaactttgtgttttacaaaacttatcaattagactatatgttttgtttaacaaaatagatcctatatttttcaaaatggtacaaataggacccttaactaatttttttgttaaaataaaatttaataataatccgagctaaatgtgttataaaaaaattgtttacattttctgtatttattcttattaagaattgtcttcaagttggttgtattaaaataaaaaaaaaaaagttttcgaaaattatgctcaaggtcttatttttaccattttggaaaacacatggtccattttgtcatttaacaaaacagagggtccaatctgtaacttttacaaaatatagggtccaaaatagtatttacccttatatataatatgtaataaattaataatttactacatgcaaataataataataataattagaggtttttttagttttacattttaaaacaatttttttatttttacagaattctacataaaaatctttatagaaactaacagagcaacttaaatcgcaaccaaaattcacaaacaatccacatagaaactactgaagaaaccaccgaagcaacctaaactgttaatttgataaaaaaaaattaaaaaatagtatataaggtaattttcataataattatttacttaagatataactaataatatatgttaatattagttattttatattttaaaatattttatttactaaatgtaatcattattaatttaaatgtttaatcactatagcattgttccacttcatccaataaaacttttaaaaacgagatatacgataccagtagcgtttaacaatacttaaggtgttatattatgtgtttgtttattttttttttaatttaaacatttatatattacaacgcataatttgggattcgaatctagatttttaatacacacatactctcttatggctacttgagctagtcttaagtgtgatgtgtttgttagtaatcaaatagtgataatttttaaatgcatgtaatttgcagcataacctccttaagtggccaggtttttgcaactaaccccaattctaaaattttggtggtaaaatctcttaaatccaagttctgttagcacttagccctttccatccatttttggctgttaactgccatggtggaatgtctacgtgtacacaatgtacacgtggcacaattntattggtccacgtaaataaataatccaacatagcactctgtgtccatatagataatcgaacatagcacttaataattaaatttggatggaaacaataaattgctaacaatattttagtggttaagtggaagcaaagagaaagtattgagatttttgctacaattgactcaacaggttcaacaagtttttttgccaatggatgtggacaatattttctattccattagcgaggcatggggtagaagatagttagtgctgacactatgatagagacggggtttataatgttaagagtggctacgctttggcgtggtcgctccaggttgaggtgggagttgcagattcatctaggttaactcggtggaatggtgtatgaaatcttaatataccaccaaagttgtttgacgtatgttccatttgactttaccagtagcaacacaacttatctctcggaaagttcaggtaccactttactgttcacgatgcggagaagaagctgaaactcctgagcatggtctattttcctgttctagttttattctagtgtggtatcggttgggggtgtggtcgatgctccgtcgctgtgtatatgggccaatgcaagaaattcttctattctatttgacagattatcccgtaatgcttttgaattgatgatggcaactatttggtggctatggtatgacagaaactcagtgttaattagaaataaacagtcaagactggatgttgctctagatttagcctataacgatcagtcagagtttaaggagtatggtcggagaggccttcattcgggagggggccttgcaaatcctgttgtaaaccgacctactcgatggatgacacctcctcctgattcttttgctctagcaatggatgctttggtggttccggggaggggctttgtcggattagggggagtgatactggatgcaacaggggtagtttggttggcatgatcatcaggggtgttagatgagttttcggataatgtggcgaagttactttccattcgtctgggcttgactctagcgcatcaatttagttttagtatctccattactaatagtgattttactgtgacatttggttggattaataagcttcacattaattttaattttcaatctattattagatatttattctttattagctaatgttcgtagaggtgttcgcggtgcgggtggtgcaatttttgaccatttttccaaaccaacccgcacatgcagtttttccaatttctcagaccgcacctgcacaacgaaattaaaaaaactgcaaaaactgcactgtaaaaaattgtgcggggtggtgcggtttctgcggtttggactatcaccaataattaaactattacaaatacaacaaagtttaagtaaaacttgtcaaaaatattatgaaaaaaattaagtttcaataatannnnaattagtgggctttgggttggacattcacatattggagctaaataaatacaaaaattggtatttttataatgtgcggtgtggtacggtttgaactgcatattaaaaattcaaaactgcaaaccgcaccacaccgcgcagtttaggaaaaattcaaactgcgaccgcaccgcaaagaatttcaaattgcatttttttacggtggcttgagcgttttgatgaatacccctaattgtaagtggtggtttttgtagcaccattccgaaatcgacaaatggtgttgcccacacactggcaacctctgttactagtttaggaaattatgtttggacagatgcttgtctacgattttcgagttcttctgtaatagcgaatttatcttaatgaattaagtatttctttttttaaaaaaaaaaaaaaaactaagattcatgtctatgtcaacatatgaaacaacagcagtggcgctcagcaagaaaaaaaaaagagaacaaatgaacgaaagtatggtaaagaaagagaactttgacctgcattttattataattactcctattcgggtagtgaaataaaaataatcaattcacagtgaggttaagtaagaaaatcttaacagaaactcaactcccttcaaagtctccctgctggatcccgggactagaatcaggagcgagaagttcgtcgagagttgaatgaatctctggaaagaaaggtcatttactggaggcaacgagccagagtatcttggctcaaggaaggtgacaaatgttctaagtttttcttcctagcggctgctattaaaggaagaagaaatgccattgagagtattttaaacaaagataatgtctggatctcgggcagaagggctattgggggtgaatttataaagtattttaaaggtatttttgccggggttgacaatgatgttgagtacaattgtgcccagttatttcaagagagaatttctcttgaggattcggaggctctggtttgctgcccgagtcatgatgaaatcaaaagagttctatttgccatgaataaccataaggcctcgggccctgatgggatgtctgttctgttctttaagcactattgggagtcagttggacaagacttctgtgatgcggttttagatttctttgtcactggtaatatgcataggggaattaatgccacaaatgttgtgctcatccctaaggtccaaaatccgactcgaactactcaatttagacctatctctctatgcaatgtggtttataaggttatctccaaaattattgcaaacagaataaaacccctgcttcccactcttatatgtccgactcaagctgcctttgttcctggaagaaacatccacgataacaatgtgattgtccaggaaattattcactcgttcaattggaagaagggcaaggaggggttttttgcaataaaaattgatttggttaaagcctatgacaggctaagctggaaattcactgatcatgttttggagtgcaatggaattccccagaagtttcgtcggtggatctcgcagtgcatctctaccacctcgctcaatatttgtctcaatgggggcccggtgggtagtattaaccctacttgcgggattcgtcaaggtgaccccctctctccttatctgttcatctgggctgctgaagttt

SEQ ID NO: 19607 - DNA, 2050 bp, Cannabis sativa
acaataaaaatgtaaccattgaaacctcttccaatatatatttattaatgttcaatatgatgaagccagcccaaaaatttatggggcaatatatctaagaaaaatattattaatttttatttttaattaaattttagatgtgatcttttaaaaaataaaaacaatttggggccacggcaccctccgacctccttttagctccgttattgtaaatatttatataataatctgaaacatggactagatcaattagatgactatgatgcaagtgttatatgctgataattaaaatgttagcacaagaagacgttattgtaccctatcgatactatattatataatatcattgaaagtgtagtgtgcttatcaatcatgataaagtttcttatcactagaccaaagttgctttaggccatttccaaccatatataatttcacacaattttgtttttttgttgtaattttacactttatttttaaattaaaatagtaatatataaatatattttttaaaaggctaatacttaccaccacacactttttgtgttgaatatagagttggcatgagtcggaaaactttttgagctattacagctcaacaaaaattgtgttataccgttaggttggttggtgtaaaaacatatagatttgtaacaagttattttaactgtaagtgatatgctacagaaagcttatccatagttaaattctatatcaatgtcatcaatttcacttttgttttaaaccttaaaaatatgaaaagctattatagatttattgatggtaaattgaatgttattatatattcccaagtatagaaattaattaagctagcgtttgtttctgtatttggggccataaagccacgcaaggaaaacaaaaacgttatcaacatgttggagttcccttcctattgtggcaaagcattggtggtgggtctctttgtactcactatatttctgaaaaagacttttatgagagagaaagagagagaagatagagataagggagaaataatttagctcacatattacatgcatggataaccacactaggtgtgccttgtggtgaagtgaatgattacaatttttgtgaaatcaaacacatctcattaattaattttgttagtatttataaagctaattaattttgtcactacatctttttttacaaattaaattaaaaaaattaagtttaccttaactattagtagctaatatattaacaaagaaaaaaaatgaaaaataattttggattgaaatcttttaagtactgaatgtggtggcttcttagtcctcatgttgtaaaccaatatgttttccaaaagtgaaatgtttgtcctcactttagtcatctttatctttatcttttgatcattatcttatcaatcctagtggtacatatattatgccatttatatagattcttattcccttttttttcctttacttttcatttgaatacctacaaaagtagcctttcaaatggaatttgcacatttttagatgcttgctatatacatgattattcagcaattataaataattttcttctttttcttttgtactctattattatatttttttaattcttaattattattattctattttgatcatgaaagaaaaataattgagttagaaaagctttgtctttgaagatgattgctaaccacacgcaatctgtggtgtagttgttgctttcacttgatagaatcactgtatcaattttcaatgaacctagctattttttcctttgatcagaaatagacaaattttaataattaattaaattaaatcccttccacgtgccctaaatgttaactaattacacacatattaaaagcaccacaaattggtgatcgttttatgtatgcataatatatagtttaccttttgagttttgtctatactactaattatttggggtcaacacgttaggtaagagatatgtaggcgtttctatggtgtctcaggccattcacattgcattaatgatgtttcttaaattagttgctaatacataatgtgattctattaataattgcaac

SEQ ID NO: 19608 - DNA, 2841 bp, Cannabis sativa
tttttttttttttttgagattttaccaggtttggaacccttggcctctttattttattgggctgaccaacctattttcgttcggtcatatgtactgtggggtgcacgtgggtttgggtaaactataaatcatttaatagtccaactcaatatataattacggtttggataaattataagtcatttaattttttttattgtacaactcaattttagttagtataataatatagggggttgaaatgaatattttaaactttaataattatgttactgataaaattattcaatatattgcatacaaaaaaaagatatatatatatatatatatatgtatgtgtgtgtaatatagtgcatttaaaaaaaaaactaaagtagtagtggtatcagtgtgtgagtatcaaagttaataatagtgattgattttcacattagaattgttggtagaagtagtatggtaactataaactacatgttagtgatgtgttttggttaattcatgttctaaggttatcaacttatcacaatataatttatatatgtatgaaaacgtaaaatatatatttgtatatattttgtgaatgtaaattaaatatatttgatgtatgaaagttgtctcaaatttagaacatctttcaagaaatgggttaggtttggattatataaagttaaaatgtgtccaacccataattatatatctattactttttaacccaaggagccataacctactcttaacataatcctttactaccaaaaatagtttaaattggcggaatttgatggtttgactcatattttatacacccctaatgtgtagattggtccaaaatactgattttgtaattgtaacttaataatattattgatgcattttaaaaaaatttagtaactaatcgcaataaccaatagcaatgctatcagagaaaagaaaaacaattattagtttttttttctgttgctgatatgcagaagaagtattggttaaacttacatataaataagaaaaaacaaaaagatgaattaataaagttacaatataaaaataaacttgtttatcaaatttattatttgtgatcagtcgttgctgtagaataacaatatataaatacttatttggcaggagcataagaaaaaggtaagaatccaagtggttgattctgaaggagagcccttagcaaacacaacaatcagcgttcaactaaagagagcatcattcccatttggctcagccataaactataacatactcagcaacacagcctaccaaaactggctcacatcaagacccttcacagtcacaacattcgaaaacgaaatgaaatggtacactacagaaaagactcaaggcaaccttgactactcagccagcgacgcattgcttcaattcaccaaacgacaccgtatcgatgttagggcccacaacgtgttctgggacgatcccaattaccaacccaactggctcaactcactgagtcgaaaccaactcgctctcgccacttatagaaggcttcgctctattatgatgagatacaaaggccaagtcatagcgtgggatgtggtcaacgagaatttgcactttgactattttgaaagacgggttagtagaaatgcttcgggtattttttatagatggggtaatgaagctgaccaaacgacgccgttgtttatgaatgagtttaatacgattgagagtagtggtgatacgacgtcgtctccttggagatatatcaagaaactgagacagataaaaaagtttagtagtaatattaatatgaagatgggaattggggttgaaggccatttctctgcgaataaacctaatattccttacatgagagcagccattgatactctcgccgctgctagattgcctatttggattactgaattggatgttcaatccactcccaatcaggtaataataataatatacattttcacatataataatagaataaataggatttttttcccaaaaaattatgaccttgtagattttttgcaaaaaatttcatcccactattcaaatctttccaaatattctctttattttttagaaacagccatagcctacacacttaatctaataaaaattaatattatttttagaagtaattaatttgaattataaatatctaaccttaacttcaaattacaaataaataagtaatttaatttttagcgctaataagatctatattatattttaaaatattactctatttatagtttaaatatgatattttatatcttcaccttacatgtacttgttagatagtttaaatcacaataatgatattttagttctttttcaagaaaaaataataaaagtatacactgttgaacttgtgaaaaattatttgtataaaggttcaaattaaaaatttatttaaacttaaagttccaaataacttaaaccggccctaataatttcagctacctagtctacatttaactttgccccatattgtaacaaatatacttagctacttaatattaccattagtaagatcagtcaatcttaatagcacaatctacaaaggttaagagaaaagaacgtattaaaattgattctgactatatcgttatatctctcaatatctctaccagtcactacaagtccataaactctcaatagctctatcagtcactacaagtccataaacatggtatatgacaatgcatgtaaggaatagggtatggtcatttgagtgtctttcatgcattaatttttgttatgacacaatatataatagtgaaatgcattcaaaaaaaagcttatttaaacctatattaatttcttaaaaggattgttctaattaataatttttgtattgtt

SEQ ID NO: 19609 - DNA, 6917 bp, Cannabis sativa
gaatgaatatttattagtttaatttttaatttattaaataaattttaaatataggtccatgtcagcaggtcaccatcaggttgcccttccaaacgtttgaaaagtaaaaaggtgaacttagcctagtcagtaattatcaaccattagattaagatctaatggttaaaaatgagggtttcatcagtgggtatatatttcagtttccattaaaaccggacccatatatatatactagatagatgttacgttccaagtctcgtatgttaattttattttagtttttagtttttttttaatatcataatttaaaaattaataatattcaatgtaggtatacagatatacagttgtagtcaactattatatattttaagtcaaaattttgtaggtacaactataccaacagcatctacataataataattaagctgaggtagatcttatttaaataaatgaatatacataataataatatttaaaatttaactaattctaaatatcaaattttaaaaataatttttaataaaaaaataaacaatatgaacaaatttattattaattgcaaccctttaggtggttaattatatttaggtttaactaactacatggatgctgactctttatgtggcaacatttaataatttgttattttttttattaaaaaaaagtcacccaataatttttcataaactaagaattctgttatatagctacatattatatagaatatatacatatatatatactagatagatcttacgttccaagtcacgtatgttaattttattttagtttttagttttttttttaatatcataagtttaaaattaataatattcaatgtagtgataatcattgaaatttaaaagcataatactgatttaaataaaaataaaaattagtattatattttctaatagtaattaaaaaaaaaattattttcgtcctaaatttatcttcgaaattaatgaaaatgttcatctggttaaactatcaaaacatttaaattcaatttaaaataatatttaaaatttaacaaattctaaatatcaaaatttgaaaataattttaataaaaatataaataatatgaacaaatttattatatttaagtttaactaactacactatcctttaaaaaaaagtgacccaataatttttcataaatcaagaattgtgttatatagacacattttatatagaatagatatattaagtaaaaaaaaatgttcaagttgttggttaatacaattaactaatttccagttgctatatatacacatattatattcatttaaccaattgtgtcattccttcaaaaaaaaaaaaaccaattgcgtcatattgttctcaagtccaacttggggtgctgtcacagggcatattctattttttttaatatgtctcgtgaggtttcgatagtctcttctattgtttgtatatgttgaagatgaagacgggtgtggagaagaaaatcaggtcgggaaagcttaaggatcacatgggcaggaacggttatctaagtgaagaattttaaaaacaagaaaacagagaagaagatgaaggagatggttaagtgtaatggaggttaggaagagaaaaacaattaaaaagatgactgatacagacacaaaacaagggcactaattgaaattgaaaaaatttgtcttatcaattaattttgagatattctaaattgaattaagagtatatggtcaaaagaatagtattggcgccatattgctcacgatgttgcgtattatccctgcctgttcagtcaaagtaccgttctctttagggcatcttcaatgcaattgctattgtagatgcctgtcagttagtgggatccttccacacaaaaatattgacttttcaactaaaaaaaatactagagtccctcctcaacagctatgtctcttatattctattttttttttttatgtttgattttggtcaatactttatcgtacgttaaattataaaaacagaaaatgggccatatcaaggctgcctagtcgttgcctgtagatgaccttatatacatctaagtagtctgtattatcactccatccattggctcattccctgtccctcaatcattcctaactctctattctcactatatctcaatctgatttttttctattatttgtgatttgagttataataatgggcggcggaggcggtggccctctattattgtggcttctagttctcttcttactttcacattgttcagtgtacaaggctttagtaacagtatccaataacttattgagagaaggcttctctctctccgttgaaaaaccttccgatgttctgacctcatccacaggagtattctccgccgggttttttgaagtgggtcacaatgcatattgctttgccatatggtttactgaggctgacccatcccggaaaaacaacctgacgctgatttggatggccaatcgtgatcatccagtaaacggaaggcgctcaaagctgtccttgctaaaatccggtaaccttgtactgatagacgccgctcaatcaaccgtttggtccagcgatactgcttccaactcagaatcccagttacaactcttggactccgggaaccttgtcctaatctctcagaataatcatgatattttgtggcagagctttgctgccccaacggacactcttgttcctggacaaacactctcaagaaacgcaaagctagtgtcgtctagaagccagtctaattattcctctggattttatatactattttatgacaacgacaacgttcttcgccttctctatgatggtcacgagatttcgagcatttactggccagacccttggcttttgccagctttcgctggaaggtcaattttcaacgacagcagaacagcagtgcttgattcttcagggaatttcagctcctccgatagttttatgatcatggcttcggattatggtgttaatctactccagagaatgctaaaggttgaagctgacggtaatcttagattatacagtagaaaagtactaccatggaagcaaagtagtacgtggattgttacgtgggaagctgttttacaaccttgcaagattcatggcatttgtgggattaatagtctctgtacttacgtgcctgagtatggtaggaaatgttcttgccttcctggctttaagttgatcaaccatgctgattggactcacgggtgtgaggcaaattttgaactcccttgctccattagtaatgctaatcaatctggttttcttcacctaccaagggttgagttctacggctatgattaccacgtctataacgactacaccttggagcgctgcaaaacaacgtgcttggaattgtgtgactcatgcgttggatttcactacaaatatgacaatgttgggggtcgttatacctgttacgtcaaatatcaactccgaaatggataccggacccctggttttgatggagacatatatttgaaactacccaaatcagtcctcacttctcttcacccggctccaaataacgtggccagtaataatttgaattgcttcctttcaggaaatttgactcaacatctggacagaagatatgttaaaaaacaagttagtggtgtagttgagttcgtgctctggtttgcctgtggagtaggaggagttgaaatcatagtcatcttaattgtttggttatttgtcattggaacaaatgaaaattcaagcctggataacattcaggctggttatcttcttgctgcaactggattcaaaaaattcagttacttagagttaaaaaaggcaacaaatggtttcaatctagagattggtagaggtgcgggaggaatagtgtacaaggccatcttgtccgataatcgtgttgctgctgtcaagaaactcacggataccaaccaaggagaagtcgaattttacgcagaggtaagcaccataggaacactaaaccacatgaacttgatagaaatgtggggatattgcgccgagggaaagcataggcttcttgtgtatgagtacatggaacatgggtctttagctaaaaacttggcttcgaatgctttggattggaaaatgaggtgtgatattgccataggaactgccagaggccttgcatatttgcacgaagaatgtttggagtgggttttacattgcgatgtaaagcctcataacatacttttgggctctagttatgagccaaaagtggctgattttggcctgtcaaagctacttaaccgagatgagcatggcaggaactcaagcttctttacgattagaggaactagaggctatattgctacgtcccaagtattttatcggaacaagcagctggtggcaaggtgcttgagctgcttggaaagtaattcctgggattatgcacctgattgtagcatgctaagtatgggcgttcgggaagcatcggggtgcatgcagcatggatttggtgcaagttagcaaactgccttgttttgtcatgctgatgtcaccccaagtggacaaagggtcaaccccaaattgatgggacacttcccatacgcctaagtgggatgagctacttggaggaaaaccatttccttggttttgctttatgctttatgctttaaagatatttgttggctgcctatttaattaaggcattactcttgtaaagttttagttgcatttcatttgtaaaggacccccatttttaatacagagagagtttctttggttagccaagtgttcttcatttgttcttgttgttcttcatatttttctactgcctttgttgtttcgattgttgttgcactctgttggttggctgaacctcgcaagcggacctgtggggtgccgcacactccttcgacggatcgttcggagcgtgtcaagtggtatcagagctggttaaaggtagagtacccagaaaaaacatgacggatcaaagcgccattgaaacaagttcaaagtcttcgaagaagacgaaggagaccaaagaaaaagaaagagatttgagggagacagttacagatttggaaaagactctaaagaagagtgttgtgcttgctaaagacctagatactcgggttgaaaatgtggaaaagaagcaggacgagttgacggaagaactcgccactatccactcgctgatcccgggaaacgtccaggagcacgctgctgttcttcgagcggaagttgctactgtccgcgacttgttgatgactgaagttgagtgtttgcgtgggttgaacaaggaacttcaggacaagaatgaggaaatagagaggcgccacagagatgagttggtgtcctttacagcacggctcgacgaagtccaagcggatggggcaatgtgcaagcgagctgctgcggggatgtgaggaggcatcccaacaattcagagactcaagattcccaagcctaaaacatttgcgcgttccagaaacgccaaagaggtggataatttattgtggggtttaacccattattttgaagctacacatattactgaagaggcggttaaaatccgtacctctgctatgtatttaactaatacagcgatgctatggtggcgccgaaggcatactgaaattgagaagaatttgtgtgtgatgaattcttttgatgatttcaccaaggaactgaagattcagttctaccctgaacatgccgaggatgatgctaagagtttgctgagaaagttgaaacaaactggtgggattcgtgagtatgtgaaagagttcaccaatctgatattggaaattctgaacctgactcaaaaggattcgttgttttattttattgatggcatgctgccatgggctagaacagaactgagaagaaggaatgttactgatctctctgctgccatctcggttgctgagagtttgactgattacactacttcgaagggtgctgagaggcccaaggataataaaatagtggggtcgagtaagagtgggggaggatacaagagtagtggtggtgccactgctgctcagaaaggaaaatcaaaggtgccattcgacaaagctaatgtgaagtgctttatttgtgatggacctcactgggctcgggaatgcccgaaaaagaaggcattgacagcaatggttgctgccaatgaagtggtgttggagaatgagaagaaacaagggcctggtgcgtccttgggttctataaaattattgaaagctctcaaagcgtgtccacgaacacatgagaacggtcagatgttcgtagacctcaccctcaacggatcgaggacgacggcccttgttgacactggagcttcccataattttttgtcgagattgggtgcaactaaagttggagtgtcaactgctaacgaaggtggggtcttgaagacagtaaactcgggaccggtatcgatcgatgggttgcaaacaatgtcaagaccagccttggtgcatgggttggtcgaacgaattggactgttgtcaatatggatgactatgaagttgtcctaggaatggagtttctgaaccaagtgatggcgatactcattccacattccaattcactatgcataacggacggtgcacagcctgtcatagtgcctactatgaaggcccaggatattgagacgagatctttatccgcactacagtatgggagggggatgaacaaacagagttgtatcaacttcctggctatactgagtgaatttgacgatgagccacttgcccctccagtagtggaactcaatgagatacaagttgttctcaatgagtttgaggatgtgatgcctgatgctttgccaaaagggttgccgcctcgacgtggtgtggaccatgagattgaactagagcctggtgcgaagccaccggctatgtgtccttatcgtatgtcacctttggagcttagtgagcttcgaatccagttgaaggagatgattgatgctggaatcatggaagcctccaaagcgcc

SEQ ID NO: 19610 - DNA, 2827 bp, Cannabis sativa
aattgtggagtctcaaactcctaattacaagaaccaaaccaaacacaaagaacaataacaaaactaatcaatgaatgataaaacataaagtagaaacaaaattcgaacataagcatagatttgaacacaaagtttacatagtcgggctacacaatagggatgatcataagctttatccacaggagaaagtaaccttaaataacttttcatttgtatatttattaatgccagaatagatgttacaaaaaagagacaaagtccttgactcaatggagacttgctccttacacaaaacctcacttgagacctttcaatcaaacacatgagaatgtctatttacaaccctccagctcacactttttctttcataatttctcaactgaacacaatgtatgtgactactatttatagtgtttgcacagaacacactaaacaactaagggcataactggcttaactgtcaaatagttaaattagttgaggtgtaacacaattgttaaaacagttgataaaaccagttatttgtcaccttaaggtatctcttagcatttttctataataatagttgcacttaagtacaagtatagttaaatattgaaaaaatatgggtacttagatgcaaattttaacacacttgtaagtttaccgtaaaaaaaatactattataatttaagtaattttgtctcaaataccccaaagttgtaagtacccgagttactttgggtactgaagaatgcaatatggcaatacaaacataatctttcctacttcctagcacccagcagagacttaacaagccttttcaatttgtaggcattctagagcaaagagattctatggccagtcagcagcacagagaggaggactagagactggagagatagagaaaaagtaaatatttatatgttattaaaatattaagcatatcgacgttattgtatatacaacacactttcttgttttgtttaatgaggtatatagtatttatttagaagagcaatttataatactgaaaatagaattgaaacatactattttatagaccagtttgaggactaattttgtagaagaaacaaaacaggaagaaagaaaccagttgccaatgtgactaacttaaaaaacttacagataaacccgtacttcaaatgaaaatgaaatcgaaacaatatccctttttacataattgcatatatgattaaaatggattttggtttcgtattcatcaccaaatggaagaatatcgtgacctgacactataatttgagtaacgtgaggaagaaatcttttgagtccaggagaaataaatagcaaaagaataacactactttcaaaaaatactaacagtaacattttttttttctaataataaaaaaaaaaactaaaattttccttttccttctgaagaatcacattacagattgattttgtctcttggtcttgggtgaatgcgatatgatatgtttgaattaagcccaaactctttttctaggggcaagatctgaagtttttatctcatctaatttggctgctacaatgaaatcattcatgctcaatcctcctgcaacaaacaaaaccagtaaccatgtaagaaagcatgaaaatttggccatcttagttaccaaaaaaggaagaagagtttgatacaatgttaaaatgatacttaaggagaacaaaattgacaagttcatgaatgtgtttagtaccaatggaagatgtccataatacagctctaatttgattaggctgttccaagtggagatctggaaaatggcctgtactttctacaactttgtatatcctattgataagttcaataccacattgatagtctcttaacttccataagcattgtagtttgagattcccttcttcatttattagtctccaaccaataacctattcacaaaaagagcataaacaaatctgattaaaacaagaaccaaaggcatacattatacaaaagcaaaattcacaaatgagcattagtaaatttacttctgactaataaaagattgcagaaccaaaagatgatagacttgtgtctttcctacctatacagtacccgaaaaaccaaactacttcccaaatatatatacagtcgaatttcaagggtaagtgttatctgtataataaataactacttactatttatttattttaatggtttttttttggaaaattcaaatacttaaaaacaagctcaaaattaacaaaagctatatccactcagtaatttcatcgaataccattcaatcattactaatagaagataagaattgggaaattgaccttcttgagaagtttcgtagcctcatcctctgacatgggcggttgcataggagagacataggggtcacactgttgctgggcgagagagagagcatccaaattggggataaggattttgtgctcagtgctaacgttgcccagaactttctctccgaattggctttccagctcggccgggaaagggtctctggcaccgaaatctcccaacatgtcaccacccatagctggaagcctaaagccgagccggcttcgagtggaaacggagaacaatccagtgggtttgcagtgagacggagtatgggataggtggggaagacgtagtgggaaggagaggtgggcggtggccatggctgagtcagtctttactgagctgttagacttttgtttggattatcgattattgacgtgaaaaaggcttatcctttctcttcaaagtaatgtaggtaaagataactagtgggtggtgcggtgccatgtcatcaagattgaatccaacacgtggcacctacctacaaccacaggtttttttttttttttt

SEQ ID NO: 19611 - DNA, 3167 bp, Cannabis sativa
ttaggcctattagtctttgtaacatcatttataaaatcatttcaaaggttattgccaataggcttaagactgttctcaataagctcattcgcctcaagcaaagcgtcttccttctcgatcgtcttatctggaataatattattgttgcccaggaggtagtccatgccataaaacaaaggaaaagaggaaagaaagacttgatggctaaaataatggaaaattttgggtttccccaaggttttattaacctggatctctactgtttcttaccaatgtaatcttaatggtagagtcgtgggttctgtgactcctgcgaggggaattaggcaaggagattctctctttcccaacctttttctcttgtgctttgaaggtttttcctccctcatttgtcaacctgagcaatctggaaatattaatagtctaaaaatttctcgtagtagtactaccatatctcatcttttcttcgctgatgacagtattttgttttgtcatgcaagtatccaatcttgcaatgtggtaaaagagattctcctacagtacgaacaggccgcagggcaatgtgttatcttaataaatcatctctttacttctcacaaaacactaccctaagggatcaaactcttatctcaaactacaagggcatgcttgtacaaaatgagttttagaaatatctgggccttcttcaatgcttcggaagaactaaaaaacaagctttaaattacatcagagagagagcttagaaccacgtctccaattaggctcacaaatttttcatgaaagggggaaaaagaaatctttatcaaagcggtaatgtaatctatcccctcctatgccatgtctggctttcggctcccagacagtatttacaagtctcttgaatctatgattgccaatttctagtggggcacaaatgctcaaaacagacctgaaaatcattggcatagttggcaatgctttgcaaatcgaagaaaacttgcggtctttgcttcacatccctggttcacttcaatcagaccatgctttccaagcaagcatggcatctccttacctagccaatttcttaggttgctcacattcttaaggcaagatatcatcctcattctcctttcacagatagaactactgggccgtgccccttcttttgtttggcaaagtattagctgggagaaatctttgttgaaataaggactcattaaaaaaagatggtcgttgtcataatatacaccctttgcatgattatcagatccctaacgttagacttttgcctacaattaaccctcctcctacccaggttgcctactttatcaacagaaacatgacctactcaaccgtttctttcctgctgatattgttaatgatattttagacatcctactccatctaaaccaaacctaagataaccttatttggtaacatacccgttctggtatttatactgtcaaatcttgttaccagctaagcttcacccttgagagtgctcaacaaactcccacaacatcacaaccctcggcttggtggtccactttgtggtcgtttttcttaccctctaaacttaaatactttgtttatagggccaccaaaaatacactccataccctttcaaatctttttaaaaggaaagtggtggcatctccaatttgttacagatgtaacaatgggctagaaaatatctttcatgtcttattttttttctctagtgtcagatagctttggaaatgagcgattttttacttgcatctcaaattttctaaacacaataaatattttgatttgattataatgcgcctttccaatattttaactaaacaagaactagagttttttgttagcatgtgttggctcatttggcataacaagaacatgttctttcacaatggcttcatggggcatcgtcataatcttttttatgaggctagatcttttattgacaataataaccaagcaaggatgaaagatttgaagaacaactcaaaggcattggattactctcttacaccagatatttcgacccctcctccctctggccttgctaaactcacaattgatgctactattgataggcgatccaacaaatcaggctttgctggagttcatcaaaacaatcaaggggccaccatagcagccattgatgagcgttttacaagagttagggaagctcacattcaagaagtaaagactctaatcatctctctttaatagttcaacaaagaagaattcccaattcatttcatagagaaagattgaaaacttaagttgatgcaagtacaaatccttcaaatatcaatacagtttttggagatcttgtcttccagctgaagtcacttctatccctctttccaaatgctcaactttgtcacattcgaaggacagcaaaaattgttgcccacaacttagctaagaaggctcttaggcttgaagaagatacttggtggattggtgataggcttgttgctgctcttcggttctctaagttttgacagcctctttactctaaaataaatgatacctcctaatagtgtaaggaaccactaatatctaatatctattgaattaataattagattttggctggtttggaaagtcgtataataagggtcgtcgtattgtattattacataaaataatactatgtttggataaagcaatgtactctattaattattgcaacaaatttttttaatacaatgtatgttgtattatctaatacataacaaatggtatgtattagattgtaatataatatttacaaaggatttgtggtcaaccctaatctccgacccggacctaaactcgaactcgaacccaaagtcgggactcggacccagacgccagactcgaacccgagacacaaatcgggaccaagacccagacctaggacacgggacccaaacttggacttggaactcagatgcagacccggacatggacctagacccgggacccgaacctagacccagacctaaacctggacccagacccaaacccgaaccaagactaggacctggacccaaacctagactttggacccagacccgaacttgggactcggacccgaactcgagatcggacttggactcggagccagagctagacctgaacccaacattcagagccggacctagacccgggatcgggacccggactccggacccaaacccgaatac

SEQ ID NO: 19612 - DNA, 3654 bp, Cannabis sativa
agacttgtaaaccgtctcctttatcaataaatgcaatgacacgtgcctcgggtgtgggtaatatttacgatcgccatcattggcctttatttcttttgcaggcaatgattcatttcccgcctactgacagacccttccatcaatgtcggtgtcaaagaggtactcaaacgtttcaatcgcccttttccttcatcatgctctttcatcttatctgttggatcaagggattcgcgaacccccactgtacgatggtgttcactcgacattgcctcgcaccccaaatggtctataaaagccaacacttcccctaactaggtgatttctactgcccttcaatttccagattttcaaacccattcgacaaaattctagacgcccttaattttctctttctcttcccttgccgttgtcaagcaaagtattaccatcacacaatgccttcgccctcaccttgcctttattgtgtaagttctttctgcatatgtatatattccttttcatctgctagggcaagtaatgataacaatgtgtaggtatatttgctttgtttattttcttcgaaaggatggccatggtcgtcgttagtgtaacgcctcctttggtgggcgttcgattgacgcgtgtctttctttatgactacagtatgtgtccattattttcattatgcacgtattgcttctcttcttttattttttgaaaatatggtcgaaatcagagggtttttcgtatgcccctttctggcagttcaaagttgctcttgcacacctatattttttctttgatttccttgtgttgcttggatattttgcacccgatgtctgtctttgtgaatcttttgattcctttcgatagtcatccggtgggggcctctttccagcagttacgggacccccattcccatttttaacttagggtttaatgtgggggctaactgcaggatttcttattttcttttcagatgagcgaagtccttcgcgatcttcacaaacatggtgtccttgggttcgaccaagaaatccttaatctccacaaagcttactctatgtccctccccgtagctaccggaggaaaatcttgcaagaaggggccaaagaagctagccaccttggaggaggttatgaaaggcctgatcatttataagaagttcgcgtgccgttctaatggttgggaggctgacgaactctattcaacattgatttgtgcccatcaattggagaaaattgtcactgtagttgggactaagccttctagctctggagtataccaccgtcttccgaggacaaggagacgccaaaccacaactacaacagcttcagagcctggagccagactcatcttatgtctagggccatgctacccctccaagattacttcattgacttccttatttttgttagattttcaccctaccagctgattccacaagcgtactgtctgttattaggcctttttattttttatgttgccaggggctaggctgcacccagctctactgaaattttgtatttttatgaactattttcggtccctaaaaagggggacaagtttaaggatggcttttacaaactttaggcccatccggtcaacgagactccggtaccctttaattttcagagtaatgtaaaggagtatcgccaaaggtttttcttatcttccgcgttcaaagacttcgagcgatctgatctattaatagactgggtcaggatccccccatgcatcgtactgcccccacccaactcttcctaaatcacgcacaggtttttgccaattacaagaaggaagacttgaatgtgggtgatctggtaacgatggtcaactggaggagggccatgttgattctagagagttagtttgtcgatgacttcaacttgtccaaggtcctttgccccaatgcctagataaggtgttccaggcggacattatttcatccgcagaagataaatataacaagtatagatataagagggagcaggattctcgcgtatgcttgcctgtaggttgcctccgggagggtctcccgggaggaggcagggaaggaaaaaactctagttcggcctaaatttctgttcctagtctcaaattcggagcccttgggtcaagtacctctggggcctgtaagtctcctttgaatattcactttgctctttctatccaggactacgctaacttaaggctagtggaattcgataaaagattgtataaattttagatgccccattctcggtggggtgataatgccaacaacttttatttctctaacttaagtcatttcttaagtcggtcgcggatgggctctggtcttcctgtgccaatccttttggaccattcctcctacctaaacacaaggttatttcttccttcagatagctttttagaagatgacgacaccagctttttaatttatgaattttctagggcaaactcacagccccgagctagacatgccgaagcaccctcgagtaagtatgactgttgggggacctaccgttcaagctatcaggaactaggaggtggttttgattgatgaagaggaagaagaggtggttcctccacttgaccaaaagcgtaaaagcattgcttctgagccagactcttcaaagaagctgaagagggttgccacgccgggccatagtgtcgattcagggattccctctgagattgacgagtatcccgcccctccaggcatccttctgaccccttcccatcccgacgaggaaagggtccaacttcgcatcgccaaacataattacacagtcgaggaactgtccaaaggtgacgctgaagcagaggccctgaagaaatggctgggggaagcttaagatgggccttttcgaggcgagtatactggagatgtatgggatctgaacatagatcccatgatagaatggtttaagctctttgtgggccctaatctggcaccatttgcctcggagatggtaagtcacttcactgctgatttaaccgaactccccaagaaaaggtatgcagcctgtgcttcctccaatcccatctatcaaatctaggacatgactgttgccttaactgcggtaagtatcagttctccacacctctttttttatactttattttcaaagttccaaccttattcttctttgttgctagatttctgcggaggcagtcgacttccaaagagtttgatcgactaagggttcaacgtgtcagaattcggtggcatggacggggttatgaggaggctcagggagttgaaggactggctcgggaggagaaagctctcatggagcagaatcatcaagcggcattgaaggccaaggacgatatccttgcctcgggaaggaaggacttatgggatacaaaagaggaaaactaggaactcgtcgtgaagctcaggtctctagaagagctacaccaaactgactttgagacaacaaccaatatgactgtttaactcaaggagcttcgtgaattccgggatcaaactcaaaaagaggttgccaaggctgtgagggaggctttactggctccagttacttacaagcactgtgagaagcgctttgaagatgaggtgttcatgtgctggaaatcgaacaagtttcgaacctcgtctccacttctttcctgatcctgaggccgttgtggcttggttttgggagaagaatcagaaactggaagcta

SEQ ID NO: 19613 - DNA, 2488 bp, Cannabis sativa
caattaatgtaatcttctctaaattatttagagttatgcacataaaatatgcactaaatcactcacttagtaacatgacagtatttttcagccaatcacatttaattaagacaagacacaaatattttttatttatttatttaggcttgacttcatatccaaataaaaaaaaataacttagcttttaaagcttaaataaattttcttttcttttggactgaattatctgtttttttcactaaattctaaactgaaatttcaaagaagcattggttgttgagtgaagcttttttccaatgctataatatgtttgttttgcaagtgaggtttggttttgttttggtgagtttggtaaggaaagtgattgagtaatccaaaagaaacacacaagtcttataatatcaacttttgaagaattactcaaagaaaaaaagagagacatttttggcaatggctaagaatcttgaagctgctagaaatttactcaaggcaagtttagacaagtctaaacaagttggtattgagttagatgaaaccgggtcaagattgagagaaatcaaccaaagattagttcctttagaagttgaatttagagaggtttataaccatagaactacatatgttagagtaaagaatcaagttgattgtgtcattggtcctatagctgcaattccaagagtttataaggctattatcgagcttgaaaaggcaatcgccttttctgagcctcataccgagctcttttcttacctttttctcattagaaggcttgaagaaggactaaagtttcttggcagccacagcttgctagcgattcggtggcttgaaggtgtttttgagctctttgaaggggacgagctcctgatgaatttgaaagactcttcgggggtgttgaagaaattacatggaatggaagagagttgtcatatccaaggagggttgctctctaatgccttagacaagcttgaaattgagttgggaaagctttttgcattgacatcttcattgggagagattcatgccataatggagaggttaaaggcgaatggaagactcgaaaagtgtgtatctttgtttgtcgaaattagggtttcaattgctaaaaggagattacaagctcttggtttggattatcttgatgatgttaagatatcaaataatgttgagatttacattgaacaatggagtatgcatttggagttggctttgaaacaaatttttgatcatgagtacaaactcagcaaaaaggttttcgaaaagattggatcgaatatttggatgacttgtttcgcaagaatttcgattgaatcgggaatcctttctttcattcaatttggaaatgaagttgccaacatgaaaaatgatcccatcaaactcctaacccttctagacattttcaaagtcttaaacaatctaagaatggatttcaaccggctctatgggagctcagcctgcattgaaattcaaaacccgacaagggatcttgtcaagagagttgttgaaaatgcttatgacatattccaacaactcccttttcaagtagggtcacaaaggcgattttcgcctcctcaagacgggagtgttccaaggcttgtgaaattcataacaaactattgtaaccaacttcttggagaggattacaaggcaactttgattgaagtcttaaccataaatcaacaatggaaacaagaaatctatgaagaaaatcttctctcaatccaattccacaacataatgaaggaaatcgggttgaatttagattcatggtcaaaggcctactcagacacttcactctcataccttttcatgatgaacaaccattgtcatttcaccaatctaagaggaacaaatcttggtgatatgatgggagaaacttggttaacatcacatgatcaatacaaggattactatgcaacattgtactttaaggaaacatgggaaaaaacacttcttcctcttctaacccaaaaaggtactaccagcctaatttcggtttcaattagtaggttaaaggctttcaatgaggcattcaaagaaagctatgaaaagcaatcgaattgggtgatttcggatgaaaacttgaggcaaaaaatgagagggattttagttgagaaagttgtaacaacttataggtgttacatacagagttacaaggccttggttgagcaagattctagtgctggtaagtatgttaagcataccgaaaacagtttagagagtaagctaagttctttgtttcaaccaaagctagctactactaagtactcttcttcttcttcttccaacaacaacaacaaacatgttcatttaattggtaaacttaagaatgttgttactaatcaattaaggtttactcttactgctatgtaaaaaaaaatgcagttgttaatgtattttattactctgtacttaacaaatgtagtgaaaattttgttaagtacttcaatttatgattaaaatttagttatgttgtttttaatgagttgta

SEQ ID NO: 19614 - DNA, 3700 bp, Cannabis sativa
atttttagtgaacattgttgtacgtgcattctaaatatacataaataattaaaatatagattattattataaactctacttaaatatatataatatcaaagagatagtatgataatatataaaggaaagcgtgtatctaaagccgttaagcatagtacttttgtctacgcattctaataaaaaaattccttatgttttggagtatgaaaaagtttgggttgagatctatatattctacatgtgaaaactgtactactccacattcagtcacttatgtatattagcagaaagaaactacgaaaaacaaaagctgccaaaattatgtatcatcacgtcataatgtgctagctatcttggctatatatattataaaatattcgtaaaaaattaagttgataattaattagacaacaagatccctaatgatatcatgagtattaatattatatatttatgtgtacacacgtttatattaatttgattgattaattaattaatagattttgtttggaaggaatatatatatatatatattgtgttggaaatgtcttgtcacactgcatggaaattatgaagattactgtatatatatatacgacatatatatagatagtaagaattaatgagaaaaaagtcaaaaagaaaaattaattaagctagcgaaattgcactcgaaaaccacacatgcataaaaacacagatcatcattaacaacaagaacaaatacatgataatgtaaactaaaaatcagttgtaataacatttaagatgaacattttctttacaatattatcctccttgagcatcattaatattaatacatactaaaataaacaacaacttcaaatacaataaaacccctccccaaccatttcccccccaaaaaaaactataattaaaaaccacacaatgggtaacaatactagtaactgattcggctgccgcattggatcgatctctactaagtggtgtagttattatcatcgaagcatacgaagtgattggtctggcattgaagaattataaggctgacaagccttaaagaaaccaggataattcaaattacccaaatgggtccccggaaaaccaactgcgccggcagaggaattattactcctattagtattagtagtagcttgaccgacctgttccaatgtctgaacttgcttcttcaaaaacttaacgtaatgaatggcttcatctaacatcgaagcagtatccatcttagtcccgccgggaacaagcctctgaagaatcctaatcctttcgctaatccgctccctacggtgcctcgccgccacgctctgaggatccttagatatcttaacgttgcgccttttcggcggtttaatcgattccgggtcgatatggatcggttgcatcgccgctattctaaatatcatctctctcatcgccgccattgagtttctcttctcgtaaggattattattaattctaccaccaacgccgctgccggagagtgccgcattgggttgttgatacggcggtggagtaaccggttcttgaatctgatttccaccgccgaggaatgaaatagcgcctggtgtggttgaagaaggatataacgaatgatgcggcggcggcggtggtgatgaggttgttccttcggagaaattcatgtccagaaatgttggagttgaagcagtagcaccaccgcaataatcgggactgggtttctccatttgcatcatgatcgatatcatgtcgagatggttttgattggggctgttgttattattatgatggtgatcacctacagcggctgatgatgatgatgatgacttcatcatcatgtcaacgtccatgggtatatatatatatctcgagaaaattatttcttttgctataaacgagaaaatcagatagtgcagggtcgatgtgggattattgggattaggaatatggcagagctaaagagagagatataggtatggaagggatagttgataaaagaggagattgggttagaacaactttgtgaatatgtttcagagataagaagatatggaaaattattttctgatagggaagtttttttaataaaatagtagtttttattttcttccagaagtgtaactatgtatgtatatatatgatgatgagaaaaccaagcatgaaatccaacaggctcttactttgtaagtggggaagggagctttatatttatatatatatatatgtgtatatctcatataatagtaaagcttaaagtttgagactaatatttgtttaattgatcaaaagggaatacatacagaagagactcacgaactcatttatgaatacatttatgatatctgatagagaccgcccatcatgtgggggactttcatttatctaccgtcagatcataacacaaaaggtcaaaatctgacaaatcaacggtcaacaattgaattcggccctacttgttaatggtgcatgaacagtttttaatatatctcttcgactaaaaatcaaatttcctttggcttaatagttttataattaaaccctataaatggaacccaccgtcacatgacatttgtcagaatataaaagaattcaaaataattaataaatattgtaaaaaaatagtattttttgatgcactatacacaatataaaaatatatatatctttgtaaggagagctgtataattataaggcttaacgaatgttcatgtgttatattagtaagtactagtgtggtctgagatatagtgagtgaagtggggttttgggacttggaattggagaaattggggcctacgtacttcagtaatatttatttttccaatataagtttctaagttttgttttttttttttcctgaggtgtatttttccaataaataaatgtacatacattatacatatacactgctatatttgcctgtggggtgtatataatttcactctatctaactgtaccaaacggcacacttttcgaggtggattaagagctgacggtgatgctgacccttttttcggtaattaaaaagcttcaaatcttgttaaaaaacacggcgatttttctaacatataatgtaccaaaatattataggaatattgtttaacattatatatgaattctgtttaaatttgaagtgattttttttttttgagtaaatattattacaatttcttaattgaattaaatttgttttgatcagcttttctataatctcatctttttgatgaattattatttggccgattaatataatcaactagctagttgtacttacaataattactgatgatttttattagttaaattaaaagtcattaatgttactgtcaactttttttagtgtcagtttttattacacgattatatagatattatgactcaaaaggaaagaaaatgttacagctagagttagggctataaatattcataactcaacgtaagtcaaaagctaataattaaataaattctttttctttctaatatacctacatgcaccgtacgtgggtgaaatgtgaaagagtaatatgtgaacttgtgaagtaataaactttgtgaggtcataatcataatatcatctataaatttaagtaacatatttatatatgctagaaaatatgaacagacacttttaagggtacacaccataagatcaccttaaaatttttaaaaaataaaatgagtaacagttaatcaaatataaaatatcatattaattagtatatat

SEQ ID NO: 19615 - DNA, 2802 bp, Cannabis sativa
aaatacattcaaaatcttaaaaagaccaaaatcttaaatgaaactagcaatacgtggctcggcacgtacattcacctagtattagtatatatatatatatgtacacgtacatatacaaattaccatcattacaactatataaaattaaatattacgattataaatatattaatggtacttaactagctctacttgtattctagctaaaatgatatgttttgattggtgtatatatatatgataatggtttatatatatatagagatgatttacgaacaactttatgctaatgatctcaacgacatcttgaagaaaaagcatgaagctaacggatataaaagcttagtaagttgtataactcaatatatataattgcatgcatgtatatatatattgtaaattattttgttaatttcttaattacaactagtgtattaatatatatgtgtacaggtgttctaccttgaagcttgtgaatcagggagtatgtttcagggtcttcttccaagcaatataaatgtttatgcaacgactgcatcaaatgcaactgaggatagttgggctgaatattgtcctaattttgatgctcctcaggagtacgatacctgtttgggagacttgtacagcatttcttggctcgaggattggtatacaaatatatttatatacatattatgttttatgtatatgcattttaattttttactggtagtgattcggtttcaatttcatcatcaatattatttgatgtgttttaattggtttatatatatatgtacagtgatatgaacgatgtaggcagcgaaactttgcaacagcaatacgaatcggtagttaaaattcataaatttgggtcctcggttgttaattatttccaacatataatacattattatgtcgtaattaaagatttacataaacatgttatgtctattagatgatatatattataaactatatctttaggttcgaaaaagaacattggaaggaaccgtattcaatggaagttctcatgttatgcaatatggagatatgagttttagtgggagtgtcctctctgtttacttgggtgacaatccttctcctcctactactactaaatcatcttcaaatgttgtacctcaacgtgatgctgctctagttcatcttcaccacaaggttttacctatctcaaaaaatccaattcaatcagatcctctctcttttctctctttctataaatatatatatatacatatattatatatactttcatttatttatcaatgaattttagttgtacatgcatgtgttgtagatccgaaaatcagatgtcaattctgaggagtatctcctagctaagaagaagttgagtgaagaactggctcatagagagcatgttgactatagtataaatcaaattggaaagctcttgttgggacatcatgatcatcaaaatggctttaagaaccttcgatcttcagggcaacctcttgttgatgattgggactgtctcaaaactcttgtaatttgtccaatcactttcaacatatatatcataaaaatactttaatcctcatcatcacattattatttgattataataattttgaatcgtattattggatttggttgtgcaggtgaagacttatgagaagtactgtggatctttatcaacctatggattgaaatacacaggggaaattgctaacgcctgcaatgctggaatcactgtagatcaatttgctgcagcatctattcaaacttgctcataagaaacatcatatatgattaatgatttctctctttctttatattattatgccgtgtttatcttttttcttgtttatcaaatttgaagcattgtaataataatactactcaataaccatgcaccactactagtagtactgatctggacaattgtttatgtcaatatgtatgtatctctatctatatcacaatcacacataacagaaaccatgttttaaagaaaattacctaataagaagatagttcctttatggtacatcacaacctaatatcacagtttaagaaataaactatatttaagtacttcttttaacttaattattcatgcattatcagtactactaatttcattcacactcacctacctaagtcgtctcttcttgaaaactttggcttttcttcccacatttttcactttactagactgaaaatgtcttgaacctcttcctaatctacgagacctttccttaaacacatgcaaagaaacttctctactcttcaaattaacatggtggtggcgctggcggtgtctacttgaactactaaaggagttgttctccaatagctctcttcttccccttttagcagagtagttgttcttcttaataaggtcattgtccaaatggtgattactatatctagaagaggagtcagtctcatcatcacttgtactgtatccttgttctatgtcatgaaaacgacggcgctgcaaccgtctgcgcctgcggcggcgacggtttactctcttggtgttgattagcttgtgccacaaaaaacaggttatatcttcgagggcaaaccaatatgcctcacaagcagcccaacacatcttacaaagactttttactatgcattggcaaatcccaatcttgaataataggtagaagaacaataaagctggaagcagataaaaacagaacaacaattttacaaacaaaagaatttcaatcaacaagaataaaagaaagagtttcaaaagaaaattacttactgatgtagcatagaatcaaaatcaataaaagtcttaacagatttgagacacataaatgc

SEQ ID NO: 19616 - DNA, 6063 bp, Cannabis sativa
gtagcagaattactttctgcttctacagacgcatactgtttatattttcttatatataattgacatttgcaaaaacacggtttttcaattcttaaaactattcgcgaagtcatgtctcaattctagttggcttgcaacaatggtagaagagatgagtactttagttgtgaatggtacttgggacttgattaatttaccttcaggaaaatgggttatagggatcaaaatgagtgtttacggttaaagctaatcccaatggaacaatttcttgcttaaaggcatgtcttgttgccaagagttatgatcaaacctatggagtggactattgtgatgctttttctcctattgcccaactgacttctgttcgactgttcatttttatggcagctactaatcattggccttttcctcagcttgatattaaaaatatttttctccatggagatcttgagaaaaaagtgtatatggagcaactttctgggtttgttgctaagggagaattagggtgagtttgtcgtcttcacaagtatttattgttgggatttatgccctaaaagcaagtaattaatggataagatattagaaaatatatgaaatacaattataagataagtaatatgttaattgtaagagtataattattaaatatttaaaaatttcttattcatatgaaaagtgtatgatcatgtaaggatatacaagagaattaagattatacgatatgaataaaataagtcggtagtgtattaaagtattgagaatctttaatatggaactattaagtacggtttactatacactatatttttagtgtgtgtgattttgatttgaatcacatatatagatggacatgtagtaaaggtattgtgtatgactggactgatatacatgtaataaacatcttttattaacatcctgtttaccatgaaaataatttatcatatcacaatgatgatcattagtagatcaacctgaatcctgtatacatgaactcctatttgtgttcattgagttctttgattcactcattaaaatttctcagagaagatgattcttacaacttctgttttgggaacttaataacatgactggctgggaagatgctatacagtagtgaaatccaagcttttttaacggatcaaatatcagttcccttatattgttaattctaggagtgctaacagttggattcaaatctataataagttatagattaactgttcacattgaattaatggtacataagaaatgaagagataattagaaaggtaaaggggtattttgaccagctctaattatgaactaataattagagggtgagctacttatattaattatatcaatagactataagtaagacttctataaatattattctatattataagtgattcatatttatagtggaataataataaaattaataaattagattattctattgatgagattgatagaatcttatgtttattggtacttaaaaatataggtccatggtccccgagtcatctctgtacaacactgtacaggggaaggttttatttgataaatggatttcgagtaagaattaatttttatgaaaaataaattcttaagggcaaaataataatttgtgaaattattgttttgattaattatggttattatatattgtataattaatagtatttaactatttagtttcattggataaatctatattaattagttaaatataatattattactaaataatattaaagagagaaatatattattttagagaaaataatatttattttaattcttgtgaaataagagattaatgagaatcaatcaattattatttattggtagaataaatactaaatcttatttgtgacaaaattgaaaaattaattttgaaccttaaaatatggctcacacgtgtaggcctattttacacgtatagggtgacatataaaggcacatgattaatttagtttaattattttattggttaaaataatttaatttaaattaagttaattatcttttaattattaattaaatatattatttgataattgtttaactaaaaggataattattaaaataaatgatctattgatatttggatgtttagttattagatatttatatttgattttgaattctgaattcaaaacaaattagatatttatcttttattttaaataaatgattaaaaggctttatttatagcactgtatatagggatatatagtatcataaataacaacgatagaaaataaagacagataacaaactgaaagtagagagaacaaataattagtttttctcaaccctattctctctctctctctctctcatgtctatacactattcaaagtgtgtgtgagattaaaaccctaatctcattacagtgtctcatgagttgagtacacactgtaatacctaaatttgttcatcatttaatatctaataacccactctattccagagtgttaaggccaacttgaaagatcaagatgtggttcttcaatcaagttcttggattggatgttccattgttatacgaaaagaatcaaggataccctgataagcatcaagaggtaattgaatttcttttagtagttagatttaatctatatatattatgttgagatccttgggcttatggttcatattggatagaaattattttatcaaaattctgctttcgcttttataactttgatatggaccataaaaactaacaattagtaccagaataatttttataatgatatagattaaatattgtgttgggcgattatacatttatatttatatatgttggtatattatgaatggatagaattaattttttttatgcattaatgtgaatcgtcaattatgtagtaaatttaggttagaaatttcgatagtgttactaaaaaaattgtacactatatttgtggtataggttttgatgtaatttttattttcaatttatttgtaaattttattaaaaaattgcaacatcaaaaatctataaatcttccattgatgagcgagcttgagtttaacccccacctcatcaagatgacgagttttggatctcgaatgacaagccacgaaacccgaaggcatgcggctgcaagccatgaggttcaaaaggttcgaagcacgtgtttttcacgggtgcatacgatccatgcaaggccatgaatgaccatgcacgtgagaagggaaaagactcaaactcgagtttgggttacatgcgataagtcactgaagggactttttttggtcctgtggctcgtgaggggtgatcgaccggacttccaaggtccatggtcaaagtcaatggcaaggagaaggatccataatgaccctggctccatcttgggttcaatcggctcccacgggatccaatagctccggctggagcttcttgatcatttatcaaatatttagaattaaaaaaaatattttaagttttttaacaaataaaaaaatattttgtagattttttttattttaaattattaattttaattcagtatatataatatttttaattatataaaataatgaaaaaattataattatttataacaatttattaatataaaattcttttatttttctattacaatttaaattacttatatcactaaaaatatatataattttttaaggagttttattattttaataaaatatcataaattattagagtttcaattattttatataaataaatcgtatcattaatatctatatatctatatacttatataaaagaaaacaatgcattatttcatgttctttttttctcatttttttttaaatttttaattttgttttaaaattatgataatttgactccttagtaaaaataatctcccatgtttagatactaatgtgatttttgtattatggttataaatgtctacttcttctactttactttgtgacaaaattagtgttacattattctttttgtgggtgattaatgagattagtattgcccaattagttatagtttttatttttttaaaaaaaaatgcaacaaacatatttttacatttttcaatcttggtcaaagctttaaaatacttatttataaattttttccatttctattaaaaaaaattaaaatttttactatacaaattgattaaaactagaattatacacaataacttatatataaaaaaaactatgagataaaattatattattttaaaaaaataataatacttcttataattagctaagaaaatatatcaaaataaaaattcttaggtatataaattattttaaactagaattagtcataataatttaatttataatataaaaaattattactcttaatgtggttatttggcaccttaataaaaaagcaatcacatggtttagactagtatgagtggatattataaatattgtttctattgaatgcttgaattttaatattaattaaaaaatacataaaaactaaactatatgtgagtttttaggaattttttaggaattgctttaattaggtgtaatatatcatcaaaaattattaaacaacaaataaaaataaaatttaaatatttttctcattatatatgaataagtacaaaatatttttaatatgtattacatgtaattagattacattcatttttaattagattgtgaaagttttctctaaaaatcgattcaatacaattaatacaactactcacattcaattcaatcaaactgtagctggatgtgagtggatctatgtgagtgttattgtgtaatattggtttttttttagtgaactactacaacaaaggaaagaaaaaaccaaacaacaaagggttgcaacagatagtgtgtaatattggtttgaattagattatttttgttgtttaaatatgagtttaaaagtttatgtaatttgattttgtgggtatgttaattctatattggtaatttgaaaaaaaaaatatgatctttaattttgattaattgtctaaattagatttaagaagctaattaattatatttttcaattttcataatttttttaataattataatttatttaaattaatatggatggacaaatgaaaatatgatatttgttactttaatgaacacacgcaacatataacagaaaaataataacgaaaatagatggaatctaaaatttggtatttaatccgctaaaaaaaaagatgtggtatttaagtgtataaaatcgaaaatataaaacatttatgtcgcaaatttccctattaatattgattaattctaatataaattaatattttatattttttaatttttgtcaaaaatttaaaattaaaaaaatattttaagttttctaacaaaaaattaatattttcttagattttttattttaaattattaattttagttgaatatataatattttttaagtatataaaataattaaaacctataattatccataacaatttattaatataagactattttatatttttattacaatttaaattacttagatcacaaaaagtatataagaaaatatctttgaggagtcttattattctaataaaatatcataaattattagagttttaattattttatgtaaatatatcgtatcttcaatatctatatatctatatatttatatatataaaaaaaaataataataatgtattattccatatcatcttttttcatattttttctacaattttaattttattttaaaaatgtggtaatttgactccttagtaaaaataatcccacatggtttagtattgcccaattagttatagttttcattaaaaaaaaaatacaacaaatatatttttacattttttttatttgggttgtatatttgtttatttggccaactcgaagtatttttgtaatattgtcacttttttttttggttaaaattaaaaaaaagcccttttttaatatataatttaatctaattttaaatttatttataaaataatatatctagctaattttatttaacaataaaataaataaataaatttagatattttaaacaataaaacaaataaaattgttatataaagtatgattaattaattgaattaacgt

SEQ ID NO: 19617 - DNA, 5161 bp, Cannabis sativa
  modified_base (4298)..(4329): a, c, t, g, unknown or other
  modified_base (4423)..(4424): a, c, t, g, unknown or other
gaatgaatacacagataggattgatatatggttgtcctgttgaagacattgttactggcttagcaatccaatgcagaggttggaaatctatttactacaatccgaagaggtacgcttttgtcggtgttgccccgacgacattagagtttgctcttgttcagtataagaggtggtgtgaaggcttgtctcaaatatttttatcaaagtattgcccattcatatatggtcatgggaagattaagctcggcgcccaaatgggatactgtatatatcttttatgggctcctctctcattgccaacgatttgttataccgttgttccttcactttgcctacttaatggtgttcctttgttccctgaggtatgtatctttgttcacttatttctttactgtacaaaatttaataggagtaagtgggagagggataacaattctaactaagataaataaactaaggtttcaaactagatttagatactaaaatcatattttgttattattttaatcacactaaaaactaaattagtgacaactttaatctaaatattactttttagtgacaagtaatttttttttataattaaaagtcatatcgagtcacaaaaattttgtgctatcactaaagggtaggtttttttttttttttttcctatatactatttcttaactttttttttttttttcaaatttacggtttgggttgctttagtggttgctcgggtggtttctacgtaagttgctatgtagattttgattgcgatttaggttgttctgttggttgctatttaaatttctatgtagatttctgtaaatgcaaaaaaattgcttttgaaatgtaaaaatgaaaaaaaaactttttttttttattttttattttttatttttattgtagtgacaattgagtttttagattttgattttaaatggtttcttatttaaacttttctagacttgaaatgtttgaaaccaagataaaaaaaaaggtttcaaactctattcttaggcctatcatattactaaaagtaaaaaaaaattgtgaataaaataatatgagtaaacctatgatattattaaaaaaatctatagctaaaaagttttagttataaaaatcatagttttttttgtaattaagaatacatttaatcgcaacaaaaaattaaattagtgacaatttatatctatacttcttttcagcgtcaagtaacttttcgttaccactaaaagtgacatcgaaaaatattatgttgccactaaaggatagcttattttttttagtgagaatcgagttttttgattttcgatttgaaatggtctcttatttcaatttttctagactagaaatgttagacaatatactactaagtttcaagtttagtgcagagatttgaatcaacttcagtaaagaaaaacaactccatttgcttctaatttttcaggtttcaagtccatggttcctccctttcgcttattgtttcatagcgaagagcgtttacagtttatcggaagcaataatccacggaagtactctaaaagcttggtggaacatacagaagatgtggttgtttcgaagaactagtgctttcttcattgccttagtagacattatcaagagaaaacttggtctatccgaaaccacatttgttttaacagacaaagttgtgactgaagatatcttaaataggtatgatgaagaggtaatggagtttggaagctcaaacttaatgttcaacatattatcaacattggcattgcttaacttgttctgtttagttggttgggtcaaaaagcttgtgttcgatttcgattccaaggctatagaacagatgattatgcaggttgtgctttgtgggataatcattgttgttaatttgccaatttacaatgctcttttcattagaaaagataagggttccataccaacttctgttatgctcaaatcttctgttttggcttcaattttatgcctaattcctctgtattagaacatatttcattgtgacataaaacagcttcaactgattgaggcctaattccttagtgataaatatttactctgttgttatcttttggggcagtaaaaaatgtcctgagagactgaatggactctattacatgatcatttcttcttattctttttctttttctttatagtatgagaatagtttatttgtggccatttttgggtcttgattaaaggcggaaaatccagtcaaacataataacacgactcgaataagggttgcatagcaacttcagtttatgctcaaatcttttgttttggcttcaattttatgcatttgctttcttagactgtaaaatgttaaaacacttcatagtaggatatagtttatttgagacaaattttcagtcctaaataaatgcgttgaatcaagtcaaacacaataacacgacttgaaattcacacagaattattgggttttggtctttattaaacagggttgggtcatttttctggtttatgtgttaagactgagattataattttaattagatatagtgttttgtagtggtatttttgttttaatctactatgactttgaccaaagacctaagaatattcacatattatagcttcagtcaaagacctaagattcatttcaatttttttttgggttgtctagttgggaagtaagagaaatgttaaaaggcaccagtggtacttagtaccctcctatgtgccaacattggtattagttcaattaatataataatttttagggagtatcgttagtcaatcacaaggcgacatatctagaggtgttaggcaccactagtgcccaataataatgctcgggaagtaaatataaattagctatgttataaaatggcccttattacaagtttgactattggagcttggactcgaaaaatccttatgttagttggaagtttgttgatagttggaaaaagacatcaacactttagcttgatttcaagaacaataattagctaatttggactttttagtcttttgtgtttttaatttgttactctaatttcaaaccagttaatttgaaaagtacataacatttagcacaagagtacctcatctagcttatttatttagtgttctcagcaaatatatggagaattccgaacaagggcattaaggcgtgtgggttcggttggggttactgatggttgtgcaatgcagggagagttggaatctgttatgttcggtgtcgagattctcttggatcttcaaattcagtcagcagattgtcaaaggcttgtgcatgagtttagctattagttttcacaaactctttagcttaatttttggtttagacttttgtgtttcttaggttggccttgaccatacttgtaatggctttcttcgattttgtgaggcgagtccctgtgtgctcactgaattttatgttctttctaatgaatctttgagatattcagcttgaaaaatcttatgtcattattgttaatgaaaagaataaacatattaacatgagaaaatttggattcaagagaagattgaacataccataaacagtcttaacttgctgattattggttagagtgagtgaaggcctacttcattcatctcgagttcatcacatcagattttgaagaacgaaggtcgaatttgtgggagactaagaaggtatttgggttcataacttaaaaactattttcactttttaaaaatagaaaattatttttaaaaatcaacagcaagtgcttggccaaaatttttataaaatagtgaatactgagttaaaaaaaaattaaaaaaaaaaaaaagaaaatatcgaaatgttattttctacttcaaaagtaatttttattttttttgtttaatttttttttatattttctctcacatactcaagtctgaaattaaaggttcaaggttcaaggttcaaggtttcgggtctgagatctagtgttggtctgagtccatggtccaaggatgggtttggatctggggcctagggtcgagtctgagtccatggtctagggctaagttcgggtctggggtctagagtcgggtccgagtctaggtccagggctagggtcgagcttcagtttcgagttcgggtctaggtcaggttttcgaggttcaagttcagggtcagggctgggattgggtccaaattctgcgtctggctccagggttcgacgtttgggtctcggatctcagatcgagtccgggtttgggttataattctagaacttctgtaagtacctgaccattaagtgttaagtaaattgtcacgtggtaactcctgattggtccaggtcattaaatttttattnnnnnnnnnnnnnnnnnnnnnnnnnnnnnnnnaagaaaatgacacgtagataatgacttgacacttaacgaccaagtacctacgaaagtttcaaaaatataacttaggtattattactgtcaaaanntaaacttagatatttatctacaaccgagagttaaacttcggtatttacgctgcaaataactcaatctataataagggtgttttgcacccctcaaagagggttcattaatgtatttttttattgtttcgatatttagaaaaaaaaaattaattttatatttttttatggtcgtgtaagttataattacttaagacattatatatgtaaaattttgaaaatttcaaaatattttgtaatgtatatagtgttcaaacgttcacttgcgtataaaataaaacagtgatgtgtgacaaactgttttaatcttgtgttttgcgtgttaaatttttttaaatttctcaaaattttacaggatgtcttaaataattataacatacatgactataaaaaagaattaaactaaaaatatattttaatactgaaacaaatagagaatgtatgaatgcacaccttttaagaagtgagacatagaatttttctaaatttataggttatttaagatttttgtcttccaaactttaacatgtactaaatcatgcgcctaaacttttaaggctgttaaaaatcttccttgaactattgagattgttgaatttaaagacttttttctaattttagtaaggaaaatcttacatagatgaaaattcaggagacgtgatttagtatagaggaaattacacttagtatgggattttaaaaattcttatgataaatatggcacatttaagtttggccaa

SEQ ID NO: 19618 - DNA, 4452 bp, Cannabis sativa
aagttaaaaaaacagtatataggataattcttcataatttttttttttatatataaaaagtgaactttttgtattccaacgaaaaaattatattgggttttgcagcgagaaaaataaaaattaggtactaaatcaataaagatataaaacattagacactttttgcggtgattttatcttaaactatcatcttaatttattatattggatactaactgataacaataatggcgagtttattaaactgtaattggaatcaaaataatcaataaaagtgtacattacttacttttgtcatgaaaaaaaaaaataatgaattaacaaaaagttcaaacatttggtactttagaggccattttcgtatcaaaaatattaaactaacaaatttactagtaacattgactcctatcgttatttttcgatcaacaaatactatgcaaggtaatgtttttcttgtgtcaaaaaaaaaactcttgttagcatttatattgaagaaattaataaattattctacatatatctatctatctatgcaatctatcaatctatttatctatctacatatatctatctatatataattctgatagtacaattaatggatgagatagcctatcaattattcttcttatctcttccatttatttttctttctagtctttggttcttttctaattacttctatttatcatttactaaccaataacaaaaagagaatgaaaagaggtattaatatatattcagtgtgatgctattaactttttattgataatattgttaattgaagaagaccacccaccagtaatcattaaaaaaattagaatttttgttctctaattttaacacatattaaattatatccttaaatttttaaggtcgttattaagaattctcactgaactattaaaattgtttaatttaaataagattttaatccaattttaataagaaaaatctaacatagatgaaaattgatcaagaggcataatttagtacatgtcaaaattcgaagagtataaacgatttagtggatgtcaaaatctggaaaatatgatttagtttataaacaattactgaattagtaaaattaaatgcacttggacaaaaaattttcaatccaactattttaataatttaaaaaaaaaattatcgaccagaaaaattcaaataacataatttatatacatgttaaaatttaagaataattattctaattagcaaaaaaaaaaaaatataaatgtgtgtgcaacatatctttgtatgcaatgaatataggtttcttttttgatcactattggtaatttatagagatcattaattacaggttatttaccatccatatcaaaatgtatatggttgagcacttgtatatgtctcaaataatcctttgaaatttctaataatttaggccacgtaatattatttcagctccaatttgttatgttttgttttttgttttgtctttttgtattgtatcatgattttattctgtaataattattggaagatgccattcaattggatacaaagacaaaaactgaaatatgggcaaaaagtggtatatgcagccgtaactgtaatagcttctgatcattattttgaaacgtgtgacaatttttcaactcccacccaacctaatcatacagaaaacataatataaatataaataactactaagtcttgcatagaaagagagagcacaacatataatatctcttgggaacacatacaatatttcatactgatcaactctccaaaacaacacaagagagacttttaagaacatattcaaatgggcagccttggcgacaatctttcacgaatggctggtggggacaccaataacccgttattggaccccgaagagtttcggcgacaaggccatatggtagtcgatttcattgctgattattacaaaaatatcgagaaacaccccgttatgagccaagtcgagcccggttatctcaaaacacggctcccaacatcggcaccgttctatccagaatctattgagaccattctaagcgacatcgagaaccacattgtaccgggcataactcactggcaaagtcccaactactttggttacttcccttccagtggcagcatggcaggctttcttggcgaaatgcttgccactgggttcaatgttgttggattcaactggatgtcctctccagctgcaactgagctggagagcattgtcatggattggcttggggagatgttaaaactccctaagtcatttttgttctcgggaaacggtggaggtgttctacaaggaaccacctgtgaggccatcttgtgtacactcgtggctgctcgtgatcgtgctctcagaatcattggaaacgacaatattggaaagttggtcgtttattgctctgaccaaacgcattgcgcttttaaaaaagcctcccaaattgctgggatccacccgaataattttcgagtcatccccacaacattgtcatcttcgttttccatgtgtcctaagattttacaaaaaacaataattgatgatgttgaggccaaactcgtccccatttttctactagcaactatcggaacaacctccactagtgccgtggacccactcataccgctatgcaaggtagcaaagaagtatgaaatgtgggtccacgtcgatgcagcctatgctggaagcatttgtatttgtccagaatttcgacacttcatcaatggagtcgaaggagctaactccttcagcttaaatgcccacaaatggttcttcacaaccttagattgttgttgcctttgggtgaaagaccccgcagcattgacacaatcactgtctacagatcccgagtatctgaagaacaaggccactgaatcaaaacaagtagtggactataaagattggcaactcgctctaagcagacgattccgttctctcaaactatggctcgtactccgaagctacggagtcgagaaactacgtggctttcttcgtagccatgtcaagatggccaagctctttcaagagtttgtaatgggtgacgaaaggtttgagatagtggttccaataaactttgccactgtgtgtttcagaattaaatccaatatcccattgaatactgagagaatgaatggtatgataaggcctatggtatccataaatgaaatcaacagcaagctcatggactctgttaacaattcgggtcggatctacatgacccattcaattgttggaggcatctttttgttgcgttttgctgttggtgccagtctcactgaagataaacatatcgttgaggcttggaatgtgataaagcaacatgcagacgtcattctcaacaacatgaataatcacaatcaataatagtcattatgtttctcctatcttaggggttgttgtttcctattttttatgaataatagatgaggacgtcattatataatcacaatgaataatatatgaggtggtatagtatagttataattgattggaaattctgaatattttaccgtgttgaaaataaaattccaaatagtatgttgaacacttgtacaataaaataaatgtgtacaattaaatctttaaattttattttgggtaccataaattaataagaattttccaaaaatattagacagattatctagtataactataaagcacaccatcatataacaaaaaaaatatggtttgtaatttctctatataataaaaataagaaatttccttagcaaagcactatttttgttctttaagggtattttttagcctttgatgattttaaactggatgactttagtttgtttggttagaacatctctaagtatgctctttaaatactttttttaattagctaaaacaaattaatttgaaaaaataaactacaaccacaaaaatataactttataatagaaaattgatatgttttttaatttaataatatctaatcaaaaatattattacatttttattattttattaaattaattcttatttgatcaattcatgaatcagattacagaatattattaaaatcacaaatattaattaaagtagaaaatatgattgggtaacaacaataaaaataattatcttattagaggtgctcttataataagggtgttgcattggtttggagaggatattaccttccatattattttgttacatttttcatgtgagtttgtaatcttttattttatttagagatcaatggttccaacaactttattttttcatagagaaaagaggaacacaaaaacctcatttaatatataatatatataggcaaccgattttgtattcatcttgtaaaatcacagattgtattccgttataccgtatggtgagtcctatgtactttattattttttaatttttttgtgaattttttttatttatttgataaccggctatattgtaagttttttcaccatttgtcaattttcttttttattttaaaaattaaaaaa

SEQ ID NO: 19619 - DNA, 2615 bp, Cannabis sativa
aaatgccaagttttgaccttgtgaccatgggatggacattggtggctgtgatattttgggtttgtgatgtagcagaggtagtgggagatggtgactggtttagttgttgtgtggggaatggatcagatatttgctgatgtggggactgatgttcgagttgttgactggaacaggtgggagaggtagtaatgggggtgtcagtattaagagtaggaggtaaagtggatgggatttgaaacatatttggatcaataactttggggacttgtgtagtgttggaagacaaagtgcaaaagagatccttgtaaggaaattctttttcattgaaagtgacacttcgggcaacatatattctaccactcggatgtaaacacctatagcctttagaggtgatactataacctatgaatatacacttggaagatcgaaaagaaaccttatgattttcatatggtctaagaagagggaagcaactacaaccaaaaactttgagaaggttgtaatcagggggttgatgaaacaatttttcatatggggagacatagttgagagtgggatttgggaggcgatttattaaataggcagcagaagtgaaagcctcccaccaaaaatgtaaaggcatttcagcttgtgctaacaaagtgaggcctatgtccacgacatgtctatgtttgcgttcaacccgaccttgttgttgatgggtatgagggcaagaatttcttttgaaaatgcccatcttggcaaacaatttatacaaaggttcatattcttttccaagatcaatttgaatgctttttattttagattgaaaaaatctttcaacaaaggcattaaattgacaaaaaattgaagtaacttcagacttagtattcataggaaataaccaaacaaatttggtaaaatcatcaacaaagcttacatagtatttgtatccatcattggatgtgtaaaaagaggggccccatacatcagacaatatcaattcaaaaggctttgttgttttatttctggtagttttaaaactgaaatggtgaagtttgccaacttgacaagcattacaaaaatcaacttgagtatgtttgtgagtgggaacaatggttgacaagactttatttagaacaggttgggagggatgaccaagcctgtgatgccaaaccgtggcaaaatgctggctgtcatgaacaggattgcttgtagtggtgaaattaaaggcttgaggattagtagacttggtggtaggattcttggatcttggggaaggaacttgtagcttgtagagaccttcacacaggttaccccgaagaagaacctgcttggttttcttgtcctttataaggcaacaaatatcatcaaattcaagaataacttggttatctttggtaaattgggaaatgctaagtaagtttttggtaacacttggcacatggagtatatcttgtaatactaaagactgtgaaggaaaatttgtattaactgaaccagaacctatatgcaagatagggagagaagagccattacctacaacaactttggcctttcctttgtagtcagccgaagtggagagattttgagtgtcattggtcatgtggtgggtagctccactatccaagtaccaagcatgagagttgtcatggctgctgtttgtttctgtgagtaaggcttgaggtgaatcatcattgttttgggtgggtgaggaattgggttgagaacctgtgaaattgatatcaaaacggtgataacattttaccacagtgtgcccagttctgccacataattggcaaactggtctatttcctcctcctcttccacctctgtaagaacctctacctccccttgtggatccacgatttccacgattgtagtttgttcctcggcctccattgttgaaactggtgttagcaagatttgcttgtatattggtcaaggtatcggtcgtgagctgttgaattctcatttcttggctttgtagcataaattgcacttcttgaagattcaaaggctcagatctggatgtgaggttaaccacaacggcttcatattcagatcctaagccgccaagaatgtataaaaccagttcatcattcgacagtggttggccagctgcagcaaggctatctgcatattgtttcattttcagaatgtaatcttcgatcgactgggctcctttctttgtcgattgaaggagtcctctgagttggagtagtcttgctcttgatcttgtggcaaagagttgagagaaggagttccagatctcagcagaggttcggcaatggattacatgacccaacatgttatcagaaacagagttcatcaaccagtgcataagaaattggtcaaaacgcatccattgttgatattctgggttaggagtgttacctgcaagagtttctggaggtgctggatgagttccaagaacatgtccatctagatcataggcacgaagagcagctagggcaagagatctccaaattgtataattgcttcgatcaagtctcagatttaggggaagtagattgttgtttggcagaggtagtggtgcgatcctctgattttgttgttgtgcacgttcttgttctggtggatcaactcgacgttcaccattgttagacatggct

SEQ ID NO: 19620 - DNA, 4577 bp, Cannabis sativa
  modified_base (2214)..(2215): a, c, t, g, unknown or other
cgttgttggtgacctcgttgggctattggaccatctgggtatcgagcaggtgttgttggtgggccatgattggggagcagccatggcttggtacctctgcttgctcaggcctgacagagtcaaagctttggtcaaccttggtgtggttttcattcataggaaccctcacgttaaattctttgatgaaaggtttaagactcttatgggggatgatttctatatctgcagatttcaggtgatcatgatcataatatatttttcagattttatatatgtattatatatatgctatatctttcgtttgactttattacatgatgatccaaagtttggggacgagcgttttattatattttatataattatcgaaaataaagtaacttaattagtaaccattaaaagaaacacaattaataatcaacaataataattgaagtctatatcaagtgaaataaacgattttcaaactaattttggacaatgaaaattattcagaattttttagttaattatttaattttttagtgtgttgtttgtattacttaacgtactatttaatttttttggctcacaatattaataaaagtctaataaaataataaaatagtaaaacacttaccaatatcattgttaataatttagtagttggtaggccggctactctttatccttattgagtggctaagccagtctaatattttagtggggtctaaaaagaatattttaaaagtattaatgaaaattacattttttataaaaaaatatacaagttttgtgagaatatttactatgctataatttttgcttaaaaggaaaaaaaaaaacttaaattaattagaaaaatatcattgcagccctttacgattattattgatctttattaattaattatgttatttttttttaggaagaaataggagagattgaccaagaattgggttctgttgacactgcaacagtgcttaaaatatttcatacttcttttgatacaacacctcttatcattccaaaaggaggattaggattactaaaacttgttgagccattaccctcttggttgtcccaagactacatcaattattgtgcaaacaagttcaaccaaaagggattcactggaggagtcaactattatcgagctttgaacttgtatgtcaattattccttcatgcatgccttaatttggatctattttcagtatatatacatgaggcttgttcaattaatagtcattttcattttatttaatttggggagaagtccactactacacaaaaagtgagggacttggaaaaagttttggagaattttgtcttccgcgctacgggggcatgaaaatttttacttttgtgtctcacagtgcgggatgtggaatgtgtgtcgttttggtttatttttcacgtactatttgtaggatacaaaagaattttcatgtcttgctttgagagatacgttaaataaacacttttcttgacactcaattaacagactcgcatgtgtgaaacgtgtaaaaccatttttgtctaggcaaaacagtcccataaacaatagttgtaaaacaaaaacttaaattttggtgatgaaaaaaaataaggctaaccctatgtattttattaattaatatattctttttggattttcagaaattgggaacttttagcaccatggacggaatcacaaatcaaagttccaacaaagtttataagtggggataaagacagtacgtattgtttcttaggtggaaaagaatacatagaaagtggtgaattcaagaaagatgttccttctctccaagaaattgtgataatagaaggtgttggtcactatatcaaccaagccagaccagaggagattaccactcacatttatgagtttattaagaagtattgattttgtactgcaagttcaacatttgtaagtttaaataagatgtgaaagttattatatcaagaagttcttcactcctagtaaagcgtcttctctttggtttataaaaatgtgaaatatgtctaattttgattgaaagtatccttaaatatatttggacaacttacaaaaatattgtacaatagaaacaaaaaattacaaaaatattgggacacgctttatatatttttttatcaataagaaaaacttcattaatggcacaaaccaaatacactctcaagatttcctaaaggaaaaaacccaacctcacaacaacaattaattacaaannattctctcaagtaaatcaatctctgatctagacctttttctattcttgaccatgctcaatctatactttacatcatttttaatactttgaacaatacaatttactgttttagagtaattcaagtatatacaattgttcatattcctccataaatagtaaatagttgttgccaatgaaactcaccggagcagtacacaaccagcaataccagctgctaaaactgatcgaccagcctttgaaccccagccacacaagcaaatcagcaagcaccattcttgacagcctacattcaaagaataagtgctgatggcactccaaatatgttccacaaacagcacaacagtcattctcaacaacaatctgaaacctgctaagcatatctctggtgagaaggttcgagtgaaccgcctgccacaatataaacccatgcttcagaacattgaggctgcaacaaattgctttcgcaggaggatctaaaacctagtttaaggacaaattatagagtttaaacactctgaaagttcccccaacaccagcacaaatgattctagcttaagtgagctcagttctcatccaacaccacttcttccaaaaccagcttgtgtatgtttttaagatgtaagagcatatgttattccccttaagatacactgcattaacccattttacccacaacagatcttttttattcattaaatcccaaataaacctggcaagggaagctttattccaaagggtaccatctttgaagccaaggccgccaagcactttaggaagacaaactttctcccagctagacaaatgaatctttggctgattatccttcagaccccataaaaatccgcgacaaagtttcttgatctctttaatcacactttgaggcagaaggaaaactctcatccaatagttcctaagaccaatcaaagtggattgaattagttgaactcgaccaacaaatgatagatgtttattagcccaggtgagaattctttgcttcatttttttaggatgatatcacaatcatcaagtctccatttggtaggtctaagaggaatccctaagtattttagagaaatactcccaatatctatgttgattctttgagctaaattctcggggcacgtcactcccccaaaataaatttgggatttctcaaaattaattttcaagccagaagttctactaaactcctccaaagcctccttgatcacttgagtcgaatcctcatcccctttatagaaaacaacaagatcatctacgaaacagagatttgtaaagcttaagttttctacaaagagggtgatacctaaattttttatccttggctgcaagctggaatctccgagacaggtattctattataagaataaataaaagcggcgatattggatccccttgcctcaaaccttgctctcctttaaaagtaccctgaaatcttccattcataagtaaagaataagatgtctttctcccacaagtcataacctaacttatgaatttagtagggaagcaataagaaattagcaactacttaagaaagtcccagttgattgtatcataagctttgctgatatcaatttttatagtgcacctaggagagcaatttttcctcttataattcttcaaaaggtcttgaagaatcaaaatgttgtaagcaatcgatctgcctttcacaaaagcaccctggttttgattgattaaattcagaagaactctagccaatcgagaacataagagtttagagatgcatttgtacaaagtagtgttgtaagtaattggtcgataatcaacaaccctggaaggatgatcaatttttggaattagaagtatagcagtattgtgaagttcagccgggaacttatttgtgtaaaaaaatgagtgatcgcactatggatatccttccccacctcaggccaaacagatttaaaaaaacctgatccaaatccattaggacttggagatttagtattaggaattttaaacaaggcaactctaacctctttgagcgaaaaaggttttaagagagaaacctgttggtcaagattgagttttggtcccatagcaatgcactcctgcttaatagccaaagatgtcgaattttctttgcccattatgtttcgaaaatggttaagaaaatgattagcaacatcagagaaattgtcaatcaagatgccttcatctgaaacaaacgaaacaatcctactatcctcctttcttttttttttttcagcaaagcatgaaagtaagtcgcattagcatctcctctttgaatccatctaactttactcctttgactaaggaaattcaagtacatctgctctagattttgaaattgctgcacaaccactttctctctatctat

SEQ ID NO: 19621 - DNA, 1633 bp, Cannabis sativa
tatttcactgcagacgatctgttgtttttacattatggaacctctagtgaagttttagatcacttaagtgggagtggttcaggactggtaggccgaagacacttatgttctatcccagcaaccaacgtatctgacattgcagcttctgctgttgttctttctagcaaaattgcacctggtgtctcaattggggaggactctcttgtttatgattcatccatttcaagtggaatacaaattggttctctgtccatagttgtcagtattaatgttccaaaagtgaacgagacagctgaaaattcgtatcggttcatgcttcctgatcgccattgcctttgggaagttcccctattaggatgcactgaaagagtcatagtgtattgtggcctacatgataacccaaaagaatcaatatccaagggtggaacattctgcgggaaaccctggaagaaggtcttgaatgatttacaaattgaagaaagtgacctatggagctcaagtggcatcttggaaatgtgcttgtggaatgcaaaaatattccctgtttgctcatattttgagatgcttgatctggcttcgtggttgatgggcttgagtgagaaaagcaatgaacattttcttgtattatggagaagttatcctcgtgttagtttggaggaattgcataaatcaattgattttccaaaaatgtgtctaggctccagtaatcatcaagcagagcttgcagctggtattgctaaagcttgtatcaactatggcatgcttggtcgcaacttgtctcaattgtgtgaagaaattcttcagaaagaagtttcaggagtggaaatatgcaaggacttcttagacttgtgtcctaagcttctggagcagaatgctaagatacttccaaaaagccgagcataccaggtgcaggttgatcttcttcgtgcatgcagcgatgaatcaatggcatctaagttggagcacaaagtttgggattctgtcattgatgaaacagcgtcagcagtaagatatggttttaaaggtagattaattgttcatgaatttcatcttctgtcagcataatttaataaaacgtaataatgaaaagatatattatcttaattcaaaccaaatggaaaaattatacttgcttatgttatatctagttaatccttacattcttttaatttatttagctactattattatgatgcgttttctggtgtaatcttatgccatccttggcaatctttcaccttttttgtagatcatctattggaggcccccagtagcaactcttctcgtgcattatgtgataataatggtaatgaggggagtcagtcttttcacccaagaagtgtgaaggttgaactaccagttcgagttgattttgttgggggttggagtgatactcctccatggagtttggagcgtgctggctgtgtcctaaatatggcattaagtcttgaaggttctctaccaattggtgtcatcatagagactacaaaagtaactggtgtctttatcagtgatgatgctggaaatggtttgcttattgaagatcttacctcaattactaccccattcagcgtcaacgatcctttccgactggtcaaatcagcattgcttgtgactggtattatccatgaaa

SEQ ID NO: 19622 - DNA, 4974 bp, Cannabis sativa
ctaatacggcgttccaaacgaaccgtaaaagattaaaattatcattttataataattaaactatataagagcccaaaaatttaattttaccttagaccacatagactggcccgcagaagggaatcaatttctgatcatacattttgtaactatctccacaaataatagaccgactgtgtttagtatgtaatttcctaagccacgtgcttctcttttttgatcgtattaataaataatgtttgttaaattagtaaaatactaaaaaatatagaattcctgggtgttggcttagtgtcaagttttttgtttccgacttttttttagaaaaaattcataacctaattatatatgatacactaggctagaaggaaaagctattccgcttttttgtttttttttttcaaaatatttaaataatcttttcaaaagaaaaatattaaataatctaccgtaaaattgaaagttcaaatggcacacgtatcaaatttcttttgcggcataaaaaatagagtacttgagctataattttgaaactatatataattaaaaatttgtccaaagttggcaaaatatctactatatatatttatacaatatcaaataaaatattttgtaatataatttctcaaattgccgaaactgaaaaatgacatacaatagtatcaatttttaagccatacacctaacaagtaattgtgctatatatatttataaatatgtaaggagctgagtaatattttttttttctactagtggaaattttttacatttttgtatatgaattgtcgtaactctattttattttatatattaactttttatattataattatataaatttcgaataatttagggtagtgatcaagtagcctgcaaataattgagcacattaggctagagacacttctaatgtggcgagaagcctataatttcgacaccactaactaaaattttttgaaaactcaggctcctacatcactagcttataaaatatttatcgttagaagaaatgtcacttttaccagcacagtttcgttactgcgttggtaaaagagatcaaaattttaccagcgtggctaaaatctaacttttaccagcccatttatgggaaaagtcttttttgccagcgctttttattttatgctggcaaaagttctaataccaacattgatttgccaaccctttttgtcaacacatcatagataaattcttgtagtcgtttatcgatagtactgaccataattaaattaatatttttaaaaaataaataataaaaattatatctacgaccagaaataaattggtatttgtttgagaatctttgacagataacacagcagaaaaggccaggtacccaactatatatatggccccaagaggaatggtataactataagtgcgttatgtttttcacagtacaattcattcctaagttaaaaagaaagaaaggaaaaaaaaaatgtttattttttttttttgaggataaaggaaaaaaaatgttgtacttctaattattaataggttatgtcttataaagatgctgtactctgattctctaacttgtattgatcgattttctcgtcctcgatcggattacgtaatatttttttttgttctattcgtctctatcttacactcctaatcaaaggaatatttatgatgatagacaacgatggcactttgtttacgtaggctcatcttactaaagtctagtatataagacgaagcagaactggaatagaaagaacaacaacaaaaatataaatataaaaatagttattaagcatatactactagtatatatacataaaatataatactacacaaactaaatatctaaatacatacctcaccaggtaagtcctttgttatgatccatttatctagcaattcattggacgcctgtttttttctgagaaatttcgatgagaattccatggcatcttcaagaattttttctccagggaaaaccaactgagaagctctaaaaaggttatacatcccagtcactgcttgagttgactggccccgaaagcagaaaaaatcgtcacctttcttaaagtgttggaacacatctaataataataataaccacatattacaaatcaattaattattaaaacaatgtaattgattggaatattatgtaaaattcgagtaaatattatttacacatttgtacgtatacgtaccggcagaaactttgtgaccatgcaatcttagtagtctgaaacccattgctgtatcgtcaatatcttcaaccttggaatttcttgcccagccaattcctttctcagtccaatttctaaacattccaaatgtaaaaaataaattaactaagaaacaacaaaattcaaatatacagtacattttgtcagcacttttattaagtacgtacgtacgtacgtacctgaatacataatcgatacattcctcaatttgtggctcaaagaatcttgatattcccaagcgctgcaaccgatccgcaacccaaaggtgctcgaacaagtcaaccgggtaaacatttgggactgatgaggacaatcataacaagagacagtacatagatgatagaaccacattggaaaagtaaaaacaaaacaaaagaacaaacaaaaacagaagaaaaaccaataggaaaaaagaaaagataataaaggtaggtaggtaatatttacgtaccacccccgttgaacctttggaccgctttagttaaatattgcaagcaatttcggtctttggtctccatgagtgcaaaagcagttgaggatggtgagaacaagaatgacccatcttgggactgcagtttcaaaagcttttcccagtccagacctaccattccttccaagctatggagtagcgtcgtgggcactgtgtgcattatgtccctcggaatcctatccacacgcgcgcacgtactaattatatatgtatatactaaaactataaagtcattacttttgcattatgttgttatatactcactctttctctctcatctagctagatatatacattatgagactctttactcttatataatattaccttgtgagcttgaaatctctcctagcatatatgacttttaacacaggagaatcctcaggcacttcaaggtttaattttcgagctatttcaagtaaagaagggaaagccacttcgaaaccaataggcatgtgttcaggattctccctctcaagcttacttatatttgcattgaaaaaggccatacctgttataataattccacccggtcattatcaaaacgaaaattaaaacgattaaattaattaattaatacatacctttttgacatttttcgggataaaggttccaagatttcaaagcaacaacacaagccaaagtgttgataaggcgatcgtgtgcggagaaaatgtcagcatcgccccaagaaccgtcggagagctgatgtgtggcgatccattggagactcgatgggaattgaggtaagccactcccatgaatatcttccacaagggctacccatgctgtgtcgtacgctgaaatgcttatctctccctcatccatactctccaacattgatttgattgaagcgacacgttcctcgatctcattcgatcttgtccacttttttatttgaaaaaaaaaacaaataaattactttaaattggaaatttaaaaaaaagaagagaatttcttctacattaataatcacatcagaataaacataggatatttgtaaatattatatatacatatagagagagaaagtgaagtagtagttgtttctttgctatatatatatgcgcgaaccaattataaaaagaaaataaaataggaaaggcaaaagcaaaaagtaagaaaagttaatttgtacataaacccaccttagtatcttcttcttctccatctatgtcatcctccacaatctcgtgccactttataactggcagaccaccactttgaaacacgtctgcatatttgggatatacatacgaatgagacgaatttgctttatataagtatattgattttaaaggaaagtaaatgtgtttgttttattttagcagagaattccatatcatctctcacaagtaaaaaaaacaattcgatttctaaattctctttctctctctctctaaatctttttaagattaaacatttagctttaccgtgagtgcggggttttgatatagcgctgcattttgagcgaatatcacgatcaaagttaacttgtttgtctttagcttccaatagcgaagcacctatacatatagaaatatacataaagggatataacatatattgtttaataatatatatatataactgtatattttaatatatcaatattttaatagcttatttcctctgttattgaaaacgatgtaaattttaaggaaaaaaaaaagataaaaaaagaagaatctttgatctgaggtacaacatggcacaataatacaaaaatgtcgctttgcttcttgacagtgaaatacacacacatatatatatatgctgccattgaatactttaccgtattcaagtaaaactcttgtaaggatcacaaaagcttgtttcagatcattcttgggaaggaaaaccaaatatatttgaaaaaaaacacataaagaacgaagctatatttatatatgtatatgatagctgttttctataaacatatataggacaaaaattaggactaaaattaagagataaaagagggatacgtatataatacataactaaaataatttaaattacacgagtctgcacagctgaagcaactggaattaaattacgatttattaattcaattagttcagaaaacccagggaagagtagctcatcatatatataatatataattgtaaaaataaaattattatagataaaactttctaattgctgatttaaccaaaagttctggaagcagacaaagaaaacagagtgagcttgttcactgttttgctaataaatttcttctgaaaaatc

SEQ ID NO: 19623 - DNA, 2776 bp, Cannabis sativa
agcaaatgcataaaatttaaaatgacgtgagtctgcagtacctggattttctgaaccctgcacaaaattttgaaaaagggcaaatactatcatatacatgacaaacattataatactgagatttcaagaaacaaataaaggaaaggcatttagctattctttctagatatgtaatagttttccttcttttttgaagaaaaatacgaagcatcttaatttattagtctattgcaaaatcataaaatttgcagccatagtatcattgaaacatcctctttgggttgcaattgtacacactacactttttttgtaaagaatcaatgctccctgcctaactctaaaataagtccctgccctacccaagattggctcgaacctcagatattgagggataacccacatgcctaactgtttgagctacccctgttgggtgcatacactacacctcaagaatacatgataccctaaaaagtcacggatcacgcagcattctactcttgaagtttaaactattcagtagttactagctattattaggtagtagtaacacacattaaatctagttgcagggcttaaaaagaaatattataaaactttctatcaaatatatataacaattacaagatcaagaataatcaaacaaacaaatgattataacgcaagaaaaaaaattgactttacctccttctcggttgtgcttcttccacgctgctcggagcttttctctgcttccatttcttcaaaaggatccaaaagaatctaaaacacagagaaaatgtatcccagttaatgaagaatgattcaactacaagatagttctgtttttacccatttaccaactctaaaataaacatcaaacagaaacttttaatttactgagacactactgaaaggatcaaacacatacatgaggctgcacttccattcttccaccaacaataaccaatcctgaatctccatgcttcagggtataattgctaaccgagattgctatctccctatggtgagcattatgaggaaaatcctcctgtcaaataccacaaatgttttaagtgaatacccaaatgaaaatattcaagcaattaaacaacttgtatcaaccaacaaagggaaatagcaaggagagctgaaaatcaaacctgcaaattgttttcccagagctttttgaggttagaatcgaaacacatgacagtccaacccgatgtgacaacaacaaggacctgcctgacgacttttcctggtttttgacggtcaataaccccagtagccatggctacagcacgtctcccagacgagacacgaactttatcaggcaaaaggctcacttctgcgatcacacgcgcattactgaacccttcatccacacgcagactgtgtggttccaaaatctgaggcgaaacccatttttttttcagtttttacaaacacaaaaagcctgaaatctcataaaaagtagaaaaattgaataataataataaagatttttaacctgaattttggcgtcgtgggttgcgaggaggacttctctcttgccatcaccgttaagatcagcgacaataggagggggcaaacgttcgccctcgaacttaattgggtattcatcagagagatgcatccacgcctctcggaaggagaaatcaccctcatgctgaaatcaaattcaaaataaaatttaaaattggataaggattgaatgaaagaaagaaaaaaaagagttgagttgagtttagtttgtacgtgaagagagaagaagatagcgaaagcagagagcataagaatggccaaatctcgcttcctcatagtattgactactactttatcagctcaaaattgaagaagaagaagaagaagaagaagaagagcatgggagtgaagattgcgtctcgtaactgaactgagtttcttctctgatctcccaccacgacgcgggtcttaccactctcttccaaaatctaattcaactcttaatactccaaaaaaaacgaaaacggaaaaccacgaagctctttagcttcataactcaaataaataaattaatcagttttttaaaactgaatttaataaaaaaaaaaaaattgaaaacacaaaacatcactattgttttttactttcaaaatttattttttttgtcaattttttttttatatatttttatcacttacgcggacttaaatccagacccgaaccctagaccctaaaatcggatcccaattcccaaccccaacactggatccaaacccagatcacagactccgtactagaccccagactccaaacccagaccctgaccaaaacttgaacccttgaccccaaactcggacccgggttcgggtccgactctgaggtcgagttagggttagggtcagggtctgggcttaggggtacgggtccgagtcctgagtctggatcccgggtctggtgtttgggtttgggtttggatttgaatataaatccgacaggtccagtctaaggtgggatgtattcatcttgtggtatggtgtaaaatattgaattttttatttttactaaaaaaaaatctaaaaataattttaaaaaacattactcaaacattattaaaattttaaaatgactataaaattattttctattttatttttgtaaacataattctaaaaattaaaaactgaaatcacaatcaaacaacctctatctagaactattttttttcgaagacctcaaactaatttaacctcattttaaaaaataaaagaaaaataaaactaatttaccaaaagtaggggtgttcatccgatcc

SEQ ID NO: 19624 - DNA, 3145 bp, Cannabis sativa
  modified_base (39)..(56): a, c, t, g, unknown or other
gccaaattgtttttaaaaacaattttctgtttttaaaannnnnnnnnnnnnnnnnngttatgatgccaaacatgcactatatttttcttttaagaaaatgaatatgaagatgtgcccaaattcctagttaagttttgatgaggagaaactatgagatcgatcaattgactcatacaatgaaagtcattattatgaacaatcagcatcttataattgcaaaatcttgaaggttctttggaaatgagcgtaagttactactagattgattttgtatttggaatgaacaatacaaaatgccaaaaaaaaagtaatacaaaatgctcttgatgtaattggttaggggatgctaaatcttggattattggttttcagtgcttgcctttgtttctgaaatactgctttggcaataccaatactttttcatgtgtagatataatacgttccataattgtttagaaaagctgatttgacttgatgcccctctcaatttcttaaagatttattttgcatggcagtgtgaatgagttcagtgaagttaaattctgtttaactcttaactcattattactatttctgattacacaaggatcattctctcttagcatggataaaacttgatgagggttgtttggtgattgatatcacactgtctcatgttagtcattttgacattgacattctaaacttcttatttcttttggccactctctcataagacagaaaccattttaggatgaaaattggttagtaggataaaacactattggttaagagctttcagttttaggtaatagagttggtttaatattttttttattactttcagtttgagtattgtttgaaggaatattttctaggttgatttaattacttttgttttcttgaatgtgggtttactgtcttcagttggcacttggcattattatctttgttcttctgctgttttattcttgaaacgccaaatgcacattcacactcccatgcgcacaagcaacgggcattggtacgacacattagtaggatgtgggagaatgctaatttttattatagtttatatcttgctgtgtgtttggaggctttttcctcaccagttttttttttttttttggtgcctcagatctttctcatgtcttctcatctgtcagaagagatctcaatttcattgatcacactagcgaccttggatggaaagagtatgcgaacccttccacttggttttgctttgggttttctagcaaacaagatttttgtatatggctatttttatggcacatagattaaatccagatgattaactcttcaacgcaggttgcaaaggtttcaaccaattgtagttgatccagcgatctacctagctaggaggagccaaatttttcatgctacagaaaaacgaaaaacaccagatgcttttaaagcatttacaggtaagtctctgcaatattctctattatacacaactgttaccaacacaaaattcatgtttgttgttttcagtatttttcaactgggattgctagtctgtgacatttgtaatctgcaggttccccatgggtcacccttagtcgatcatttctcgaattttgtatacttggttgggataacttgccacgaaccatgctgatgtattttaccaatgtaattttgtcccaagaaggctatttccattccgtcatatgcaactctcccgagttcaagaacactacagtgaacaatgatttgagatatatgatctgggacagtccgcctaggatggaacctcattttctcaatgtttcagattttgatcaaatggttcaaagtggagctgcttttgcaagacaattcgcgaaagatgatcctgtgctgaatttgattgatgaaaagattctgaagcgtggtctcaatcgaccttccccaggtgcatggtgctctggccggagaagttggtggatggatccctgctctcaatggggtgatgtcaatattatgaagcctggccctcaagcaaaaaagttcgaagagtccatcactaaccttcttgatgactggacctcacagtcaaatcaatgcaaatgaagatgattgttgtagtcgactaagatcttctaggacttgttcagaagaatgcaattggtttccaattcattctttggcctctgtaagctcaaattttgtgggagttcctcatgccagagcttagtgaatgtgtatcacaggggttgaaacgaagggggcatatggagttttatgattttcggctgtatgtagatgagagggcaagtatttcattgttgagccatcccacgacctctgtgcttccattcccatttcgttgtatgttctgcataactttggattatgttaatagtggtcgaatgctagtgtatttatttagatagttcattctttgatttctgaggttcttagttagaactctttaacaatctctttctaactccttaaattcactattttatttacaattttttatcaagttcatttttacaagtcaagtcactttgattttacaaatccttttgttttttcttctagatccactctgccactcacgaagttttttttttttttggtaaacaataaactttataaaaaaaaatgggtttatgatggaaacaaaagggtcccagttcccttaaaagaaataaccaaagcatccaattagcaatatcatgaggcgctctattaaaaatttaaaatctcgggatctaacatagtctctaaataagtggaatatacacaaaatatggtttttttttttttttttttttatcttacaaaatgttgaaactttcttttgttattgaaatttgtcaataaaataggagagatagtctcatagttacactaattaaaatttgtcaataaaaatcaagtcatggagaagcttcattgatttgggagtaggtcaagatcgagagatatgcgaaggtctacctcgccttagttcagcttccaagacacggaagccttattaccgctcacaggctgcccaagcgatacctggacaggtactttaatggcctatcgtggacaggtactcacaaccttattaccacttcaatttgttcgttaaaatcgaccaattggatcttctcgtgacatacatattaaggacatggttgttcaattgagtgggagcgctgat

SEQ ID NO: 19625 - DNA, 2044 bp, Cannabis sativa
tatatatatacctgaaagaaggaagtctgcgaaggatccaagccagtgtttccagggggaactacaacgtcgataggagcaacgagaccaacacgggcaggggctcccacctgacatgacaaacatatatagcacacaattaacaaggttagtgaatgattaaaatgataaaaaaattaagagaaaaaaaaaaggccactgctatacacacaatttcaataatatatgtttatccaaaaaaaaaaaaaaaatcactaatatatagctaggggtgatcagaaaatatatacactacacacatatctacggatccgtgtgcaaaacaaaataaaagccagaatcattattacttaactaaaaactctatcaaaagagactaattaaggctcagtagaaggaaaaagtagtggaaatatttgctaggaaagtggtcgtagacttgtagggaaaccaaaataattaagaaacaagggactcatggtcagtacgtattgtcagtgagagagtggaatgggcgtgaaaaggcaagcatgagcatctccaaataaaagtaaattttatttatgtatttttcttttgttatttttgaaaccgcaatttattcttgttaatttcaattatatttattgactaattgcaaatttttttggtcagaacgttttcttttcattttaaattttattaatcttttatagtacctgtatatttttttccgttgtatttccttcctaacaaacatatataataatatataaaaatcccaaaacccataggaaacaaatataataatgaataatatatagccttttaacatcgttagtattagtttattatatttctactatatatatacatacagaaaatccattcaaaatattatgggaattatgtaataagatcacactattttcgcaatacgagctaataattaaatcacaaaaagaaagaaggaatacacaaaggaaaaataaaaggcgttaatagagtgtcagcgataatcgtgtcatgtaccaattcaggcaaacgaaaaaaataatcatgtgtacctattcaagcaaggaaaaaaaaaaaaaaacctattcaggcaaaagaaaaaaaaaataatcgtatgtacctattcaggcaaaaataaaaataagagagagataatcgtgtcgtgtaccttgtactggcccacttctttcgctacttccttcaactcacccttggtaaaaatcaatcccacatttccctaattcaaaaagtgaccagaaaatgtacacagtacgatcattagaatactaaatgcaagcaaaaaagaaattccaaaacgttaaaactcatttgtcatttttgagcaaacacactcaaagaaattaaaagttcatagttaatccaaacatggcaatcgcagatattgttcgaaaacataaggaaagaaaattgtaagagagaactgtatttagaaaatcaaagataaaattaatatatacacatatatatataccagtatatgttggatcagagttttcttgtcttacaagaaacagttaaaggttatactgatccatttttgtttttctttaacgatcgatcattttctatggtttcactacttttatgagtaagaatactggatgcgacaaaggaaaccaacaataagaagaaggtagatacaggtaggtagctagtattgtaccacgagaagaggaaggagattgagaacggcgtcgtttccagtctgttcagcaaaaagtttgatagtgcgtttcatcatggtgttcttgcccatgagcacttcagaattgccgcgcagacctttccttatgctctgaaattgcgtcgaaccaacattgtcagctgtcacgataagaatcttgctatactcttccagaaatcctcggagctttctgtcgtaagaagctttcttctggatccgagagggtttcactttcacagccattaattatcagagagaaagattaagccacaagaaaaaatggtgaaggataaaatgggttttccctttttataattgcttgaaatggaaaaaccttaataataa

SEQ ID NO: 19626 - DNA, 4220 bp, Cannabis sativa
cgttcgagtaacagtttttgtttttaccagatgagagattgtaatggatggagtattgagattagatggatggccaagggtgtagttgcagggtgagtttgtgtagttctttatctcatgagcatcaataccgggtgttgtgcacaagaagcccaagtaatcttcgtaacctgagccacggaacagaacaccaaaatattaggagttaggtagattccaaagaactgtgccaaattcttattttgcacgatgacaagaattcagttggaaatattgcagggacagaagaaacaagctaacatccaagaaaactatagaatcagagaaacagctacagtcccataaagcaccaactgtccatctaagcccttagaaaatgtcaacatagttttcttttaaaaaaaatctctttgttgaagtccctagcacgactaagccaatgaaatccttcaagctaagaaggccttcattcaattagactacactaaaagtaatagaaaagcaaagaaggagaacatacccgcatcaaagatgagtccaggatctaatgcagctcgtggattaacatgaccactaccataatcaaaaggtgttgctgtgactagcttcaaggcttcagtttcagaatattgttgtgcttgaataggtcttcctcctctgtccattgtcgctgttgttgtcatcaatgctgatttaatggcagcagggctccaggtaggatgcttctgcttcacaagagcagctattcctgctatatgtggtgcagccatgctagttccagatatcatggcaaatccctctcctgtcaaaatcaaaagtaaataatagcaccaaagattttgtttttcaaagcgtctttctattttttttttcttttccagcttctgataataacaggcatgtctacaaactaatgtcattagtttgtacgagaacacagagaagtaaatagttctagagacatttcacatggagtacaaactaaggtcttggaaccaaggagaaacgtatcacaatattactaatttttgttgtaaatcctaagaatcgaacttacaagaacttcaattttgtgtactatcttttaaattttcttttttcttttggccctggcagttcaacactctcagtggccccaagtttttgagtcaagggggattcgaacctttagaacaacacttaccagcactttccaacattcttccttgccattagaccaccccttggggtttgttaaatgtattatcatgtaaattaatcaaattttgaggttagtatccagcgaatttagctccttaataagatcattaatttatcaaggttatcccatattttcaccatgctattaaagcgtgcattgccaaaattctagttaaaatggtcccctatttagcaccattatattgtggtttctcagctatgttaggtggagagacaaacatgggtcgatttttgggatccagaacattagaatctatcagaataaagtaaaatgcttaccagcatagttaggctcatctgttccatttggagaccatgcagcccatataagagaaccaggagctagaatatcaggtttaagaagatctgcatcttggaaaccaaaatccttaatgtttggcccccgagccgagtatatagccacctgaggtgctgatttatggagtattggcatcaaaccatctccaatctttccttcacctttgaagcttttcactcgtccggtccagtctcttgatgtagatatattataataatctatgagatcctacagaacatcaatcacaatgcaccagaaaatattaagaaaaggctggtgcaagctagcaaaaacgtagaaataacaagaaagaaaatcaagataaaaaaaatagaagggtacatttatcagagaaccgagcgaatttatgatcaacaacagtatttggtcaagataactgaccaatgcaaactcatattaagggaaacacttggatcatacactggattctgtttcaacaattatttaacagctttaaagtacaggagacaacttgaaagaagcaaataagggaatagatacctgtgacttgctgacatcagtgataagaattcccggaatgccaacaggaacaggatcaaacttcatccctggagaaacattttccacagcaagaacgaagccagctgcaccaagagtctttgctgtttctgaaactttcttcattgatgccgtaccaacagcaaaattgaaggaatagccacaaagaagaatatttccctcaatcaacttcttgttcagaacttctggtctctggcagtctgaggggctatatttcattactgaggaatcgagcaagacatcgtttgcagcaaccaatgtatatgttccatttaaatgtgttgatgctgaaacagaaaaataaaatacaattcataagaaaataatgaagcaagatcattgcagatcttagagacagaattttaatgataagaaaattgcaactgccagtgcatggtgggggatacagaatgcggaaaggttgccaaatccctttcattagatttttatcaatacgtcccaggcacagtaagcagaagcaggctcaaccttacagcagagtggcactacttaactgaatcaccatgccattcattaaaggtaccatttctagtctttcacgatgggatttcactcaagaaaagtaaatttgagttaatctagaattatgaaacccaggtggaacttagttacaagtcagcgccggcaatattttctttctttaatcattttatcttcacatttgcttatctactacccgccctttgtatggtcaaagtagaaatgtttcctttccatggaataatgaagactttaatcctctgtcgaaagaatgagctctatttaccttggatgtttatggtcattttatattaaagaaatcatacaatgaactacgtttccaaccatagttaacccaatcctaacccccacatttgctatgaatgaaccagaatcttcatttgtaaacccaatcctaacccccacattgtttcattattttagtttgcagtgaaaaagagggattgggtcactgcaaactctgccaagttagttcactataatatgatgaaaataatctagtacgtctataatggccaatattcttctgggattataaaagctgttatttcacaagtagaaaacaatgtatcctcgtttattgtttccagacgttcaagagttctatataaaaaaataatataaaaataaaaaaaagtgcttggcatgtcaagattcatttcttcctattcataataataataataatatgtttaaaagacttacgagacaatcccattccggttaatatttttccatttccaagggtcagatggttcttgtatctgcggtcatcaactgcagcagctacagatgttatccatgggctataggaaaccagagtttttggaaaaggacctccatttccagctgcttgtgcaacaaatacaccagctttcactgctgctaaaagtgtagcatcaaaaggattcagaaaagtggtcttcgttgttgctggtggactgtttggccctactgataggctgagtatatccactccatcgtatacggcctgctcatgaaccacttttgagtaagaaccaaccactagcataacgcataaccacttacaggagctgcctaagtatgtatgatcctattcaattatcttcactaactacacatgtactgctttatataccacaaacagctgacacagctgtcaagaaaaaagttacaaaacatatataaagacattcttttatacagaaataaaaaggaagaacgatccatagagcaactcatcacataaatctgtaagagtagaaagaaaaatgttcaagggaacatggctggtctagctatggtttaattggaactcaatgtgattctgataatgaccgtgaatggaaaaataaaaagagcacacaacaacataagtctttaccacatgaagtttatcaatttagtatgtttattccatacctgatcaattgcagccactacatctgcaataaatccaccaaagagtctgtaaagtgctttatacacagcaatcctgatcatggccaatcaagaaaaattaataaaggagtttctcataagataatggtggttctattggcactcacttttcactaggctttaatgttttaaataaatttaataaaattttaaa

SEQ ID NO: 19627 - DNA, 5650 bp, Cannabis sativa
ttagataaatattttatataaattttacaattgtgcatattggagtataatgctaaaatttgatgtaaatctaccgcaaagctactttttgtgccaaacataacacaatttttacatctcccattaaaaatagtttagctatcttcatccagtgaaagagcaaatttagctatatcataagcgactttattggcatctcgttttacatgaaatatgccttacttgtgattttactcatgtatgcatgtgtgaagaaacttgggtttattcttgatattcatggcatgattgtgttgatgggttatgaattgtattcttggtaaatttagaatgagatttttaggttattttgtatttgaaatctatttgtaggttctgattttagttgtgttcaagcatgaggttatgggatttgatattcttggttgttcacgtttatggagttgaaattgtggcactttgtgatttttgatttggttttagtttctgtcaattgggttatggtctattgaagatttagacctgattgagctgttgttattgtttaattgtgtggttgagcaagtttgagttcaagaactcaaagttttctcaacaatcgcactttttgattcttggtgcaattattgtgtttgagctgtaaaatatgcttataatgttatatgatgatgctctagaaagtttggtggtgattggagaagatttgagcaggttatggaggcttaaaagttgagatttttcgtgttatttctgcccagacaaccggaattccggttggtttagggttgttccaactggaattccgattggactgtatcggggaaggctgaattttgttttagtcataacttttgactcgggactccgttttggacattctttatatcgttggaaagctcattttgagctctatatgttaatctataaatgtaatgctaattatgtgattattgaaagtgaattttgggattaaccctatttgtgaaatcttgggaatgtgtgtctaggactaccgacgcttgttcacgaacacccggagatttggaatttcaaaatttatgggacatcaggtaagacagtagttagcacatagagttatgagcggtggcgcttatgttgaatattatatttgtgattcattaagaaccgggattagggttattaccctaaagtgagcgattttatggtctagggttattaccctagtaattattaaggtttaaatgctatgccatgctatatatattgaaattaagaattatgcgttcaaggcataatttggttggactcggtaattagattcgagatgaaccgttctaaggctttactgtaattagacgtgtgagcgtaacacgtaggtctatgctacatagacatatataggtgtgtgagcgtaacacgcaggtctatgctaaatagacaataagtataatggcatgattataatgtatgtgaaatgtataattgtgtttattgatatttatactgtcttgatgggcttagctcacaggtgctctattgtgcaggaaagggtaaatctatcattgaccagccatgagtgtgagggtttggcgatgcttgtacatgttcggaccacactagaccaagcaggttggggtctaccactgaagtattttgtaatcatgtttttaccgcttaggtcggcacgttaaatagacttgtaatattttatgaaaatttttacggaatcccaaaacatgtatttttggttgtttgtaaagttaatattattacaaatttacttttcatcctgttgtaaataaagtttaaattttcccgcgcttacctttctagtaattctgtagttaggggattagggtttcataatcaattgtcatagtgtgcaaaattcttagggtgttacaaaggtggttgatgagatggagaaacattacgcaaatattgttttggaagatgaggacgatggagtggaatttaataatattgaggcggaggaggttatggttgatgatcggtggtatttagtgggacaatttttaaatgctcgtgttttggattttgatgccatgggacacactatggttggtttgtggaagcctaggaaggggttatttgtgaaagagttgggacctaatttatatccattttaattctaccatgagatcgatataaagcgggtcatcaatgggagtccgtggacgtttaaccggatgccgcttctgtttggaagagtgctaagaggaggggatcctaaggcggtacctttaaatagactggatttatgggtgtaagttcatggcctctcatcggagtttatgacaaagcgtgtagcgttggaagcggctaaaacgattggtgcatttgtggagacgaatccaaaagactacaatggtttatggcatgactacttacgtgtttaggtcactggtaatatcgatgcaccgttgaaaagaagaatgaagatgaagaagactagaggagattggttctgggccaatttcaggtatgagtttgtcctaaatttttgttacatttgcagtatcattggtcactcgaaaaagttttgtcctagactttttgacactcctaaataagagatcatcaatccgtatggggaatggatgcgtgttcatcctcagaagaagaagtatattgtgagttctcaaaatttgagaataggcacggttgcggatgcccaatttgatgaaggtcgactggaaacttatggcggtgttctagttggacgatctggggatcgtggtggtggtgtcatggatggtggaaatcccatgaatcatggaaaagataagtttcctagtttagattatgttgtaatcaatattcagtcaaagggtataataatatccagggtgttaatcaactccctattattgagggatctgttttgggtaactcatctttgaatttaaataatgctcctagtcatggcattagaatggagcatgctgccaattttctattgggtcgtggggttgatacaaagaggcgcaagcccaatacttgtgaaggctttggtgatggtttacatgatatggaagaagatattgaagatagtgatgtcatttctgaaaataatgggctcgtgtttggttctcttcctactggtttgaatcatacgaatactgttcttatcccgaagaaaaagaatcttgtttccataggggatttgaggcccaacgccttatgtaatctgctttacaaagtttgtttcaaggtcttggcgaaccggttaaagactattcctcctcttgttatctctgaaaaccaaagtgctttcattctaggaagactgattacagacaacattatgatctcatttgaggttatgcactatctaaagtggaagggggttgggaaggagggttatatggctttgaaattagacatgagtaaggcctatgactgtgttgagtggtattttttgagtaacatgatgcgtaaaatgggttttcatgaacaaatagtggaccttattcttcaatgtatttattcggttagctacattattactcatggaggtcgtgaggtggggccaattttgcctggtagaggtatccatcagggtgatccattgtcaccctatcttttcttgatctgcgctgaaggtttctcatctcttatcaagcgattcgaagcctgtggagatttacatggttgtcatgtttgtaatggtgccccgactatatctcatatactttttgcggatgattgctatctctattgtaaggctaatgatacagaagcctctaacgtcatccgtttacttcaggtgtttgaggaagcttctgggcagcgtgtcaactttactaggtttactattttctttagtatgaatactacggctgccaccaaggatagaatgtgcactttgttaggtatgatggacgctccagctgatagcttatatttaaggctcccttgtactatgagtcgtaataaaaatgccatttcgggatttctcaaagataagatgcaaaaatgcattcaaagttggaaggggcatcttctttcaaaggcaggcaaggaagtgttgcagaagactgtggttcaagctctccctacttatgccatgtcggttttcctttttcctgttgagatgtgcaacaagcttgaaggaatgatgagtaaattttaatggaacttcgatttgtcaaagacacatggtgtaagctggatgagttggcaaaggctttgtcaacaaaaacatcatgggggccttgactttcgtcattttcgtgatttcaacctattaatattgggaaaacaagcttggcgcttggttacaaatgatacttctctagtgagtcgtgtttactaggctcgcttttatcctagaggtaattttctttcagcttcccttggtgacaatccaagcttcatttggaagagtatctttgaaactctaggattaattaaagttggagctagatgcaatgttggaccgacacttctattttttttactagggacctatggcttccaaatggggataatccctatattacctctcattttgatggcttggctgattgtaaagttaataacttgatggttgtcggtagtaggaattgggacatagaaattattaatgatctattcaatgaaagggattgaaaattgattttttcggtcccagttagtctcaatgctgcttgtgattactggttttgggcccttaatatctcggggctataccaagtgaaggacgcctataaatttttgcataaaaacgatcacttgctggtattgccttctgatttagatatgtggaagattgtttggaagcttgctgtccccccaaaagtgcttcaatttctttggcccgctctctcaaacgtcttgccaaccaaatcacagttggtatccaagcatgttccagttgatctactttgtccatcatgccataatgcggaagaaacaattttccatctcttagtctcctgtccttttgctcactcttgctggaatcgttcatcggtcagcttttttcacttcacgggggctgactttcgcacttggtttggactgcttcttcagtagtcttttgctccagttcgtgaggaagccactatggtgggatgggcgatctggaatgccatatatgatatggattggcaaggtaaacatgggtctactgctgaggtggtgttgtcagtcagaatcactcttaatcaatggagaattgctcagtctaaaaaacatggtcctttgtttattccagtgggaatgaatgtgggaagcgagcattggtctaaaccagcttttaacaatgttaaggtgaatgtagaaggcgctatttttgcctcggaagggtggtttggttttgggagtgttgcccgtgaccataatggtcatgtgatcgaatccatttctcaaagtaaacctagacaagtggatgcgactatgactaagatttatggcatcaaagaggctctaagctgaattaaaagaaaaggttgagttgatgtgcaacttgaaacccattgtttagttgctgtcaaagctttgcaaagcacaattcatatgccttctccctttggcttattagttcgtgaatgcaagatctacttaacctctttaaaatctgttgagatttattttatcaaacgttctgtaaataaaattgctcattgtcttgctcgtagct

SEQ ID NO: 19628 - DNA, 3338 bp, Cannabis sativa
accttaagaataacatacatataaaattcataatatatcatacaataatatatcataatgaatcgactactttgatttttatgagttttgtttactatttttattgtgtactaaatgttattagaaatataaaagtgcaaatagatatatattttttgaaattttgcaaatagatattaaacgtgaaaatgtattgtatatttactttacttttaatcaacaatgatatgatgaatatataagaccttttggttattaattttcaaaaaagttatgctacttcaatctaaattttatgcttaagaaactaacacatatttatttgatttaaatataattcatttaaatttttaaaaaataaaatagtattaactaaatgttaattactaacaactatcccggccgctaaagcccaactgaggcgtggactcagtacgaacaatttatgttattggttttgttaagcttgaccctcaaaatagggcccaagcatgacatattattatacaggtcgtgtcagacttctattagagatttgataaatatgggtcgagtcggcccgtttgtacatttaagtaaacttatatgaaaaaatagtaatttattacttaattatcattaacttaaaagttataatttattttatatataattttttttttaaaaaaaaattaaacatccaccgcgaagcgcgggttgtttactagtttttatatgattgtgtgtagctattcttgaaaaaagatgtgaaagtaattaaaattataaaatacacatattttagtaattaactcatcaactgcaataaaaaaaacaaaaatattaagcacgaatttgagctagtataagaaaataagttggtctatttaagaaaaagaggccaacctgaataaagcacaacactaaactgtcgagcttgcgggtcgtgccgggcctaccttataaaattgttgcacgacatggcacaatccatatttttctatggcacgacacggctcatattttttttatggcctaatatgacacaatctgtattttaaaaagcccgaaaaatataagtcaacctagcacggcacacacatatttatagcttggtgcgaaactatatcttctatgaaagctactaataaaatctgaggacagtatacttagtgaagagtacccatgtttgcaacaatggtggtaattcttcaaactcagaagtagtgtaagagtgtccagtaaggtctacaatgtcatcaaatgctccaatcttacagaaaaatgattcaacttttgacttaatttgtttataaattagtgaggcagcatctatagattgcagttctagacctccacacataaaacaagaccatcgtttgtctgagtgtgatatgtcaccttattcattgtattgtgtatacacataaatcataataaaagaattgtaaatataatatacacgtacaaattagaactactcagctttgtttgcatacatgtattgtacatacatatatgatatatgtgtgcgttgaaataagcgcatacattacaaaaatcaaattgcatagaaaagaaaaccacccttaagttaccttgtcatcccgtatgacaacaattacgcgtatgcgaacagtcatacaaaagcatagcatttctcacttttgctcttggtgggtcaagcattccaaccttacaaagttaccataaaagttacagggaatatttaaattagccctactctaatatgcaattggcctttgtgttcagtgcaaatacacgattgactcgtatgtttagcgcaaatacacaattgacctgtgtttagcacaaatatacaattgacctttgtgtttaacacaaatgtgcgactagcccctgtatttagcgtgaatacgtgattggaccctgtgtttagagcacacgcaatcagctcctatgtttagcgcaaagacaaaattggctcatgtgtttagtgtaaagacaaaattggctcatgtgttagtgcaaatatgaaattggctcttgtgtttagcgtaaatacaaaattggctcctgtgtttagcacaaatacgaaattggctcatgtgtttaccacaaatacaaaatcggctcatgtgtttagcgcaaatacaaaattggctcatgtgtttagcgcaaatatgcaattggctcctgcatttagcgcaaataagcaattggctcctgtgtttagcgcaaataagcaattggcacctgtgtttagtgcaaatacgcaattggctcatgtgtagcgcaaacacacaattggctcctgtgtttagcgcaaatatgcaattgactcctgtgtttagcgcaaatacgcaattggctcctgtgtttagcacaaatacgtaattggcccgtgtattttacaaaatggatcaaattaatactctaagcttaattttggtcatacaatttttcatcaaattgataccctaagctcaatttttgaaaggaacatcacatctggtcaaacgagtacttcagatttagtcataatgaaatattgtttgatcaaaattaagtatgttttatcaatttgatctatttctaaattataggacttgaattattatttaagaatacacaaagaccaattgcagctaaacagaggatccatttcaaattggtatgtttcctaactaaaaatctaatgaaatttgtggaatcatgtaattactagcaaggagtatccacatacataaaaagaagtaataaaaaaaaaattgagattaatcaaatataaaagaaatgtgttgagttagcaacaaacatagttaaatatacctacgtttcaatcaggttcataatgaaaaataaatagacaaaatcagagagcatatttatttaattatttatttttaaaacaaaaccaagatgactataggctaaatcaaacagtaactaaacgttgctttcatatatctgctcaagtacacattagataataattattttcttcaggtagagaaagaagaaaaaactccataaatgttactgctaagaaatcagactagcatagtatgttatttcttgtgtaatttataaaaaccttatatcgcttattgaataataatgttaatgtgtttgctatacactcactatacgatctcttaaattaaataagatatttaaacaacctaagcagccaatatataatacttaatgagcaaaaacaaataaacaagtaaactacacaaaccactatacagggaagcagaagaaccatcatcatagcataaaacatttgcacctcgaaatgatattgtcaggatcagcaccttgtaaaaatatatctatatatataaatatatatatatttgaagctgaat

SEQ ID NO: 19629 - DNA, 4680 bp, Cannabis sativa
aaaattaaaaattgtataattccaaaaatttaagcttaacattataaatttataaatttcattttttacaaaaatgtttaaactacaggcccaacagcaaaaacataaatagcaaccctttacgtgtttttaccctaatcccactacggactcatctctctctcactcaccaccacattcagagtcttcttctcaggccctgacacaactggtcacgcacggctctcacccaccggtaccacctccaacaagctttctctcttacgaaggtcaaaattagagaccatttttatatctgttacgtaagcatttatttaatagggagaaaaaccaacgtggttgatcttgttcactcacgtgtaaattcatgtgattaagcctctgttttgtgatttcttatatagactacactatacatgtttcgtgttttcgagacttgtttgcattttttcaatgttttgattttataataataataccttataattcacgtaactttttttaaaaaaaaaaaatgcaggaaggaaatttttaatgggtatagagaatcaaaggcgtaaagatgatgatcactgtagattggctagggagagaagttttcgttctcgtgcggcgtggaaactaatagagcttgatgacaagtatggattgtttcacaaaactggggctgttctcgacctctgtgctgctccaggcagttggatgcaggtagccactctacgggtgccacgtggaagccttgttgtgggtgtggatttgaattgggttaatccaattccaggcgccatttttattaagcaggacatcaccaaaccccaatgcaagtcggagatcaaagggtgatgaggaagtatgagttctctgccttcgatttggttctgcacgatggtgccccaaaaatgggcggtgcttggaatatggaagccactgttcagaatggtttggtcatcgatgcccttaagttggttactcattttcttgctcgtaatggtacatttgttaccaaggtattaatgtattattttctcatcagcaaagcaaaatcctttgcacattcaaataattaataataatttactatgcatttgtcaggtttttcgttctcaagattacaactctgtcaagtattgtctttcaaaggtaaaaattttaaaaaattattgttattggttggatttgttaggatctacttgtcttataatttgaaaattgttatatagttatttgagagagttgtggtgcacaaaccaaaaagtagtcgtttttcatctgccgagatatttgttgtagctttcaagtataaggctgcagcgaaaattgatcctcgaatactcgatgtgaggcatctatttaaaggagccatagaaccccaaaagaagaaggtaaagtctcttatgaaatgtaatctgtacaacttacttttattattttatttataattataatcatgctaatacgattgcttgttctaggtggtgcatgatttaggacgagtgaaaaaaaaacgacatcgtgacgggtaattctgtttctctgtttatataattatggcttcgtttggcaaagtttaaaccttactaaaaagccgtaagaataagcaaaaactgtgacaaacggtgcttgtatatatgtgttacaggtatgaagatggagacacaactttaaggaaggtgtcaacagctgcagaatttatttggtctgaaactcctcttgatatccttggttctgttacttccatatcctttgatgatccaacatctttactcatcaaggatcatgttttaacaacacaagaggtagctaattgcctaactatagttagtttgttgttggtttcgatttttctttttattttttttaacaaaataagtttactcttttggggtcttaacacaagacttttaattcaatttatgaaatctttgtaggttaaaattctttgtgatgatctgggtgtcttgggtaaacaagactttaagcaccttttaaagtaagttggttttttttttggccctctaattgctcattttagttttgtttgatgatttgtatatttcaattcttttggtgatgaaggtggagaatacttataagaaaggccttgatagtttcagagaagactgaagttactactactactactgttacaaatgttgaaaatgaggatgaagacgatgataaagtagttaaagaaatggaagagttgacacatgtgttggagcgtaagaagaaacgggtgagaaagcttcttgcgaaaagacaagctaaggtttgttcccatgttcatctccttcccgccctcatgcgaaatgcaattgagcatagattttctttgtaaaaattccaattctaatttctgcataaagagtggcctagtctctctagaatataagattgaaagaaatgttgcttttagtttgaggtaatgaaatagaagagaatgaaaagcaatcaaattttcatttcattcatttatttagcagcattttaaaatattagaaagtcatctatagaatgacttttccactatttcggtgtaatgacattcattttgaaatagaaaaaaatgtcatttcaatgtaatattaattttttttatgcatttgaaattttatttttattcccatttttattcttatattttaattcctcgcaatgaaaaacaacctaagtatatttgatgtatatcaagttgttagtacacttgttttcagtaatacaaattttgtatgattgaactgtaagttattgatatgtgatttttatgtgttttatatttgattatatatataggagaaggcacgtaaggcaacgagtatgccaatggatggagtggatgatagttatgttgaccacgaattgttttccctctctaccattaaggtttgttttaaattaaatttcattattgaatttattcttgtcatttgcatctccttcctttggagcatatttcaacctttcatgttaccatgtacatcaaacaaattctgatgagtcaggtcttataaaccacattttaatcttgttcctttaagcacatatataatatatattcattactattaggcctaaattgaattcatttgcttaatcttttctcttaatttttaagattgtgatacaatttccctattattaatacaatatctactttgaacataacataacatgggtgtcacattatgagttattagcaaaatctatactaccctctgttttgttggccttttaatttcatttcattatgtatctcagggtaaaagcgctcttaaaacagtttattctactgaacttgatgatgattatgatacacatggtgatatgggtgatagtgaaaatgaagaaagtcgtaatggaagtgaacaagatgatttatccagtgatttagactttgatgaagagcgaaaaaggtgaagtttctctactatttttcatggatgatcggcattattaaaacaacaaactattgcattatattgtgtgattatttattcttaaatttcagatatgatgaacaaattgaagatcttcttgaacaagcttatgagcagtatgtctcaaaaaaaaagcagcaaaataagccttcaaagcgattgtgctctcatgatgtccaacttcttgagttatgtagttcttcccctttaaaaactaaattagttgtgtaatattgttgttgatagattttattttttcaatcatgcagagtgttgatagtgatgatggaattattccttctgagtatgattctgatggtgatcaagaaatgaatcctcttttggcagtacttgatctaggcaagagtctaacccaagaagagataacaaagaagtggtttagtcaggatatcttttctgaagctgtggatgatgaaggagaaggaaatgtagggaagtttgatagtgaagatgaaatgcaagagaagattgttgtgcaagtaaagaaggcacaaaaaaagaccaagaacaatgatttcgagatagtacctattgcaccaactacagtttttgattcagatgatgacaacgatgatgttgatacgaaggctgagatcctaagttgtgggaagaatatgttgaagaaaaagcaaagggatgtgatacttgatgatgcctacaaatatatgatgtttggcgatgaggagagtctgcccaagtggttcttggatgaagaaaagaggcattcacagcccataaagcctgtcaccaaagaagaggtgaatgccttgaaagctcagttcaaagaaatcgatgctcggccagcaaagaaagtggcagaggccaaagctcggaagaaacatgttgcaatgaagaagcttgagaaggtgcacaagatggctaatgccatattagagcagacagaaatttccaacatatctaagaataggatgattggtaagctatataagaaggcaatccctaaaaagcctacaaaggaatatgtggtagcaaaaaaaggtgtccaagtaaaagttgggaagggtaaaacccttgtggataggcgcatgaagaaggatataagggctgtcaaggccagaaagagtaagatggctaaaggcacagctcaaaaaaaggccaaagggtttagattttaataatttatttatagagtaatttgcggcaaaaccccctcaactatcaatttacttgcaaaaaaccatccaacctcatattttggtgg

SEQ ID NO: 19630 - DNA, 4652 bp, Cannabis sativa
  modified_base (4112)..(4113): a, c, t, g, unknown or other
  modified_base (4211)..(4217): a, c, t, g, unknown or other
ttttttttttttttcttctcatctgttttatattattttataagatatataaatttttaacatcttattatgatcgttgatttttaagtgtcaaatcattgattaataattatttaaagaataaaaatgggagcataaagcaaaaccggggaaagaaagagagatacagagagaagggcgaggagtcaaattttggatgatgatgatgcggccatattcgttatcttcttcatcctcactcacagtcaccccgcaaaaccctaaactttccgctgcccattcattcttcttccctcccctttccggaaccactgccttaaccttttcttctaaccctactcacctcaccaagagactatctctgaaatgccgtcagagtgaatacttcgaccagcaaaagttggctaccaccactgctcactatgataactcctcctcctttgctccacagactccttcctctagaggtatttcttttagttttaatatatatatatatatatatatgtatttgtgtacgttcttgtttgactgcccagagaaaaagttagtgatgttttttgtttggtttccgagataatattggataaggtagcaacaatttaaactactctgaacggccccttttacttatttttaatttgaatgcgttcattccgacaaacaagatggcttcttactttactcgactcaccttgcccaaattcatttttgtggctagagcctagagtttccaaggtggatgaaagaacaaatctgtatacacacacacacacgtgtaaacaggaccaagtatagtttctcattttttctatggttgatttgtacagctgatcaagtgccggctagattctacgtgggccactcgatatacaaaggaaaggctgctcttactgttgagcccaaagctccggaattcacagctctagatgtatgtttcgttgtcttttttttttttcttttattaattcctttttgatcgtgcaactttgatttgagttccactgtgccttgttgatatataactcttgttatggcattgattcttctgcaatgatactgggtcttccagtcaggggcattcaaagtatccaaggaaggttttgtacttcttcaatttgctcctgcagcaggtgttcgtgtatatgattggagcagaaagcaggtacacttgttttgttgtttctaagtgaatttactttgtgcagatgtccaacctcagtatattagtatgtcctatgtttttgatttaaaggtggatcatttttctttttctttccacatgatgacatttttagctttctgcaaacatttgattcagactctcatataaaagcttcaaggttaggctccaatgtgtgaatggaatcgttatggtataaggctatcattttgattttgacccttgatgttatgattagattttgtgaaaagatcatatggtgatagacagggtgtttgggcttctgatgagtaggagcgaatcggtaatgtaactgaaaactcgttactgagtatgagtatgtgtgaactcgttaccggcgggtgtgtgtgtggggcaatgaattcttcctctataccggtttggattgaatcatgttcctttcttttccattccattttgttgttgggaatgagggattcagattcacatctctcagaaatagctttcaaaataaatattttctgtcagaacctagtcccgaaaggcaggcattgctctttcttttcttgctttccttaaggcttgtttcaaccatttgacacgtctaattatttctagccacattgaccataatcccgaattgttcctagcctaactgcttctcatatatattatattattttacacatcttttattattttgcttgtcccgaattgaccatttgacacatatatttattattttatttttgtaatttgtgcgtgcacatcttttgaatatgaaactgatgcttacactgattatttgtaggtattttccctatcagtaacagaaattggaaatctagttagccttggtgctactggctcctgtgaattctttcatgacccttttaaagggagaaggtacaatccttctgttgctttgttttgtgtgtggttgaaaaaaggttaattttatttgtctcgagaaaaaaattgaagaggttgaagcgtgacaagttaacatattatttctaccctttttgctatttttgcttattataggtatgaatgggttatttgacctcttgttaataacaagacgaagtaaataaagaaattcttttgtttttagtgatgaaggtcaggttaggaagatgttaaaggtggagcctcttccagatggatctggtcacttcttcaatctcagtaattctttttatcattctctttcgttgattcatatcattatttattttcttcttttggacaatgtaagctctgttatgtttgatgtttgctcatgatttcaatctcgttttgttaatttgtatcagtctatgtatttttttcttctggataatgttagctttgttatgtttgatgttcattatacacgaatacgtgtttgtctcatacaatagtacgtttttcactgatgtaatgttaaaaagtctttttttttttaagtgtagagaatcataagctgataaataaggtgtccttggtaatatactggcagagctttaatatatgcatgtcataaatgagagtttattaaggttcatttttttcaggttattgttttttttttcttttccaatgtctctttgtttgactaggcccgttatgtttaaatgtgcttttagttctcttttgtatgtgatttatttttatatatcctccttctcatctgtattgtatgtaaataaattattaattttaccatgtggtaatcttgtaaactttacaaggatatgaagttgagtttacttataatattatttttggcgttgcaggtgtccaaaacaaacttattaatttggatgagaatatctatatcccggtcaccagagcagagtttgcggttctgaattcagctttcaatgtaagatttgcatctatcactatcatactcggctctctcttttgttgcttatgatgttgcgagggctgtggttcgattcctcacaccagttcatggatctcgaatggtttgatttgagtgcgagtgcagggttggaacaccttcgagtcctcatctaccgattctgactttaattatatcgtctcttctcttgcagtttatcttgccacaccttttagggtggagtgcatttgcaaactccataaaaccagaagaaatgagccgcgggaataatgctagtcctaaatatggaggagattatgagtggaagcgatagtcattgctttgctaagccttttctccttcatacatacatggtgcgtactgtgttgtgtaggatggaattttgagatgggattttcccttgtatttatctatccccatttagtaatatcctcccaaaattttgcaacattttgattttactttttttaaattgtagaaatgattagaaattgactaggaagtaaaacggtttatcattacaaaagcttatatttgctaatttaccacattcgattgggccctctctctagttacagttagagagaaagaaccctaaattactattacacaatttgtcatttcaaaaccttcttcgtttatttatttccttgttttgaatcaatattttcttacgcttgagcattcccagaggtaaaaatatatagctaaaactttaatttccttttcaatcaaatgagctacacttttctctattttagctaaatgtagctacaaactatttatgagatagatttaaaaaaaaactatttatgagaaaatattttataatatatttttacattgcttttgttttttctttaaatagttaatttttattaattttttaatattcaattaataaaattgtttgaagatataatatttaaagtgttgaaaataatatagagaatcttatatataatgtaatgtaaatgtgagttaaaataaaaataaaaaaaaaataaagttttggtgaattattttaaaactagtaaacatcccgcgcttcgcggcggatatataaaatatttnnaattatatataaaaaataaattgtatattttaattagatataattatttagtaaaaatatattaaaattttaactttactattaaaaaatttgtgacnnnnnnncttaaaatattaaatttgttgccttgaaaaatagtagcataaatttttatttatagtttaatttttagtgcattttaatgtttgagttttagtgttttactggggttgtaatatttgagtttgtgtttatgagatctgttttttttttttaatttatttttatagatttcgagaacttgaactttgatgttgtttctattgattattgggatttgattttccatacaggaattaaagtttgtcttttcatttcattgattgaaaaatattagtacaaagtttatagaatgagaattttgaatatatgaaaataaaattgaaaaatagcgtttgaatcgagaatcaaagtttattgttaatcttctaacaaaaaagaagtttattgttaatctagaaagatgttggaagaagatgaaaaaattaatttttatttca

SEQ ID NO: 19631 - DNA, 2694 bp, Cannabis sativa
tatcgattattagatctataagtttagttatattttgtacaaaaagtagtgttgtaatatttttacattaacttttattattgtattccaatgcataattacaaagtaactctttcattctttcgctcatcctctctctcaagggttagcaggtggaacttagatcctctttatgttttgggatgggcctctgtgaggtactcattttgtcccattagtgtgtgacttctcaccaaatcgaagagataaggtcttacatttgtatcattcttgggaggaagccataggtgaggtgccccttagcctgacatatttttgatgaagttcttctttcacgttgtggggtgttccccttggcatggccctatgaggggatcagctcaagctgccttaaatgactaaaagggcaccggtttagtgataggtcattctttggttgatctcgcaagggggatcactagcggagaacatggagttcccctcgttagcatgtatggctgatttccccttctttgattgttttcctttgcacttaaagagtgaggcatgcatttttccttcgattacaccattcaataccctttgcatgtcggccacttttgtctccaacctctggttctttagacggaggtcgtttatctcctcctcataacaacgagtttggaagctctaactcgccaaataaacttgtgcacacacactccaaatggttggggtcttgatattcatagcgaggtgggatgtgacatcgtgaaggtggtagtggttgtaaatgtgtcttacttgttaatggtttggcaagtgatgttaggatcctagttgagaggagcgctctggttggtagcacttggcctaccgaaagagtagtacacattgtcggagatcctaccagaggtgatggcctcattaaaaaatgtcattttttggggctatatatggttgtatcctaagggaagagacttctttctcttccccttcccttgtgcatatctctttgggaactgttagccttcgatggtggtagatttctcctcaaattcattggtttaactccattgaagtgcatctctatttttctaagacgcctcaaattccttggcatgatttcttagaaaaagtgccaaattattgactgtaaaaactcatcaagtaaatcttagttataaaaacaaacgtaaagagcttaagataaaatatctaagaaatattcataacactcaaatgataatggagtgaagagaatattgttctattgattatcaaaactcttttacaagtaatcatttcccaaccccattacaagaattcacatggggtatttatacttgaactctaatggctttgaaatacaagtagtctcaaaaattgaggaacaatgacctgacaatatactagggatcattgggttaaggagggtagtggaggttgtgttgttcgggtgtcagcctatattgaaaacttggttgccttcactacttgtacacgttgtaccttcttgtacaaccactttctctcatcgggctttgggagaggtgtgattgctctaaaggactagtgtttactttcacgtttaaactctttgcattccttgtttaacacataggactattgcttgggaattttaataagcgttgggaagttcaaatcgtaagaaatatgtacttaatgttagagagagaggggtctaggagtagcatggaggtcttgcaattgagatgggcttatgaggagctcttggaaggatgaaggttgatactagattggcttggtttggcttggggcagttgagctcgggacgggatgctgtcctcgcctagggcgagtaaggctagtcatgccttcattttatgctaacccctcgttatatggtaaaatacaattaattaattgtaggactttgctaatctaacctgtgtgaactttcgcctataaatggagtgaaacgtctatttacgcctataaataaggtttcactctattgtaaaaggctctctcttttgagttctcaagcacaaacgttactgagataaagaattcaccattgttataagcttctagaacaccccctaatacacagactcgtgcactaaaattttttaacacccgaaccatataaaatattttatccttctttatttctgaagttctcaacattactatttcttttatatttgtttagttgcagaaaaattctgtcaaaacagctaaaaatatttttacccatctattagtaaagcaagagagacgttgcaccaatcaactttgatggattcaaatagaagggaaagaatatctactccccattatttacgtatacatatttttcaaccaaattaaagagaaataaaagaagaaaagttagatgcatgtcattttatatgcttccaagttatgtggttctggatccttgtaactgcctacgaacaagtgcagtgtaaaggccatcatctcttctgagaagttcgtcatgagtgccactttctgcaatctgaccgtctgatatgaccgcgacactgtctgcagtctttacagttgaaagcctgtgcgctataacaagaacagttctgcccctcatcaaagaatccatggcatcctgtaaaaacacatcaccattattactaatatcacaattctctcttttacttccacaaacatgaaatggtaactaagaagctaataactatatggaagttt

SEQ ID NO: 19632 - DNA, 5686 bp, Cannabis sativa
aaaacagatggtatttacccttttttttttttttttaaacataaaaaaaaaaaaaaaacttttttcccataatcaaaatttatgaaaaggttagaaaaatacgatgtggattaaacgcgagctaaatctcacataatgtgatattttgacatctctatgtggaaaaaacagagaacttttctatttgttttctttttataattttcaaaaagaacaaggaaaatcagtaattacaaatttcaactcactcaaatacaattttttttcatcaatatttgcaattttttaacttataaaattaaaaaaattattctaaaagtgtttagataaaaaatagtctttttttttatttttaatttaaaagtctttttttagaaaaaaaaaaactaagatttatagcttctccaaaaaaaaacttttgagaaactattttacctccaaagtactttccattaagaatagatacacatataataattattcaggtaaaaataaatcaaagtttataataaacaactggctagtgtagtgtcatttacaagattttatcaacttataacttaaatttgagttcaacacttcatttacaaggccagagtatatgaacaagaaaataaagagggtatcatagataatcttaaattaatgcacaaataatacaatataatgctttactgtcatctgattgccccaagtaaatttgcaccatcaagcttggcaccttctaaattctgaaaacatggaaaaggaattacattactcgattatataaccaattagaataatgagttagaacataatatgatgatatattgtagcagagaaactgggttttagttttacttactgtttctctcaagtcgacttgtcgtaaataagctcgttgaaggtttgcacacttcaaattgctattattcagcttagccccctgaaacagatcaattccaactactaaatctatctaatgctcttgaatgatatggtaattgatttaaatttaatactctcttctctctctatctctcgtctttctaagtggtgcgagagtatgatttttcagcgtaatcatggcgatggaggggcttgaatatgaccctattggttatggttcagaaaaactccatagcagatattttcaaggatcacttcttataacaactttcaaacaccttattttttcaaaagcagttctaacataaatttgtcttacatatgttttgaatgaagaacaccctgaaagctattaataattaccttcatgttggccccttctagtatagctccttctaaattggcattagtaagatccgcattctgagaaaaaataaaaattaaaaaattaaaccgcaacatttaggatgatactcttcattttactttctttgattactcatagggtaaactacactttttaatctacttcttcactatgtaatatgaacaaccaaaaaataattatagataaaatgggattatattagccaattcaaaaaagctaacgcaagtggttagatgggtgagtgtccaaggacaaataataataactagaaaaggaaaactgatataactgagaaataaaaatcagatacctgtaagtgtgcacaactaaggtccgcctggcagaaactactattggctaaacatgcatctacagaaagaaaaaatcaacagtaaataaactaattctttttgacattttattacttaggatagaaaattaacaatcaatttgaaattagtttacaatagcaactaggacaaatacaagagtgaagcccaatctaaatagataagatgatataaccctttttgtttgtttatataaccaagatgatgtgacaattactcaaatgattatcagagtgtagaaagatttgccttgtaggtttgcactcttaagactagcaccagctaataaagctccacgcagattggccccggtaaattcacatcttttctagacaaaataaagataatttaaagggtttttgtatttccttccatttaatagatataagcaaatgaaagagagtagctcttcaactgtcttactcttgcaaagttgcattatgaaagttggcaccctcggcatccacgtcctaaggcaaaagaaaaatattagcccccaaagcaaagcaaaccaagaaagcaaaagaaaaaaagattagaatcaaaattccaagtgttcatggaaattaataatttgtttttgacacagatattaacgatgattcaactttgatgatgaagaccaaaaacaattggtatgtagcacaccgaaaagaaccctcttaatcttttttttttttttggagaagaaaaaatatgaaagacatttggggggttgtaagttgacaaattgtataaatttttccaattccaaattaaatcagagagcaattctcccttaaactcttaaacattacacaccaatgttgggctacccaaaatttaatgaaatcccaaagagtttcccccataactgcaacatcctaaaaaattatctcattcctttacagccatatcttgtgtactgaattataacacagcaaaaatattataatttattaaaattacacagcaatacttacccggaacttggcacactgtagatttgcacgggaaaagaatacatttctaagacaagcatggctgaagtccacgtaagacaaatcctaaaattccaagaaaaggtgaagcttcaaagacacagtattgtaaatataactcaattaagcagagcagagtactgtttttatgactgacatggttatatgacaaaagatataattaaacttttcttcttccaaatttataaggttgctctacaaaccatatctggatggcaaaaaataagaagctcttcagcaagatgaaacatgggagtgaaaaattaccagttttgaaagatcaaggccagaaagattaacaccacggaatctaactttttctgactgtatgcatttgatgatatcgagtcgtgttaggtcggtagttaaatcttcgtcctccttctttctatttaacacagaattaattccatccataagtccctgtaattgataatttatcgttggccagcagtcacttgtaatgagtaacgaaaaaaataaaatatggagaatcagatatattatattactttacacaaataaacatatggagatatattaggtagtaactcatacttttatcatcttttatcaatacatcatcattgtttcctatataaaaacaaaaataaactaagaatgtaatgtttaaaagatcatgacctatgcaaataaacagaataaaagtttactttgtgaacactaaacatcattagtttttcataaagttaacgcatttaacaagcttataggacagaatttgacaatgaaatgtccattcaataatgtgcattaaaaaaaaaaaagaacgaatatgcaactcaagggtataactaatgctatctcaatcttcttaaaactgaaaacctgtcttattaaatgtgaaaaatacttttaacagaagaaaggaaactacgcattaagacacatttggcaattgaaatggatgattaacttttgatgagcaaaaaatgagcatatagaaatcagactaaaaaaagaccgatgcaatattctgaagctaacaaaaaataagtattaaactctacttactagtagctgatagtattctgcctcccgcaaaagctctgaatagtgagagtcttttagtgtgggaacaacaccatcccttaaccaattaagtatgtgtcggaaatgttttccatccctatcgacaaatacaaatccctgcaaataatcagtgagtttaaggactgatgttttcaaaattaattaagtattgactgttttattgccttaaaaagacagaggtcatatgtcttagattgacctcctcccaagtttattagcgagcctcacataaccgtggtaacaaatcaaaacaaaacatacaagagttacgcataaataccaataatcaaacagaaactctacacatgtacccttaaacttgtctccgaaataaaagactacccaaaatacttagaaactactgcatacgatttccccattctctacttaaatcttgcaaagaaaagtctacaaattatttgttttgtaagcccatgtagaaacccagaatttgactttctctaggttgatatgaatataacatactgtcatacgggttttaaaatgaatatgcatatcttctaaaaggtttagtggttatgtgtaatctacataccatgccttaaatattcaacaaaattagttttatacagttctcaaacgagcataattgcttacaagtatccctatagacttggagaaattgaaatgttaagtaaaatgaaaaagtcaaagatcatcccaagaatagttaaaccaaagtacagcaactcaaattaatgtgggataatggtttctgtggacaaatataccacacaccaccactcaaacattgggaaagccagcatttgaagggaatgatatgtcacggattaataatcaaattaccttttcaggatcctgacacacagtatgtctaccactgaacattgcagcaagcatggaataaggctctcgttgagtcaaagtatcaatagtagtgtaaaatttctccccgcctgcaaacaataataatatacacccagttacagattgtttgtaaatcatgatcaaaaagaaaacctgtagggcgcatttgggaagtcatgaggaacttggaattgggtgtaattgaaggtaattatatagtttgtgtatttgtttaaccatataataatactgtaattgtgtaattagaggtaattgagaggtctcgattacaatctaattcccataccccattttaaatattaagtactaaaaattattattttcctgtataattactaactattattctaaacaagacattagaaattagtaagtaattaccacctcatgacaatacagttacttccaattgaaactgtaatgcttaattaatgaagcttcacataacaatgcagagagagagagagagagagttgcttaagttacaattgagcatgaaggaaaaggccaactttgagtggccatatcacatatgtaatcaacaagtatttgaacaagagaattctaaccactttggcaaactaaaaattctcaaattcacatcccatcatccttttttttttggaaaaagaatggagtaatctaaaaacattgactaaacagcaaaagatttccttactcagctcttattcacaatacaagcacaattatatcatctcaaactaaatgaatcatcattcaataccgctattcacaatttcatctaagtaaaaatttacatggaaatcgatcaaaaccagtattgtcatagacaatcggatccaatcataatctgagattagttaaatcaaaatttagggttcgtagaaggttcaaaagcaatgaattgaatgagaattgggggaaacattcaagtaattttaaaaaagaatatgcgtgaataacaaatgtgtaagggagagagagagagaagaagaagaagctgacctatgttgagacgaaccgtagaggaggagtctgagcccatgattttctctgtagagagagagagagagagagagaatggttaaataagcagccgaaggtgtcaagcaatggagtccacggcgtat

SEQ ID NO: 19633 - DNA, 5432 bp, Cannabis sativa
  modified_base (5261)..(5279): a, c, t, g, unknown or other
ttttctttgagttaggtttttgactcgggatgtttttctgatcttggattaggacattttagtgatgtttgagttaattttgaacctatggatagttagaatttgtctaattatgaattagggtttgttttgaggattggataaatttttaatcgagttttgttatcgtgatataggactcgagattgtcgagcatggttccacttagatcggcccacacacccaatattggtttgaggtaagaaaagctttatgcattgctgctaagcatgttggtaagaaacaattattatcgtttgtgactcgattatgatcgaggtaatgatgaggaacgattattatcatttgtgactcgattatgattgatgtagtgatgaggaacggtttgtgactcgactcgattatgatcggggtaatgatgaggaacgattattatcatttgtgactcaattatgatcgaggtaatgatgatgaatgattattatcgtttgtgactcgattatgattgaggtaacgactattatcgtttgcaactcgattatgatagagaaaaaagataaaagatacggtcattagcgttaatgaaatgagtaattactcccttgaaaacgcagataggaaacttacttatcaggtgctttattgggcaacgatagtgacatacgtagctcgtagataacgagtggtaaggatgctttataaagcattaaagtagaattgtcttataagataattaattgattatgtgattatgtattgagtgaatatctgtttattatgatgatgaagttgttgactatgagttgctataattttatcataatgcgtaatatatgtgtttgtatagacgttaaattatatatgcatattaaatatgtaatgaatcatgagtatgtatattatgtcatgttgtgattacttgcatattatatcgctttttatttagtagcttctcttgctgagtctttgtgactcacgggtgcttcgtggtgcaggtaaggaggatagaaactgagttcggtcatgagtcagaggtcttccagcgatgtacatatcagtcgtggtgtcttggcttccgagaaataggatcaaccctttggctatatttagaaatgtaaccttacttttgtaatagctgtttgagacttgttgtaagagaatttataaacaggggatctctgtattatggtatatttttgtataaaagttttattttaatttaatgaaaaagtttttaattaagccacacatttcctaaaataattagttagaaataagtttgtaaaatacacacgtggcgtccttgtgtgtcagggcgttacaatgctcttttcaaccacaatactaacaatcttcttgatgtggaaggctatgtttgtagtttattgcaagactattaagcagctcaaactcttaaaccatagacaagctttccagagaacatagcctcggattagaactcatcatgtcacaatgctccaacaacacattttctctagtatgaccaccataagctaaatgttgatgctgcctttgatttgaagcagcttagaataggattaggggcttcaattaagaattggcagaaccatgcgattgtcgggctttccatttctaaatggggagattcaacacccctctttgctgaagctcaagccctcctagcagctcttaattggtgcactgctatcaagcttctccttagctccattaaatcagattgtttacaattggtcacaaagcttaacagcacttagaaggacaactcaactctgtctagccttgttgagctaatttgagaatccctatcacacttacttaatgcttctctctaccatatctctaggaatgataattgtgctgttcatcaaaatataagagatacattaaggcacgataaggattcattttggagggtctaatttcttttccttattgtgtaattgtatttttgtttatttgtttccttctctttcgatacaattactttttaaaaaaaaaaaaaaggaaattatattttaccttacgctattttagttcatttgatttcatgtgtgggctaatacttttagcattaatcttaacaatttgaggatttaatatttttgccacatattgacattattatgattatttgtaattaataataaaaataaaagtaaaaattgttttgtagacttaaaacgatgtcgttgtgtagagattgcggacccacatcaagcaaaggcagctaaagaatagcgaaaaccccgaacacttccaaatgcactcctttctttaaccctattctctctccctctctctctctctgaatcggagatatgaaccttcgccggagatactgaaccggactgctctaccttcgtcgcgattccgatcatccggatccctcagcctctgagattattctctcaacggttccacaaagatgtttctccttgactggttctacggcgtcttggcgtctcttggcctctggcagaaagaggctaagatcttgttcttaggtctcgataatgccggaaagaccaccttgcttcacatgttgaaagacgaggtttttcttttccctcacttctctttttgtttgatcaaatgttgtttttatcgatcacctacaattttctctgattcaaggacaaagatttattatttattatgattaatcttactgtagtttgttgcttagttaagtggccaaatacatcattctgattttccgggaaagtcggtgaagaagttgaattggggtttgaagatctataatttctgacccttatttgtttagttaaattaggggaaaagaacattatttcattcgtgtatatacttgtaaaatgagtaaaaatcaatacctttgccagattttttatgttatttgcaaattccgcttttgattgattaactatatgaatttttttctttaatgtggttttctatttcagagactggtacagcaccagcctacacagcacccaacatccgaggagttaagtattggcaaaatcaaattcaaggcctttgatttgggaggtcatcagatagctcgcagagtatggaaggattactatgccaaggtaaccctaaatgccatatggtaaaaaaaattattgttcaaattatgttgggaaaatcttgcctactctgcagttgggtctcctgtttctgaacatgtaattttcttctttctcaactcgatttgagtatatgttaacagcccccattttgtttgattgaattgattagatgtttgtcaatatataaaaccaccatgctcaagccaaatctaaagtgcataacggggatttatcccaaaactaaacaaaatccaaaacctatgttaacatggattttcgtaatcgacagcatttgttcctggtttttcttgatcccctttatacaactgcgattgttttttcagaatcatatttttcttagtttttctgtatattcgagtgttgattaactgtaattgtcagccttagcttttaaatgccatttagctgaaactgtttgttaagagaagttgtgtaattagagttatttatgaatcttcttttgtttcataccctactgtcatcatggttatccctgctttcaggtagatgctgtggtatacttggtggatgcctatgataaggagagatttgcagaatcaaaaaaggaacttgatgcgcttctttcagatgaagccctcgcaaatgttccattccttatcttggggaacaaaatcgacataccttatgctgcatcagaggatgagttgcgataccatcttggcctgtccaatttcaccactggaaagggtaaggtaaacttatcagactcaaatgtccgtccattggaggtgttcatgtgcagtatagtacgtaaaatgggatatggcgatggttttaagtggctttctcaatacatcaattagtaagagagaggagggattgtgaaagaaaaagatgcactttgtcttttgaatcacaagggactgtgatttcattttagcactcccccaaatccttatttaggctcttagtgagagctttttagattgaatgtattgtgttgttgattctgtgtggatatagaaaactactacttctgctgctgtccctgcattgtaaaatcgacttgtagccacaaatctcttttcttttttaccacaatatagctagcattgctatctttgtcatttcttgccatatttctattgggtaagagctagcaaaatgggattctgtgttgtcattaattttgattatggaaataggcaaatttcatttgcaggaatatgttggaaattgtactattctgccaatattttacccgatatggaaatttataaagagggctaagtattgttctagttgtttctataatgttccatacacgtagacaaagcaaaacaactatttaggtcaaatgtaatattgcgtaagcaatgtgctaatatagtcatccgtggacccttttgtcctacgaacttttcaaaatcattgtttgcaggccagaatgcttaaattgtgcatggtttattgttggatcacaaaactatcataatttatcgactcttatcttttaaaatatattactaaaattttacttttttttttttttattttttttttctccatttcattacatcttatatttttaatatattttatatttttttttgagataaatttattttataaaaatgtaatacaattttattactatttttttttttttttttttttttttataaacgtgttatctaatacataataaaaacattcataaagaaggtaaagaactattctaaacttataagaaatgaccccaaatctaagtattatgaatgttctcatttcaaaacttgtagagaaatgattcttttatattatttattatttatattgtttttttgtcacatagttttttttaatatatattttttcaaaaattagaagcaaattacttaaaattatagtatatttatattagttttgttattttttttttttaattttaaggttatgtcaatttttttttaattttttatggggttgttgtgggttgttggtattaaaattttgatgtacagtatatttttattttgttatatgatatgttattatttttagatgatatttaaattttattttgctatgtataatagtggtatataattttgttaacataatacaaaaattttaatatatgtataattttactggcatgctacatatatttaataattatttttatatattttaattgtnnnnnnnnnnnnnnnnnnnaaataatatttaattagtttttaattaattatatacaactgtagtatattattttgttgtcatgatatatatattttaattgtggtatataatttagttagtatagtatacatatatattagtatgggatatgattttgtcccgttattgtac

SEQ ID NO: 19634 - DNA, 2986 bp, Cannabis sativa
aaagtacatcacgggacaaaatcatatcccataatatatatcagtataacaaacaagaataagaactctaagaaaaagagaatagagcaatactttcaaagagaaaataggattgaacttttcactctctctcttctcaactcacacgcaccacaaacattagtgtggtgtgagttttgtgatcatctctatctcatcacagtatctcataagttgagatcgatttctaattacagtagaacatctatttaaaaatacacttggattcaagaaaattatattctaattgagaggttataactaaatagatgtacactaaaacaaaacaaaaaaatcaaaacaccaaaaaatatcaaatgtaacatcaataacaataaacaactcttaatactacatcataataaaattatttaagtgatttcaaaaaaaaaaatattaacataaaattatttgagtaaatataatatttatatatatatattacaatttaaaataaaattattaattctacataaataaatttataaactatgtatattttattaagatatattaattattcttatttataattcatccaaattgtattttttatataataaattagagattattcttgaatagattattcttgaaaaacaataaattaataaattttattataattatatatggttggtaccaaaactaaatcaaattattggagctaggttagaattaaattaatttaggttagataaatttttcttgaacttcacgaaatttttgtgggtttgacttcgtgctttcaccatctctatactacagtaaaaaactcatatatttgcgaagtgataaatttaaaacatattatttttggtactacaccaaacatagtgtttttttttataaactcaaaattttattgaaagagaaacaaggcattaaaacccaaagtttgtagaggcaacaaggggtgccacttccctaccaaagaacaacttaaaacacgcattggaggcagcccaagctgcaaggcgatgagcagcactattaagagtacgagatatccaacacaacttagcattgtcgatacgagataggctattcagggtagcgtcaaacgtctgacgggccttccacacctgacatgtcctagccagtaagccatgcaccacctcttgacagtccgagaaaatggacacattcgaccagccacagtgcagggcttgaagacacgcatgctgaattgcaataagcttcgtattgagggaagaacccaccatactcttcaccgtgagcgcctcgaccactgcacctaaaatatcccaaattatcacagtagcaatcccccaatcatctcgcactgaagcatccacgaaaatatgatgctcggaccaaggaagtttcgaacatgaagcgattcactgcactcgatcctcgtcccaactgagatcacagtagagcaactctccatcaaatcaagaatttcacgctagatcatcaagacaggaggggaagaaccttcatggaaggagtggtttcttgccctccacaacttataacatgggtgtatagcatatagggagaaggcatctctgtcaccaatattcccaagtgggatatgtaggggagacaccaaccatctcaccaaagtcttaaggtcatcatattggagctgattagagcataatctccgcggtccagatctccaaagttgtttagcaaaaacacaatggaaaaacaagtgaaggggaaagtcatcaccatcattacaaagaacacaagtcttaccattaccgaaaatttactgagttttgcttccaaatgggagaatatccttagcaagtttccaaaaaaaaaatattttaccctctcatgcaccttgcacttccaaataagaccccacaaatcatccacaacaccacaacgagcacggatacatgccatataagcattcttgaccgtaaaggagccatgaatagatgccttccaaatcaattcatcctcatcatcaacagccaatcgcgggatattcataacattcctaccaagaggaggagtgaaccactccccaacagcttcagccaatcaatccccattcccacttgcgaacaaagagtttaccatcaatcttttgtcctgaattcttggattaaaggaagcttcgtactgatcccaagacaaccacggaacccagggaaaattccatatattaactgacaagccattccccactaaatagcaggcttcattacggatgaattctctagtgcacatgatacctttcgccccaaaggacattgaatttcgagaaggggtagatcaaaaagtaaggccacgcttaaaatgcttatcataaaaaatctgccaccacagagagttggtcccgaaggcaagtttccaaccaagtttagagaccaaggctatattaaactcttcaaatttcttaaagttcagcctaccccacttccttagcacacaaagggaatcccaattaatgagggcaagaaaatgactcttatctgctgaacttatccaccaaaaacagcaagtcattttatccaatttcagacaaatagatcttggaaccaaaaagtagacatagcataaattaggtactctgatgccgtttatgacggaggaatgtccatcctaacaccaaacatagtgttaagatgtgcaagtttgagttatttaataatttgggctcattttaagcataaaagtcaaatttccatttccttattattcatgtgtgacatactactcattaacattttcacatcagatataaagagcacatcggtctgagttatgtgatttaagtaactgttggataccaaaaatccatcattttactaaaatctaacggtggatggaccaagtgctattttcataaggctaattagtaaattttttccttgaattattgagattgttaaatgtaaggacttttgtctaatttcattcaattttactatctcagtgattgtttatgtactaa

SEQ ID NO: 19635 - DNA, 3559 bp, Cannabis sativa
cacaagttatacaacctttcttcttcttcttcttctttaatttttatcttctttgcccattttatgagaaggaaaacaaaaatactagcagcgaaaattgattcatagacctagggtagaatagtgaaattatatttcattttctaggacatcaaaaagtccaatatatattgttactgttttcacttattttttttagtttatttgaccaaataaatataggaacactgattacatggttaagtatacacagataagtagtaaattagagggtttttattccacccaattaatatccaaatgctttaattttgagatccacttttgtgtgtcttgagagatgtaaggattagatgatgccttgtttttctcgtccacaggagctgttgctccattatcactcttcttctctcttgcaaggtttgtctgcctgtttggatgcctcactttcagtgacagtagacgcgaaacttcatggagacccccccatttttctagcgcacgagcaatgtcgtagcgacctgtattgtattcatgttcaatataaattttcattaattagtatacaacaatcattcaaccaagttccttatagagatactcttagtaacaaagtggaagtacaaaaataaaactaccattacgagttcagccaaagaaaaataccaataagagtatccagtcaaaattttgaaaaggagaagaaggcttcagatgtgtgtaaaatcaacaaaatgactgtttgaggataacattaatataaataaaaatatctctccctacctgcacgctcaaatgtctttctactgggcatgaacgacgggtccattccccaactcctttgaaatcgatctatctgtataatgtaaagcaacaccatcagaaattatatttatgaagaagaaaaaagaaaaaacaggaataccaaagattaaccttgtataatatacttctaaatactgatttataattgtataggaagaaaaacgacggacattacacttcatcaagtgcttaaactaaaggaagtgtcgaaatggtactgaaaacccgtaggattgaacgtagaaaaacataaatatgaagtttaatatctttacctcttcctgcaaattttcaagattctcccagtaaccctttggcttacgatttttataggcaagagaaaggtccatcagtgatgctatccttctaaagccacccatgcgtgtgattgccttttcaatgtcaacccttccatgtaaacgtagttgctttcgcatgggcatgaatccttcctgcccatgttcagatatgaactttaaaagctcagctttaagaatttcaatatccctctgcaagccggggaccctaggcctttgtcttgatgaactctgacaactgcaatctgaaattttatcagctataggacccatgttatcatcactgtcaatatttgatgaactaatttgttcctccaagcatgttccctgatcatgtgtcactgaagaacgagctgcctccctcttttctacatagtcccgtattgcacacaaatttgaaggaagatcttcatatataacctggcatataacaaggtcataaataaatgagtaatttccaaacaaaccactagttaaagcagaaactttacaaactaaagagaaagcatgaaacaatcccacactaactacgaccccataatcatggcaaagcattccatagtaattaaacatcagaaaaataatataaacatttaacatttttaataaatccaatactttgataatttcccataatgactataagtgttccttgcagtcctcaaagatcctattatttctctccaaacatacagcttgccatgcaacttaatttgacaaagaacagttatcaaatgtgaaatatagaaagaaaagaaaaattgtgcaaggaacctcttccataatagcttctgaaagaaacgtatccttgtgcatttttgactccactgtatactttaacagggtgtgatggctgcctagctgctcaagaagccatttcccttgaaaggagtcaaagtcgccttcaacctgttcaaaactaatctcttgttcatggctttcacacaagtccaggacaacacgagcatgaagtaccatgtaaagaaggcccttgcatccttcctgtgtacaatttcgataaagtaaaatcagcaacttcaaaatgtagatgatttccatacaatgaagattttatattaactggatgaatacaaagtgctttgaagcatctacagtaaaagctaaaccatttttctcaatctaaccattagtgaagaaatgcatcccaaaagaaatttgtcggacaaaaattcttattatgtcaacttaaaacagcataatcatgtagagcctgtgtatagaaatcctacaaatgaaaataattatgcagacaataaaattatttgtacagcattttatgagtacctgaagaatgcgaactttgttgttatctcttgacactatcctgctaattgctaaatttggaactatcctgcatgatcaatttcatgaataaaatatacagaattaaagaaaaatattacaaacattaatagaatttccttctattctcttagttcagtaaatcgttttatggaatataatatgtgaaaatgtacaaagaggtacttctgaaagcacaggaaattaaactcccctaaaattaaaattaccagtattgttgatagaactacaaacctatgatgctatcattgaaggataaaaaatgagttaagaaacatatttgtatttgtaataaatgtcaacatttatgaaactataaggaacactcaccatacaaatttaagatttgagaactgttatctacacatttgaaatatcaagcaagtagactgaggcttaaaactgatggcactcaaattgacaaacatttgccaattgcaaattgtagaagttattaataagggcataggtttctaaatgaaaacactcaagacacattttcctaataagcgtgaaattctctgcttccttatttaaactaaatcagcatttattcatactccagggacacttaatgttggtaccaaaactaccactgacataccgttttgtttttccatttatattgaaggaaaggaacattatatgaagattaatcaggagtacaaattgaagcagagaaacaaatgtgtgcaagactagtaaaaaaatatggccaatgaacaatccaaaattgcatcttttagactaaaatgttacatttcagcgtgtgtgcaaattccaacattatttattcaagcagaaaccagtaacacatccaaataaaagtgcaggaagctttcaagtagaatcccgcgattgaatagcataaagagagcaatgaaatcagctaattgaaccaaaaactgagttggtgctaggcattcacaagggaaaccattcttagtgccattattttttttttttaacaaggaaaagctgcatatgtggagaaattagattgtcttaaggtaaaaatatattgatctcagagtgtaaccaaccatcactcaacgaatatatcgaatgctgca

SEQ ID NO: 19636 - DNA, 2589 bp, Cannabis sativa
gatgaacacccctagtaataatgtacgctaatttaattctttgatcctctcaatgaggtttttgatcttcccatggcttttaacgactattgttcttcatttgcattggaattttcatattttctcttcgtgatgttgttgtttcctccttccctctagagggtgatgattacgcctagaagctacagacatgttcttaatagcttgaagggacggaaggatcttcctgctactagcttttacatcaaggctcttcttaagaggtatgctcttttccctgcctatttaaagttttgggtgttctacagatccttactcctattcctctctctaaacattttttctctcaaacccatgccctttgtgattcctggctttttcacttccatcgattctataacccactccgtatctcaaaacttaacccttagtgaaaatgaattggtcatccgtgagttttttgagcataacccgattgttcaccaggatataaagcttggtgtattgtctttcatattcttacccctggaccatcaagctggaatggattgaggattatatatgaggaatgcctggattgttagagctccaccttttcgtattatggctcaaggatgtttatggtttagtttggccatgagggttatatgagatgtgttcttgaaggccagccttagcatttcgatcactatcttattgcaagtgctgaccttgaggggcttcacagtctccttcctgattagctgcattcttccccttttgggattcaagcccactctatacactttgggaagaaatcctacaaacttgcgaagcttattaagcatgaggtaattagggatttacttgaagttaccatcctccaagtctttcagatgttcattagagtcagaattttattgacgtctctaagactattaggaggaaaattactactaactttaagagcatttctcgtggaaagtggctcaacttcaaatatgagaatgtacctaatatctgttatcattgtggtatgcttgatcatactcttaccaagtgtgtctcatctttaaagaattgtgatgattatccttacccacctcctctcccttaaaaaatatcttttaaatctcttgctaaatctttgttcaatcgtagtccgtttgacttgtccaattctgttccctttcaggagatgtctattcctcatttcaatcggtaccaattattggctggggtttttagtcaattctactactaaggactctgaggctagaccttctatcacttctctattgattaccttagaatatggggctttgaattccaactctaccagcctcttgcatatgcttggtagttcgagttatgaggctcttattttcaacatgtccaacaattttagggaggaaattagtttaactcactcgggccatgactattacatttcttctgctcttcttatgagtgtatactattccctccctcttatgttttcctcgggagctgctagagctagtccgtctgagaaccttgcaattcctctttctaaggttcaggatgtcacccttcctctaaaatttatggacaaggctaatttggggtggaagaggtatgctttcacctcccatgaaaagggctcgtgctagtccttctactattgtgacttcatctgctgttgctgcgtctcatgaacagtcgggtgttgtggaacaatcccgcgtaaaaaatgagccctttaagttggaatgcttgtgggttagggaacattcaagcattccaaaagctctcccttattgtgaataaaaataaaccattgtttctttttgttatggaatccaaacttatggctggtagttgtgaaaggctgagacttaaactgtcttttgattgtgcctttgaggttcctaggaaaaattgagggggttgtctttcttattctgtaaggatggaattaatgtcaatattttgaatttctcccttaatcatattgactgtattattaagtttaatgagaatgttaatgttcacgtttcctatttttattgctccccttatttgcaggataaaactcatagttggactttagttaataggctttttggtaatgatccacttcttccctagcttattattggtgcttttaatgattacctttctatttatgataggaacggtaattcgaactcccttgttatgctatcaccaatttccaaaattttgttatcaaattagaccttcaacttgttcatttcatggagaattatttcacttcgaaacatggttcctctcatgagcgattagattatctctaaattcaaattaagataattttttttgtttatatatataaatgtatatttatctgtactagatttctcactcattttattgtccttagctcctagtcttgaagaaataaaaacccacaacaacagaaaaatatcattatacacacttcattgtggcaaactttgataattatgtgtcaagagaatgtgagaaattaagatttgtgttcactctagcaaagacagttttgtttatctatcttattttttgtctgtaataaccacattttacaggagaattacctcaaatatcatt

SEQ ID NO: 19637 - DNA, 3731 bp, Cannabis sativa
cttcggtaggaaatataaaacagtgaagactaaagagtaataatataagtaaaaatttggactattgtattgtagtgtatcaggggagtctattacatgctctttctctcaaattttgggggagttctattaaaaaaaaaattaagcttaaaatattttttaaaaatcacttttagtatttatttaataatttttttccacattttgtattaatatcaatacttattttttttttaattatgtataatattttttaataaaatttcatgtaattttttattttaactttttttttgataatatttaaaatataatttttttgttataatatttaaaatatttaaaaaaaattaatataataacatgtatattttatgtaaaataaaaattaatgaaataggatatatttaagtttttgaagtggaagtaaaattttctaacttttattattttaaatagtggcttttgtaattttgaaaattaaaatttaaaagttttttttttttgttgttgttatttttatggaatctatatagttaataagagatcaatttgaattgcaactaaaattcatataataatttatatagaaattattaaagtaacccaaaccataattttttttaaaaaaataatatatggaataaagttctcttttttttcaattgtcaattaagaatttttataggtctattttgagtgatcatagttttatttgatagaccacttttacatattgaaacatttgttgtgaaaatgagtgaaggaatgtgtatcatatatccaaagtaaatatatccactttatatagttttctttctctctctctctcatatgagtcaactcatttacatagtttattttgtagtatttaaagactattaaacgctcaagtggaccaatacaggattgaatcaacatcaatttcctgttcacattactgtggagtgtggggacagtacgttacgtatgattggttattgttggaacattttatgaattgttaaaaatcaaaaggtgctatttcatattagtttattacaacacttgtttgctaatctatatatatatatatttgtagatatgaatatttgggttgatcctaaacaccatacacgcactgtctccgctgttttaatttattaaaatattattgtttttatttagttaaaaatgttttcaaacacgtttaattaattaataaatagaaacgtttcttttcaaatttttttagctacgattcaattcttctatgatttaaaaaaaaaacgatttcttcccatttatttttccgtgcattttctatataatacatcagaattaacaagaagaagacattttttttccacacacaattttccatttatgttatttttaaacaataatattaataatattaaatattagagggtatatttgaccgttctctacaatgcaatggaaatctgatacagtgttcaactaagccctaagaggtacttttgtaaaagagagagagtcgcataaaggctgacctaaacactacacgcgcattgctgccaccatttgaatttattaaaatattattattttttatttaattaaaattatttttaaatgtgtttaattaattggtaaacaaagactttttttctttaaattttttagctacgatccaacactctcacgattcgtaaaaaaaagactttctccttgtttattttttatagtgttctctatataatgcatcagtaacaatagaagaaagacatcctttcttcacaaatagttttccatttatattgtttttgagcaaatttagtgatattaaatattagaaggtgtattcaacggttcataacaatgtagtaaaggttcgatacaaaaatcgacttggttgttttattttggggatcaccaacattttttgactatttgcacattcttgggaagtgttacgaacgtcttaaaaaatgcgatctagtccatgactcaacccataaatttcatttggtaatactatttgttttttgttttcagtagccatgtttacaatagctatattaataatttgttaacaatcataacaatataagtgttgttatacctattttttgagaaaaaaacaaatacatctaaatatatgacacatgtacaacgaagataataaattaactcgattaacgaggagattgagacataatgacctcctcaaaatataaaagtcatacacaaggtaaattgacaaatgtaacatttagtgcgagatgattaacacactcgtaatatgaaattatgagaagcttaacttgcttaagcctactcatgttcatcacgtcggagaatgtataattgaagtcaaggtgttctctaaagagtatgttaccctagatgaatatccaagaattagcgtaatcctcaatgactatacttcaacaatcaagagcctcgatgataatatgtcattgaataaagaccaagtcaaacatgatagttatcttattttaaataaaagcatctatatattgtttctcgcttatataattaaacgaaacaacataggaaatgttcgcatttcatgaacaattatatagataaaattaaatgtaattactattccactctgataaatagcaatgaaaatattgtaaaagaaacaacacaattgatggcttagaaaaactctaccaaattttaatctcaacccaaagagactcataaataatatagagtaacaaaatatgttaaatttaactacaaaatcacgtaattaaaattttttattttcttcattattacttacaaccaaatatatataatctatatacttatataatgctgttcttaaggtatttgaggtggcagcaccaataactttctttccctattctttgctctctcatttttcttaatttttaaattttgattaatttgtggtactcactatattaatgtaatatactctatgacaagcgttactatactcagtgtataaaatattcaattatacatattgcccataaaactataattaataaaaaatatgtactctgatgcaattatggaggtagacatgaaaggcttattttgagagctaaaattatattggtaacaggtgccgttgattttactctttcccaaatgtttgggttgctcttaaagtcgtctgttctcaaactatcctaaaaaaattctatgaaatctttgtaaataaatgtgttcttgattaattgttttatttgatagtaatatttgtttgtacagtataaggattttttatcaccctcttttttttttccagcaattggtgattgctataataaaagccacaaattaatcatggtgaatgaaatggacaaacacatttgaaaaatatctccctcacattttaaagattttttttaaacaatctatatatctatctatctatatatttatatactttttttgtcaaggcacgtgatgcggcttctcatatgaattttatctatttatgttgctccctcaatttttcacaatttaatttgttatatttttattcttcattaatatttatttatcatttaaaataattattagtgtctttttattttcataactccggtcttaatactattttattattactctattaatattatcgctgttaatgttataacaattttttttatattccattatcataactaataatattaatttgtattattaaataacaaatattatattttcaatctttgaatactatataa

SEQ ID NO: 19638 - DNA, 3205 bp, Cannabis sativa
tttactatttcagtgattgtttacgtactaaaccatgctctccaaactttgatatctactgaatcatgcccctcgaactttgagatgtactaaattatggtccctaactttcattcaacttttttactaaaattggaaaaaaaaatccttaaatccaacaatctcaatagttcagcgagtatttttaatgactttaaaagttcacgagatatgatttggtaaatgtcaaagtttagaaagcagaaatcctaattagtcaagaaacaattactaacccatcacatgctttatggagcatccttattttaaaataaaatgtaaaatttgaagagagagagagatactcgtgaaacttaccttattgcagcatttactccaacgaataaaattccttcccacccgttaagattgaggctgaaacaaggtcacattattaagatatatatatattttgttttgtaaaggtgacattattaagatctagttcttagttcttaccaaatagagagtgagccaacagcaataactgcattgtctaaacttccagtgagaaggtaaatactcattatgtaccaaatctctaagcaaagcatcaaagcagaggcaaaggaaagcttaagaaaggcccatagatccttaaaggccaaccaggaaaacccagtccaaccctcattacaccaacgcataatatacacaatttgagccaagcaaaggccccatctagtgatattaaaagctatggctgcacccattgttcccaatgaaaggacgtaaatgaagagccagaggaggccaatgtgagcgattaaggccagaaatgaaatccatgcgaggacgtcgaacttggactgggattgaaggaatttctgtgctgggaaattgaaggccagagagaacaactgaggaatgatttgaatggagaactgtccagccaaatctgctatttcatcgttttggccgagcagtttgagaattggtccggcaaaaatgtagattggagtgagtaaaatgcaaaaactaaataatattatccatgatcgttgcatgtaaatcccaagcatatgaacttgtccagccccaaatgcttgtccacatagggtctccagtgcactccccataccaagctgcacataatatttggatagtaaatgacatctcaagttatgtttcaactattggatcttaataatagtactctctcctatattttatagaataaataagagttatccggacccttttaagaattttgttcccaaaacattttgctgttactttgaggtataaaaatcattacaaatgtcagttgcattttgcttatcttttaaataattttgttgatataacagtaaagtaatgtgaatagtccaatttaataatacagatgaatttagtccaatttaattatataaataaaaaatacatgtataactattaatttattgataaatgataaattatgagaatatgtatattttaatttaaagttaatatttatatattaatattaataaattaaatttaaaatagtttcttcaaaaaaaaaaaaattaaatttaaaatagcttaaaattattaaataagtggtacataacttttcatcaaaaaaaaaaagtggtacataactgatagtaaattatttataaaaaaaagagcataatataactggagtttttacaaaaatgaattttgggcaaaaatttatttctacactaatttttttacaaaaataatgtctttttatataacaacggtaaaacaataaagtagaacaattaaaataacaaccgaataactaaaaataacgaactgtaaaaacttaaccctatttttaaaaaaaaatcggttaaagaagaaatttttttaaaaaattttagtaagtgatgtgaaaattcctaaataatatttgcatctatttgtataatttggaaatttttggcaacaataataattcaagagtaagaactcaacaaagcccgtacttgcaggcaaaaatggaatttattcagttataagtcagtcagtcagtcacaaaggtttaaacgacataaattacaatatatatatatatatatatatggactgagcagagagtaatatgtatatatgtataccatgaagccgaaagagaaggtaccaacgacgccaagagaaatagaaatggcagagagttgaatatcgccgagatgtccaacgaagatgctggtggccgagtttgtaccatactgacacataatggttactactgctggaccagcgattctccataacttcaaactctccaaccaaaacactgttttcaactctttaaaccccctcgccggtgaatagtcttcatttattataccctcctccgccgacacgtggttattgatattaccattcacgatttccgatgctgtcctctcaagcaaaggctcatccatcttttcttttcttttttttttttcctttttttggctattatataccaatattcaatatagatagttgaaattatatatctttgacagttgggtacaaatagcccggtttggtggttatgttagtggtttgagagtgtgatacgacgactgtgtttgctggatggaccctatcactgtaaacattaatgactagtgttgttttgtaccgatcaataatcaagtgtcatcagtggtcagtggatagagacaagtggtagtagtagccaccacaacccccagctactactacatcgcaggaaacttttaagtttttcttaaccaacattaatttaagaaagctaatcatgagaccatctcacccaccactaccttatttattctatgaaaatgctagggtaccttaaggttacaacttacccaatttagggtagttaatatccaattacaaaacaattggatatttaattacaattcgattaaattagatattaaaagttagattgtaattgaattggattaattcaatctcaaattttaattaataaccaatgcaatcaatttatatttatatatatttaaaaaattatttatatttaataaaaaatattaaaaaataaatgaaaaatgtatatcttagtagttttttttaatttgtaatttcgttgttttgtgtatttgtttacatatgttttgttttattttgtttttgagcaattttattattttagttattttaaatttttagttacattattccaaaatttgcaccaatgatgtgg

SEQ ID NO: 19639 - DNA, 3883 bp, Cannabis sativa
aaaaaaaaaggtaaaaattggatttggagtacagccgtatatgaatatgatggtcgaatagacaaaaataccctaacattgattccttctatagctaaatacacaagggtatttatgtcatttagacactccttaattacaccgaatattaggacataaatgtcattatcaaaattatttgccaccaaatcataccctttttccgcgtttttttctccttcttcttcttcctcctctctctctctctctctctctctctagatttatcatccaatcaaatcacaggaaaaagctgcgattctctctgtttctctgactactttctctctctaaaacctcttttgtcctccggaggggattactgagcaatctgtggagcttaatctgcaatggagttgagtctgatacctttgagaacgaattgtttgtagatgggttcaatgtacgctcctttatgctcgatctgtcactgactcgctttgttcatctgtgagttttagggtttctgaactttttgctcaaaaacgaactaattttgtggaaggaaaaacttcgttattatcgcaaatgtctgcattttcttgatctatttttatatattgttttactgggttagggtttttagggaacctattgtacgctcattttgttgtttatttcactgataatgggtgtttgtttttggttttggattagattagcgaatttaggatttgttctccaaaaatagaataggtggttatcaacaaacatatctttaaatttagattagtgggttacaattttgtgtgaagtttcattgatttgaaacgcagacatgcatgatttattctcagttgcagaagaaaaaaatcaatttttaatggttttttttcttagctattatttgctgtactattcgacttatctgcatgaataaaaaattagtttaattggctggcatatagatatgaactgctttgttctacacatagctgtgaaaaagctttcgtttcatttatctgggtgtgaatgttgtggtgacaggttctaagaaatgttggaatatagtacaaaatgagccagacagaaatatcaaggatgaagccttcccttgtcccacttgcaactttgcttggtcgggagcttaggggcgagaaggatgagaaaccatttgtgaagtatggccaagctgctttggccaagaaaggagaggattactttctgatcaaacctgattgccagaggattcctggaaatcccctgacatcattctctgttttcgcggtatagtttcattctttatagctctttatgtattaaatgtgaagacatccaatcatcttttaatgcttcggttcggtgtgaggagaaaaaaaattatcctaaaaaattgcttaacaactgaatacagctgactttgataagcgcttggttctgatgaggaggccaactaagatgttataactgaacagtgaaatgaattgcttaatttatttatttttcttgtattttgtttatgataccaattaggaattcttaaattagcagatatttgatgggcataatggtatatcagctgcaatctttgccaaagagaatttgttggataacatcctgagtgcaattccccaaggagccagtagggaagaatggcttcaagcacttcctcgagcattggttgctgggtttgtgaaaactgacatagaatttcaacagaaaggtatgtattaaaatttctttattaaacttctgttgcatttccttttcgacaacttctcacattgtaatatcaacaacaggagaaacttccgggacaactgtgacatttgtagtgattgatggctggactgtgactgttgcatctgttggggattctcgatgcatattggacactcaaggaggtgtagtttctctcttgactgttgaccacagactggaagaaaatgtcgaagagagggagcgtgtaactgcaagtgggggtgaagtaggaagactcaatgtttttggtggcaatgaggtatataatgccttttttgtgtacatttatttttttgcaccagaaagaaaagttatagaggacaatttctctggtttagtcccaaacatttaaataggtttatatggttcacaggttggcccacttcgctgctggcctggtggattgtgcctttcaaggtctattggtgacacagatgtaggagaatacattgttcccattccacatgttaagcaagtgaaggtaaattcatattctcttgttgacaatggtgtcatttactgtggtaaagcattatggtgcatgagaacccttctttattttatacttttcaattatgcagctctcagatgcgggaggaagactaataattgcttctgatggaatttgggatgcactatcttctgatattgcagcgaaatcttgtcggggactgcctgctgagcttgctgcaaagttggtggttaaggtgatgtttggtactcacttttcctcaagatacgtcctatttatttatatttcctaagatggtacggttacatatttcaggaggctctaagatcaaggggtttgaaagacgatacaacttgtctggttgttgatataatcccatcagaccaacctattttacctccaactccaaggaagaaacaaaatgtgctttcttcatttatctttggcaagaaatcccaaaatcctgttaacaaagctaagctttctgctgttggagttgtggaggagttatttgaagagggttctgcaatgcttgctgaaaggtattaaagacatatttaattcatctattgtatggactacactggtctgtgttgagttggatatattagccatgttaattcctgtaacttctttgcgaaaatacaggcttggtaaggatatttctctggatgcaaattctggaatcttcagatgtgcagtgtgccaagtggatcaaccaccagctgatggtttatctgtaaactcgggccctttcttttcacctgcatccaagccctgggaaggaccgtttctctgtacaacttgtcggaaaaagaaagatgccatggaaggaaaagggcgcagacctacagtaatctcatagtaataatccccccctccttgattgcatgcatcatatatatatatatttcttttctccctggcagtgtgagcatacttagttgttagtttttggtttgaaagatggtgattaatattattatagatgttttgtaagaaaatgaggttgggataacgaagggccagtagctgtttttcccttgttaagagtttgtgttggattctggtatgtggtctcagctgttggactgactaacgaagaacagaagtggtgtcaaaagtggttgataaagatatctatggtgatatggtggtggtgtttttgatagctaacagcttgtatttgtaagtaaattgaagaatccatagtgatatgttttgatacaccaacacagtagctcttctactactatatatatatatcccaactttaagctaacacctaattgcgcttattttgttggaactaagaatatataatattcatttgatttgatttgatttgattggggattatacttgtggataagtttttgcaattgtccacaaaacccatctcacttacatttatatttatatatccttgttattctgatcccatgtaataggcgttttaagtgtatagtatatttaatgactttatgactttggttcccattgtttcttttttgttgcgtttttgcaattgtgtttgttatgctcctatcattttcttttaagggtaacccataatgtaaagatcaatcaataaatatcgtgtttgtggttctatcatttattttatgtggtgtctcttgtcagcagtatcttgacttgactgtgagttgt

SEQ ID NO: 19640 - DNA, 2330 bp, Cannabis sativa
  modified_base (38)..(38): a, c, t, g, unknown or other
  modified_base (2226)..(2229): a, c, t, g, unknown or other
aatgcgacttgattgctcaggggaagcctgacacctcncggagatgccttagcgttacttgggcttctgggagcatatggggctcccattgccttctctaggaggcatgtcccggatgctgccttattacataaagacttagcaaatagtttgaatgctaagttgtttgatccacgcgtccttatctggttggtccacatatattgggcaaaatcagaggcaacagttattaattggctatttttatcatatacatgcaggttcggctgcttaacagattgaatgcaaaatatgtatttttaaatcttggttccattgacattcaggcagggcctctcgtcctattgcagcgcattgttcgatcgtttgatcgcgatgaattcggataatgtccttattgctcctatcataataagtaagtaaatttaaaattaattttataatttataactctacatatataaaataataatatattaacaatcttatatgtttgtttgataaagtctgaatatccacactaacgcgcgccactcaattagtattgttttgtagattcaaaatttatgggatttaaactcaaagaatttataggttaaggcattttcgattttttcatggtatctatatgattcgatataataaatagtttaattacgtatttcatatagtttgtatttactcataatttccttacagttactacttatatcaatggatctcttgatgaataaatgaaggttgaaaaataaacactgaaaactgttaggaaagtaaacagaaaaagtattgggagaatattttttagggtaagtattctatatacagcattactatatataatataatcataatacactacattaattaataaactctctaataataagtaaaggtccaagatcacaaattatctattgtgtttaatccaaaaatatatacaattttttttatatatattacaggtgaagagtttaattaagaaatttgaaaagagagacaaaagcgcaaccgaccaaagacgttataaggaacaaagcttataatgtatggtggtggagaaacgtgtttccgccgtaaaatgaaataacatatatataatatatacatatttatatatgtcgatacatgacagccagattatatcatgtatatataagcaacgtagcttcacattatatatatatatactaactcacacttacatgtatgtacagactacagagaaagagagtgtgatcgatacatacatacatatgatatggagatgaggaacacgtgagagggttggctagattcccgtgaggcacaaaatatatattattaattaatcttttcatacatatacattcacatatatacatatacatattcatatacatatatgtatgtataaacagtatttttctgtcatttacaaaacgttaccttacttgttctcacgggcctctccccgtcgatcttatcttgtaattacttaattagatcagcttacctttcattttcatttgacttaattattattggaacctctttaaatatatataaagagtacttgtattaattatatgtgtatatacatataaatttaaaaaagtattgctatattgagcactcgtgtagcttctaaatgtagcactcactgctaaaaataattatttaccgataattttttagtcataatataaatattttatgattaaatgtaatttttagtcacaacaaaaaattatttgtgactaaaatatagtatttaaatactagttgtcactaatctaattttaattattattgtgataaaaaaatacatttaatcacaacaaattgtaatttttgtaattaatatttttagtcacagactttttagtcacaatataagaataatagtttataattagttgcaattttttttactttagtcacaaattttattgtgactaaaagtaaaaatttttctagtggctctacaattggttagcaatatttcttaaatgttattatattaaggactgagatgcaaaatgaccctaaatttagaaactgagttagtaaatgtcatctttttaaaaaattaagataatgaccaaatataataaattagctaataagaattataaaaatacatttatcacatatttttttaaaaatatatatataataataagattaagttatataatttttttagtattgcatattataatattgtaacaaaaataaataaannnnttagatcattaaatatatacatcattatttgatatattgtagtattgaaaattaatatataccgtagtaataaaattatatactacaaagaaattataaca

SEQ ID NO: 19641 - DNA, 3990 bp, Cannabis sativa
  modified_base (1718)..(1718): a, c, t, g, unknown or other
  modified_base (2192)..(2199): a, c, t, g, unknown or other
atatatatatataaaaacaaatatcacatcatataaagtaaacaatttacaaagagtggtccattttcattgaagctttaaggtactagatcacgtgtatatgtctacatataatataattcaagcacaattctagtttatactcttgtgtggtaagcaaatcattaacaatatgagtacgtacgacagggtttttatatatatatatatgttgtcatacacacacacataatatttgatatatatatatatatattgtaaaattaccattggcgtacgtcaagggaaacagcccaggcccctcagttattttatatatagatatttatatgtatagatatataagaatctacctagctaatactttaaaatttatacatatttatatataccacttattatttttcgatgatgaattaataaataactaatataattattttttttatacatttctgttactactataactagctagtacgtcaaatataatagtgattgactcatgtactgcgtgtcactctgttacatttcacatactgatagcaatgcataaaaagtaacgttagggtatttaatctggtaaaaattaagtgatataaaactaaaaatattagttatttactgtaataaccctaaaagaattaatcttattgaaatatatagaaaataagtgacccgtcaagaatgttgaagcttgtggtagagagtagagtgaggtgtctaataaaatatagggctttttcattaaatttttacatttcaaaacagtttttttttacatttttatgaaattctacatagaaactcctattgcaactagccctgcaacctaaattataacaaaaaatagtatagaaacccctattgcaactagcgctgcaaccattttagaaaccccaactgtaaatttgaaaaaaaaaaagttaaaaagttagtatatggggtaattcccctaaaatatataagaagttatatattaacattagtttaagagataattacataaatttttttaattttttttttatatattttgacgtttaaaaatttttaattacatttttactgtattttataaaaacaacacgaaaacaaaaagaaactacataaaaataacatacagataataaaaataaaaaataaactaacaagagtacaacatataaatacatcaaaagatcatattttttgtaaataaaattataaaaattgaaagaaaaaaaaaactatactgcatttttttcatattatatttttatatatgtgtataaaaaacttagaaattggtttattttctgttaaataatattttaataaaaaattattatttttgatataatttttagtgttgtgattaaaatgaaaacaaaatatattatatttgatgttggtgcaagactatatttgtggttggagatggtgcgcttaataattttctttttcttttttacatagtacgtatggtgtaactataattttgaagatagtaaattttgataaaatatgtgtgatattggttgaaaaggttgttagggttttggattgtattattaatggtacttgatgtttcactatcaactattaacgtttagtgtataaaaatccataagaaggttgcttcgaggaaacatgtactcatcccactcactaataaaaagctaatatgtgcactaaatacacaaactacttgcactttatttatatatatatatatntatatatatatacatgcatgtatatgtatatatatggtacaacgaagaactatagtagtactcataaagggacaccttgttaattataacttttggtttttagtcttaattgtaaatatatacctataattatgtccccaatgtgtcatataggaacttttcattaaggatattaataaataaaaaactaacaaacaaaaaaccgtaagcaacaagtttaatttactcaattataatataattaaggtcatgatatgaaagaaacattaatagtaaaattagtatgggaaaatgtactattgtaaattatggaaaacaaaatacaaaaagggaaggatatctattatataaaatgtggttatgtaatacaatttttagtttaacggtatttttttttattttctacataattttaagagaatattttttttattaattttataatattatattatatatttaaaaataaaaatnnnnnnnntattttatataaaaaaattaatttaattatatatatttaaaaataaaaattacatctatatataatcacatttatatataaatccacggcaactttttattttaaaaataattaagaatatatatatgtttcaaataatttgtatactttattataaccacactcgatctcttaattgagaatattatatctattaatattattatttttttaaaatatatgtttaattaaatataatatataaaatgtattttaaaagtatttaattctctaatcaaattcaaattttatcaaaatattttctaatataatcctcatatatatcctatatataatgcctttcttattacgtccagcttaaaacagactttaattacaatcctattttatttacttagcacgatattattttgcacttgacgtcacaacatccaaatacaatgcaaaatcttttgaagctaaaactaatattgtttttcatattatatttagtatgaccaaagttaaaagagttattaatttgttagtagaattaagaaattacaccattcttaaattaatatgatagtttctatttttttttttttaagaatcacaaagtaaaatattggttttggcaatgttaaattgagctactaatactttaaagtataggtaggatatctaattacaactgaattggatgttaaatgttatattctaatttgattgaattatagttattgaatgtatatcccaaaatttaattaaaaacatctaataattatattagattagattttgaggtttaattagattggatcggataatatataatttttcaaattcaattactactcatttattttctatttatcaattatttgattcatattttctaaaatattttaaaaaattatttataaaaattataaattaataactatgatattttcttcaatggacatatactaccccaaaataaatttcaatcactaagatttgtacttatgtatatgttactcaattaatattgatccccctactatctataattttaactcttgccttttttgtaagatttttgaagattttaatattatgaaataaaaattataaattgctaaatgtatattattattttttatagatagttcatgaaaaaaaaaaaaaaagaaaaaaccaatctgattatattgtaaaattattaatttcatgtagattttaagtgaattgcccgtgttctctcttactagtttttcataaagttattgtattatttcaaattctaacatacataaatttacattaaaataacattttaatcggttcaaaaaaacattttagctaataatttgtacgtacgtgcagccctaactagtagaaaaaagaaagaataaaaagaaatgtaatagaaataaaaaagaaagacaaaaaaatagatagtattgtaaataacaaataagtaactttgtcattttaatttcaattctatatataaatcttatatcacgagaggcttatgccaaattaattggcgatttgtccatatattgaaattaggaaactccacacacacacgtgtatatatacatatcacacagtaatcatttctctatacaatccaatagtggtcctttattaactactttaatagtgactactcgtgatcaaatgcttaattcattatgaaagaagccaaatatatagcaacacaacacatatgtatatatgatatatcaattaggtcaaattaatatatagatataatgttttgccaccaaatttgcttggcactaaatatcatcgtat

SEQ ID NO: 19642 - DNA, 4161 bp, Cannabis sativa
  modified_base (3578)..(3580): a, c, t, g, unknown or other
  modified_base (3672)..(3673): a, c, t, g, unknown or other
  modified_base (4041)..(4044): a, c, t, g, unknown or other
aagttttaatttgacatgattttcgagaaagttctttgattagcaaagatagcaccgtaattgaaaaatcactgtagcgtgccttagcattagggtgttacagtatcagtttcctatggtctaatacaatttttaatttctattctaatttctatgtgatagtggattaactgtttaaatctatattctttttaagatatatagaatctaaattgtatggaaaagtcctagacttttgtgtaaattagtcatataattaccttaaacataaaaatcctaaatgctacatagaccatacatgtagtcgtctaatatcaaaatctatgtctattttactacaggttaatcaacactcacttttcatattttttttattgaaatcataaacaattaattagtaataaagaaattaaaggaattaagcacaaataaaatagatgtatataagaaattggggaagaactaaattacattaaaccataaagaaaaatcacgcaatatttattaacaccataattataaatttggctactcattgtcattgtgaagaattgattaagactaattaaagatataaaaaataaagatagaagaaataaactctttaaagatcaatgattttaaccttcaaggtcgctttctgcctctatttttgtctttccagaagtcctaattaaaaagcccccttgactttttaaaatcagggtttaaaaatcctactaggcctccaaaatcaggcgagctgcgtcatatccatttcagtgtcgcgacccaggtacttgatttttgggcagcgtgcatcttgatgcaatgactaataatatttttgccacaattcgatcaattttactcagaattaaacaattaaagatgttttgaaaagctaaaagagatatttagaacttctattcacaatattttcctaaaaagggaacaaatcatagttaacaagaaagtccatgataatttcatcattcaaaacttagaatttttcagtcattatatcttataactccaaagtccatgataatttcatcatatttatctcatttaacatgtttcttcttatttttaatccatattatgaattttaccatttaaacctaaaataagtagagaataagtacaattctatacaaaatgaatataatcaattgaaacacaccttcaaaacactttataaaatgaacataataaaactaagcctataaaaatgtatgatcttatcttttgtgaggcgactagcaaataatagaaaagtttctcaatcattggatatctagactccacacctagcaatatcttacttacgtaatataatggaagttgtacccttccttcttctcacacaaaggcggcgctaatgacatggttagacacggccaaatacaagtacatttgttctcccttaatcgacttggattgaattgaaggcttggctaaatattcttttaatttttggaagacattttcaaactcggctatccactctaacttgttgcttcctcgttgaacattaacaaatagaatgcatttatcaattgactttgaaagctttctactgggtgctgaaattctttcagttgagccttgaatgtccttgtattttttgggggaaggtatattctgaagggttcgtattttctccaaattatcttcaattcctctcgagctaaaaatgaaatctaggaatttccttgaagaaacctcaaaggtgattttttttggaattcaacttcatttgacatttttggatgatgaaaaaattctcctctagattgtcactatgctcttcaaaacatctttgaacattttatttaccagacactgatatgtggctccgacattctctagcccaaagggaattaccatggagcaatatgcatctttgtccgtctagaaactggtgtgctcttgattggtgacatgcatcttcatttgattgtagtcggagtgtgcatccatgaagcttaaaattttgtatctagacctggcatccaccattcaatcaatctaggaaagtggaaagaaatcttttgaataggctttgtttaagtccgtgaagtcgatacatatcctccaagttccgttaggctttggaaccaacaccagattggctagcaaaaccagataaaatgcttcccggtggaactcgatagaggttagtttttcaacttctacttttactacttcactccaaactgaatctaatggtcttcttttttgaagaatcagatttgctttttcatcaatgtttagagcatagaaaatcacgtggggactgatcccgttcattttagaatggttccacgccaacacgtcatgattcttcttcactatgtatacacttttttctttttttgtcggagctagatttgttcctactttgataaccttagtacgatcttcttcgttgatgcacacttcttccacctcctccatcgtttcgattattatttttacccccacatgggggtctaactcatcttcttcctagattacccccaatgttggctggacaggtgctctgagatcttcttgattctcttcttggaccatgagtactatcttggccgaaacattataacatttccttgtacttttctagtgaccctttactactgaaatgcttccattatcggttgggaacttcatgcacaagtgccagatggaagttatagctccaaagtcaactaagactagtcttcataggataacattttaggcaatgagacaatccactactacaaatgtgtagtatttgaaggcggatgttgtgctacttttggatacacctccacttaatgtgattggaagctgaatgatttccattggcagtaaagagtctccattaaaaccttgacattaaattgggcagggcattagattggtttccactaacgcaattgcatggagggcggttttgaaaagaatgttaaccaaaattttgttgtccaccagaattctaaacacccttttgtttgcaatttgagcttcaatcaccaacaaattattatgaggaaaatacacatgcttggcatctgctaaccaatccttcaatttcatctttcaagtaatcacactcatttgtggtgtccccaacatcgttgtggtattcacatttctttttgtgatccctcttgtgtcttccacctttatacataggcataggtttcttgtaatggactatattgtaagttgctctataaatattttcccgagtatcaaccaaactagtatactcaaaatattttggttcatgactcctctccttctttggaacttcaccctgactcgagcctttgcacttcttttgttcttggaatgacttatgtttgattatgaaacttccatttgttggctcggttgtccaagggcaacattatattcagtttatgccatcccaaagctagagaaacttgtatgtgtgattgcttgtctagaggtaataggtccatacattgtggagttgtgagtgtgccccctggaggaacaatagccagagcaaatatttaaggagtttgggttatactactgacatttgttgatgatattggtgttgggaatattttaccagnnnctagatttactaacaagtatatatgttgaattaacatcctaaatatgaattatctaaaacaatgaaactaaacacataagagtttaagaaanncttacattggttgtagcagaatataatggctcttttcgttcaagatctctagcccttgattcctttctagcgtagagcattatcaagatttgaacctggatctctttctctccttcgggttcggttactaccgtcttacttactatgattgagtacttgacttgctatatgtgggcatgacactctttcactcaaggttcgaatatggtgaagaacaatgaaggaggctgaaatcactatgcaaggaactctctcatctagattgaaggcaatagttaaattatcaaaaaagtggatgagtgagagcatcatgttccttttatagtatttcaactaaggcttagggctgaattatatggattaaaaannnntaaaatattgggcaaaaataacactagggccgaccacataaaggacaattctctagttacagttttgccactttatttcaacaacttattattctttcaataataccatattttcca

SEQ ID NO: 19643 - DNA, 3986 bp, Cannabis sativa
ttcttctaagttcaggttccacctgaacttgatcttcaattcttggattaccctagccttgctcttcctggtttttcctatcaggttcaagtgaggttattccacctaattcacattagtgtcttcatctggattttccagtgtattctgttgagtttcaaaatctgatagacctgtagggttatgcatgaattcctacactatagttttcattagtaatgcatggaaaatccttgaagattacatctctgcttataattatcttcattcttccttgatcttttatccatattctataccttttaacccctttaagatatcctagaaacactcctttaactgctctaggttctagctttccaatgctttggtgtgcatatgctgcacaaccaaaaactctaaggttggttaggtctggtggttttccagaccaaatttcttcaggtgtttttaggtttatggaactagatggacacctgttaattagatatgtagcagtgacaactgcttccccccaaaatcccttagacaagcctgcactaaaaagcatacacctagatttattcagtaaggtcctactcattctcttagccaccccattctgttgtagtgtgtgccttactgatttgtgtctcataatgccctattctttacagtagtgattaaacaaataattacaaaattctaagccattatcagttcttaacaccttaacccttttatctgtgattttccattaaagttttcccgtgtacaaacttttggaaagtatcattcttattcttaagtaaatagactcatactttcctttagaaagcatcaacaatagataggaaataagaatagccaccatgagtgttaactttttttggcccccataaatcagaatatatgtattccatgacacgttttgatttatgtgaaccagtattaaatttcaatcgatggtgctttcttaaaatacagtgttcacataaatctaccttggatactttgtcttttcctagtaaattgtagctaatgattatttgcagtcctctttggctgatgtggcctaatctcctatgccacaaggttactttgtcatcttcagggactaaaaatagtgttattgcagcttacagtaggctctccacatagatagtacaaaccatcttcctttttctcctttcatgatcaatatggatcctttacatagctttatttgcccatcttcaatcttgctttcaatatgcaaatcatcaagcacacttagggaaatcaaatttcttgacaggttaggtacataccttactccccttagtgatctaattaccccatcaaacatatcttgaaactcacagtgcatatgccttctattttacaggtttgattatttactagtatgacttttcctcctctgactttcctgttaccacataataaacttttgctgttagtcatatggaatgtacaacctgagtctaggatccattcatcctttagggtagctgcagccacatagacttccccactatcataaccattactgaaattggcttcttgatggtctttgtgtttgtagctatctgatttttgtgagttattgtcatttccatcagatttttatttgttacttttctttcaaaagtagcaatcactcttaagatggtcaggttttccataatggtagcaaccattaggatcttagggcttcttggttgaaactttggtttctcagaacgatggtccctgctagaatctctacttgtgctcctcccctttttgtgccaaggtttgttatgtactgatctccccttgcttagattaagttcaccatgagctccattgcatctttcagttttaatctccaaatccattgatttcaagtcagagataacttcttcttgggtgatttctgatctgccatactttatagcattcttgacttccctatatgactcaggtagtgagttgagtattataatggcctaaatttcatcactgagagcttattttccctagaatttgccagctcaatgtctagtcttaggaattcatctaagttctgctcaagggttttagaatgtgacatcttgaaaccaaagattctttccttcaaataaatcttgttggtcatggatttcttctgaaatttctcttttaacttcttccagattttagcaagggtttcttccttgtcaacttgtctgattatagcatcagacagattgaaaatgattattctagtagctgtttcaagcacttgttggatcttggtggttccatcatgcaattcacttggttcttccaccaccctaagtagtttctattgtgctaattaataaagacctaatctttctcttccatattctataatcaccagaactatcaaatcgatcaatatcaacctttatattactcatgttagtgaattcaggaatttgaaaaacttcagttaaagaaaactcagcttcattgtccaatgggacatcttcaaatttttctcgatcaaggcttctttcttgagggtccctttcatccagtattgactttcttggaatctttgtgagttagttttagctatacaaccatagctttgataccactataggaaattatacctaaaataaccctacacaactcacacacacaagtcaatcttcaaggtcaaacatgacctttttcttgtctgaacaaatcacacacaagtcacgttttgttttcttgaaggttctgattttactttaccaaaaacttctttaccaaattgttaatatgttctatgaattgaatgttagcagagatgaacaacaacttcgaaagctcataaacacattcaagatcaagggtaaagcatcaagcacatatcaaagtaaagatgagagaagagaagaacaaacacaacaattttatgaggttcacccgaaagattgggttacatcctcggtgagctgcctcagagaagctcgagccaaatccactatgatcaaccttcgattacatcggtttgagatgattccagtcacaactcgacgtggtaatctctccaagaacaataaggtaaacgttcttgaccttctttcttttatcaattgactttcttctctttcttctcaaactattgctctctctctctctctctctatctctctactcactcttgttcttcttctccttttctgagagttttctctctctaggattctctttcatgtgtcttgtaaaggatgaagagagcactttatatagatgatctagtaagtccctttacaccacgagttgttactctgattctgttatagttgttgtagtcagttaaggttgttaggttagttgatgtgtatcgactctttgttaactgaaatgttgtgacctagtatgacatgttagcttttatgtggatttaattcaacagtaataatctaattgttttttgctctaagattttttttcctgtaccattgtagtggtttgaaaaaattgaaggtataataaaattttttcgtctatcctaacggtatgtaaagatgttttaggagaactagacaataatgctttatagactttaattgtaaaattcactcatcttattttctttatagcacaaaaaaaaaaaaaaaaaaaattaagtacataaataaaaataaattattaacaagctaagaccggaaataaattggttgtagttctaggttctataatttaattaagtattttttagagatggatttcttagtatattttctttcacctcaataaggttaatcatttgcaaaagaaaagaaaaattggttgttttgaaagacaatgtatactttttgtttttttgtgaaaaaaaaaaatataattttagaaatattaataagtattagaggtgtctaatacttttttcgacatcatatcgttattagtataataattaggtatcaatttctatgtaacttaagacaataacttttaaaaattatatttaactaattgtacgtagatattaatctattaac

SEQ ID NO: 19644 - DNA, 3449 bp, Cannabis sativa
tcctttcaaccaaacgccaccttatgggtgagtttgaattggagagagtagagttagagagagtagacttggagggattatgaaacacaagtgttgaaggggattaacattactaccattttaatttaagtacgatctacttggaaacacaaacctcttggttattataatttaatttagtttgacattcccatcaaatctaaacctcatgtcaaatgccccctgaattctttttttattatctactcagtcacttatttcttgttattgtcaaatgtgtaccagtttgcgccaattgacacccctaatgctgtggatgctttcctaggctattggaagccaaatgcaattgtgctagtagagagtgaattgtggccgaatcttataatggatgcttcacgaaagggtgtaagttactaattctcatttggtattataaaattttgcatgtgctttgctatttaaatagtacatccatcttttgtttgaagtgtagtttcatattttcaataattcggaaaatggacagttagccgttttgcaattccaagtgtttccaatgttttgtatgttttctctacttttgatcactttacatcatccatttaatcttcagattaccttggccttgataaatgctcgaatgtcaaccaaatcttttaaacgttggtcaagaccgtggcttcttccactgatttctttaatgctgtcaaaattttcaatgattatcccattggtatgtataaatttgcttgcgtcactttttaatttatatcttcaggttttttatttgtttatttttattttgttcgtcatagagcactatgcaggcagtaaacttccaactacttctcgctccaccttctatcattaattcttccggtgacttaaaatttggtatgatctatagaaaatatagtttatattatctgtttctcttttttttttcctttctcttttttctttttcatatttgataaattcgtgatgataaggtttataacataatttagttgcagtctttctattgcatattgctatttgcaactggttcaaaattttctttttaaattcagttgttgaagaatttgtctctgaggaagagatgagaagtatagaagatctgaaggtgcaacttgcttgcaggaaggtatggatggcttcttctatacacaagggagaagaagaaggtgaaccctgctacatagcatagacttcagtatgagattgtatatattatatcatttatgtgagggtttctcatcggtattttgtcttaacatatttgtgtttcagttactgaaattttcacaataggtctgattgtaacatgctattactagaactagcatgcttgaattttaatggcattgttgatcaacgtagtctttttgtggttcccatagtcttttctctggtataggacaaaagggagataagtggaagggaagaaaagaagggagaaagagagaagattgagaataggatagaaaaggaaaaattaaagagaggaataatgtgtaattttatataagtacaataatttaacataacagagcttatatataaataggcaaatgaaaaatcctaattaatccaggaattagctgtaatatttcaagtgtcataactcattatagatatgatcttcatcagcttcattttttccccttttatggtggctggtgggtgtttgagtatggaattattctatgtttctttaaaaccttacaagatgttatctgcagtcattctagctgttcacgaagtactcatccaagaacacccaaatttggtgacaattattgtgcctcgatatacccatcacggacaacagattgctcatgtatgtactttttactgtgaatatgttcattgattttacttatagtagattaatttttttcaaaaaaaaattgatttattctttgaacatgtttagaatccatctttttatggaaaatagtatgcactttgcagttactcaaggaaaatttcttattcatcgggaaatattatatcgtgcaatattcttcaatattgttctgatattcatggtttggcatgcatgtcttacttaacgtagaaagctcattgtcacacaatgtaccttactttatgttttatgttactttataacaccttttggtctcaaatagtacagaagttgcagaaagaggggcaatctgttgctttgaggtctcaaggccataaaattacacctgggacaaatatttatgttgtagacacattaggttagcaatttattattttctttaagcaaaacattcagtattcattcaccttatcttatcaataaaatctttcctctgccaatgcagtttaagattattttttttgtctatcttctagaattcagaaattttctttataaggcctacttttaatgttgcttttgggggattttctccggcttctcaatctactcaatttctaggtgaattgaggcacttatatcgaataactcctatagctgtaatcgggggttccttcctgcctggttttactggtcacaatatatcagaagctgctgcagctggctgtgctgttctaactggtaaacaaataccctgacttttgcaccttcattacttatgttgtgagctcttaaaatgtcaagtcatataattgtgcgctggaccattaatttcaggccaacatgttggacatttctcaagcatgatttcggaaatgcaacaattaaaccctctgtcagttctccaggtttgatgatcaaccattaatgttctgtactttcatatgtaaatgtttcctggaatttgcatatgcctatctgtattcaaatattcattttcaatcaactgacaatttccaacaagaacacctttttatgctggcggcctaacactgtcactaacaacaagaaaaaggaaataacaatgtatatgatatattttaatttcaatggtattgctattgcaggtgtctggacaagttgagttacaagaagctcttgaaattgtatttagggacaacaaagttctcgaagctcgtcgtgaggctgctaaacaagcatatcattgcctatcaagaggtactgttaccagagtctggaacttattagatagtcaacttctgaaacatgccttgagctgaaaacaaattaaggaagattagcattgaagtttgattccaaagctcttacattggcaaaacgattataccaggcatagttagcttcttttatgcatttcttaatttgagctagctaaaataacgagtttgtgatcttttaccaatggtggtaataataaatgtcatttgaattgaaccacaccccactcttatttgcagcaaaaatctcctacctaacccaacttttgcaataaggttcccaatctcaaattttttgtatttaaatccccaaactcttaaaaagctcgtatgttcatttcactttctataca

SEQ ID NO: 19645 - DNA, 5274 bp, Cannabis sativa
tagggcaaaagctcagacatagtgtcttcactaaaatgaaaacagattaataaatatgataatatgctttgatatgtaatgagaaaaacttttttaaggatacgggtcaatgtcgcgacgagtcatcttgctggccatttctttaccatgaactcttaaactgggttcttccaagtaaccagcacgctggatcacagcccccttccgatctcccctatctctcccatcaaatgattgtgatatattgacactagcaggaggtggtggaccaaccggtaaatactcaccagcttctgctgattgcagatggtccctttttagtttccgccttttagaagctgcatttgcatcaatttcctccttcgaaaggtttgccttctctctttctctctccctttctctatccctgtcctccacctacacaaacagccagcaatttaatacagtagtttctagtaatctattttttagaaattacaagaattatagtgcactacataaatgaaaaatgtatcccaagaatcaatatgaaaacagtaaaggctcgtttggtaaccttattagattgtattgtattatattatatttaattggattatacattatatttttatataatactatgttacattttaatttatacaaaaatactatatatttagatgcctataaaagtcaataccacatagttttacataaaaatattgcataaaatactatataatataatatggtgtaatacaatataccaaatgaactctaattgtatgagacaattcaatctcctgatgagtttattctaaaacaatgcattcatcggaatctaactaacaaaagcattgtacaaaagagaattgaaatgctgccacataccttcatagatatcccttctcgatcttccctctttctatctctaaaatcatcctccctcctacgctttgcatcatcttgagaaagcatggattcctcagatcgtcttcgttccttctcttcatgtctaggagaaagcctttgtgagtgtcttgtagttccaaacttcctatcagcatcttcatctcttctaccagcagtaagagattggggaatcatgtgaggaggcaagggtggcggtggaggcaagttttgcccgtgaaacctgtcatcagcatgagacttttctacagatgtatcattgtaacgtgctttactcctatcctccttggctttctcagaaagtctatcaaaatttctatcattgttcctctcttgacccctctcaacagaacgctccctactatatctttccattgacctgtctctgggtttctcaactaaatcatctccacgagacttatctgatcgctcggatctttccttataatccttgtcatgcctttcactggccttatcttttgaccgatctaaaagtttatcagtggctctatgaacactttgttcatcagctccaaacttatcgggatccccaaatcgagcatcgacagacctctcacgatcagggtgtctaacatcaccttcaaaatccctcacttcactctcccccttccgccttttatttagcctgtcagcttcttcagcaggactagttctcttttgcagcttatcactggatttagaagcagtagaagaatcatgcctgggagaatgcacaggccgtgacgaggtgtgtcgtggagcatctgaggcttcaacaccatcgtcctttaatgcagagatcctagaatcagaagccttagcagctgcactatcttgctttaagtcactactatgaatatccgatgctcttgtggatgaaactgaggctttagttgaagcagaaactgtgtttccattgacggagactgaagaagaaacattagtagccccacccagccttccatctgatgtatgagatgtgatatctctgtcactagttgaagaacctaaagctctcccaacagattttccagatctaccatcttcttttgtaagatcttgcttcactggcttcacaagtgatcctgcttgcacagtccgctttgtttgagttctcacctatcaaaagtatgaagcaaaagttcacatgagaaacagagaaagtacacttttttttttctttcttcattaatgatttcaagttcctaggctccaccaatattttatgctgttatcaaaaagaaacagattcttttcttaaatatataatataacacatcaaaaatgtgatatcaaactgaaattttaattattattaaaaattataaaaagatgtcgagattcaaatgcgataaattaggccccgcattttctttgatttagttcttttgcgaacaattcaggtgcagcacagctgattaacactggacataacaattgaacataaataaaatacattcatactagtagacttatggtttcctaatatgctagattatgaaataaagtacaagtaatgccagtacaaaaaactaaaatgctacctcaggttccgcactggtctttggggtgacttttgctataatttcgtctctattcgtggaatcctcggctagtttatgattttcaagtgatctagatgtccccgatgataaaccagccaaaggcattgatgactgagcatctgtcccgtttactaacgagctacctttgagctttacaattcctgaatcagattttatgtttgaagcattttcttgtctttctgttctcccatcaacagttcttgttttcatcatctgatctctgactgaattagaagaatcagaaacatttgttttttactccaacatattcattttgagacaaattaatagcagaagcactttttatggctaaaaaattaccaattgttgactttgcagcaactgatggtgcaggctttaactcaaggtatcccatgccaaattcttcatctgtaacccatgaaggctgcaaagtgaaagagaacttagtgccactaacctttactttttaagcaatcaagaatgcagtaataataataaagtaaacgaatcgaaacgaaacacacctttctagcagctaaagcagcagcaacacctgttgccaacaccttgagatcttctctctcatcacttttgatcttacttacctgcatcatacaatgtaatgccagcacaattagagccacctcacacaacaccttcacatcaaatagaaataaaaaaacaaaaaggagcaaaacactactaacccgtttttcaaggttaattccactctttcgagtgactgggaaaacacctgagatctttgtcaacagtatgagagaatttcggatttccatgtactcagaagattctaagcactgaatcaacaaacgtgtgattctttgactccacttccagtgtacctgatgtcaatacaatccaatactcattaaaataatggatttcacttcattccacacacaaaacatgacaaagaaaactattgaataacaaattcacgttacaaataattgtagcataaaataagtactacacaaaactcaaatcaaaattgcattgaaaagaatatttgtacaaaaatttagatttttttttataaaaaaaaagtatatgaacatatcagaaacacacactgaccaacattcagattttgacagaatttaagcaaaactatcaaggattagagttctctcatttaaatgaataaattctcacatggacaaacaggtatgtaagcattcaagactgtattgccaagataaacatcctacagacctaaagcaaaactaaaactactaagttgagacaacaaatcaaacatctcaaaggaaaattcaaagaactagaatgtccaaaaactctaccttgatgaactggccataattcacccgttgactatttggatatctgtagtacacagcaaagcctggcatgtttccacattcacgctcatatacagattcatcactctgaaagagaaacatttatctcaagttaaaataagaactactgtctcataagccaactctgtttcatcaacaaaaaaaaaatattacacaccttccagtggtaagcaagcttcaatgtctcatacagaaaccttccaagtcttcctgcttcatattcagtgcagcagcatatcatgggctgtaaggtcttacatatgagaacatcaatgtggttgactgtgttaaaaaaaggtgtcccgagggaatgaagagtgtgtacaaatacagcacaatagacagcatctggcatactaaaagtacatcgtggaaaaatacaacgctgaagaaactccatgttgatctttagagtatcaggacatgagctcaaccagttgtccttttcacgaaatagacgcctacgaacagaggcaacattatcctcatgcttgcggagctcgctagtcaggcgatctagagattcttgaattctttccttgtctttcttccttttggtaattgctgaacttgaattatccgaaaactcttccagagctttcagggctgcatgctgtttggaaatttcagattcataccgctttctaggaacataaagatcataaagattgagcccccagaatgtagtatacagatcaggagaaaggctattccaagcttttgatggcaacatgattttgacagtattcagaagatcagaccacctgcataaaataacatgaatgataaaagagaatgcaaaactcagtatcacatgatatatcatttatgccaagatatggaaaatgaatagttgtatacttgtacataaatgatgcaacacacaaatagaaggccaaacaaaaatcaaagtctttctcacaataaccctacaaaatcttcctgttttgagttacaggcaaaaaaaaaagtcaatgaataaacaatggtcaggtgtattacatcaaaggcgtccgagaaggaccaagatccaaaactgcatcaccagagtgttcggcatgttcagaatctgaatttgcgattgcagcactggatgggtcattgtctaaaggccagaagagatcagaacttccctttatcttgaacagtctcattacaggccggtatattaagaaagcaacctatgtaaccaagcaacaaacatttattacaagtgttcaggtagttaacaataattagaagatatctgaaaaacattaaaggcacagttagtttctcaatagcacgaaaagaaaagttttcacaacaggctactgaaataaagcctatgatctcttcagaaatttaagtactagaagccagttgaacataaaaaaacattaatctatgcacatttaaggattagtaatggggagagagagagagagaga

SEQ ID NO: 19646 - DNA, 3226 bp, Cannabis sativa
tgactactgatggaaatttgtataaagtaaaggaaaggtttagttggtttcaatatatcccacagagggatttaggcaaacacaagctgtatatcataacaactctttaccttagagtgttatttcagctgggtttttttcacatccccttttaaaagtttctattaatgttttctagaaaagattgctgttcaaatggctgaagttctagtctccactgtagttgaatcctgttcataactaataccttttaaaacatttcttgtgcgtttacaacaatgattttggcagaacagaattggagcggatatcataatggctcttgatgatgtggtcaaaactaccattactggtcctagaattgaggaggcaatgtatcgcactcttcgatggatagacagatgtatagctggtaagtgtctccggatcttgttcatttgattcccgagtattctgctttgacttgttgttgtgtgctgagtatattataatgttcattttttttgcattgtttgttgtattcagctcacaagagaccaaaggagcagaacttatttggaattgtgcagggaggcttggatcctgttcttaggtgaaatttaattaatatcccgacgtgcattgatgatttgttgatttttctctacaatttttcactggcaccagtttctgctctgctgaacatctgtctattgtaattactcattttaagatgatatgcttatttgaatcagggatatatgtgtaagaggcttggtggatcgaaatttacctgggtatgttcatgttacttttagaagtttaggtttaaaattttaaattcattggctagcactttatttctatatcttatggctggtatgttgtatgctcgaatttcaaattgattcatcctcacccatatatatataagcaactgaagttattgtctctaagtctcgtaagattgatgtctcgaatgtatttctgtgacagctatgccattggtggtcttgcaggtggtgaagataaagattcattttggcgcgttgttgctcagtgtactgctgcattgcccgaggataaaccacgatatgttatggtgctcatttttaatctgtctctgttctatttcattttatgcttacttgttttttccatgctctgaagttgttgagttttcttgtcctaatttcaatttcagggtgttggttatccactggatattgtagtttgcagtgccttaggtgctgatatgtatgactgcgtttatccaacccgtaccgctcgttttggcacagctcttataccagaggtaataatagctcgctaataaatcccgactagattccctccttgggatactgattcgtatttactggcttcattcatgcagggagttctgaaactaaaaaataaagcaatggctgatgatactcggcccatcgaccctacatgtgattgtatggtctgtaaaaattatagtagagcatacattcattgtcttgtgacagtagatgcaatggggtctcaactagtttcatatcataatctgtattacatgatgaaggtattgataaaaaaatttctcaattccattccaactctctggtaattgtttccttctaaaatttgtattttattttttcttttggttaaatgcagcttagcagagacttacactcctcaataattgagggaaaatttccggagtatgttattctttttcaaataatcatacaagtgttctaattttaccattctatttatataccgacgtttttcgttaaatctttttataggtttgtttgcgagtttctgcagacaatggtaagttctgttccgaagctgacctattcgcacttcactgctcgttccatgcagtttttgttattctttccatgtgtgtttgtatttctgttatcgatttttctttgctcgtggaactggcacatattctgtttgtcactgaaactttgttgttgtttgtagttcccaaagggcgatgttcctgaatgggtctgcaatgccatggaggtagctggaattgatatctcatcgtgttctcatcatgttgtcgtcacgagataggatatgactttatgtctagactaaatgcagttagtgaaaaacgagttactgatatgtcgcctggttcaagttctgggcatcctcgagttaacccagaaaaagttgaaacacttcgtcgatcaactactttcggacgcataatgagtaggtgcagacatttcatcaacagattaatgcagtgtttttcttagtatcttacctttgcttgctacaccacctcaagccatcatatgattacactactaatttttaggatatacttaaattagttttgatatgtgttaagcttatttatattattgctagaagcattaaatatttattacttaacccatttttgcattatgaattttgtataaataatacgaaaacagacggccgactaaggatcgccaacctctttactagagaaaggttacgctgacaaagcctttttgccgggcttggcgcgtatagctactttttttttttgggcgaaaattggaccgttaaaagcagtttttttttttggtattgttagatgaaatcaagttagaatatgttgggttcactctgaggtgagacgaaggaggtaactactttagatatcatttttaaaaaaattaaaataaaattagtaataaaataaaaaaaataatgctcataatactaaacatatgttgcagtttagtcatataatttgattagagtaataattttaaggtttagagttcaaatcctaacaattttattttttattgataagtatacggtaaattagttctatattttataaaaatattatctgttacgcgttaattaagatgattgatgctaggttgaaatttcaactgtcggtctcaataactagctagtctaaaaaatttgacaacgtgtttgtggtgaattttcaccttcaaaacaagttgttacagtagtaacaatgttcaagaaacacaaattaaaactaaaatcaattacaaaaccaaaacttgaacttaattgaaacaagacaaagaaaacttattttgataatgaatgaatgatggatatttattgaataggaatagcacataaattgttacagcagtaacaatgttcaagaaacacaatcaaaactaaaactaatcacaaaatcaaaacttgaacttaattgaaataagacaaagaaaactta

SEQ ID NO: 19647 - DNA, 13739 bp, Cannabis sativa
  modified_base (27)..(27): a, c, t, g, unknown or other
aaccaagaattgccgttagataggcanttttaatatataaagatatattagtacaagcatatggtttaagacagaagttactaaattattttaaataatatacatatttatgttggggtatacatagagaccttagctcgattgattgaatagtaccaacaccaaagaaaaaaaaaatatcccataagaatatgatttagggtgtataatgcactaaaaaaatgatgcacgtacattttttttattattttattagttatttaagatattttgtaaaattttgagaagtttaaaataatttacagtatataaaaaatagcattcaaataatttatttacaagcatacaaaatggaaaaagtcacacatgcaacagattgtttgaatcttatttttggtgtattaaatttttttaaattttgtagaatatttttaataattacaatatacataaccatgaaaaaaaaacaattgaactaaaaatttatcttaaatgccaaaacaaataacaaatttatcagtacatccattttaaggtgggtgttcataaaatttccttaacatttatttaacaaccattattggataataaagggccaaaggagttgccatgtcctccctaaaaaattgcttatatattttttttttaagatagaattaattccatataatttattatgtataatgatatataaatatttaaaaatggacttaatagctatgttatattatttttggtacaattaaatattaattttcaaatgattttacatgataatttttgtaaaagattgctaatcatttttaatataccacctcgtgatatctaataggaatgttaaaaaatattagtattggtatttagtgctctcctattaatctaattatgtatcgagtttcatatagtttaatgtaataacttttaagaagtcacaaaacgatatatttagaggtgctataggcactattgatgttctctaacaatattttaattatttaaattgtaggtacaattaatattgattaatcttctaattaagatcatgtatagctagctatataattagattttatattggaaataataattatacacaattgcaagatgtaataaataaacatatatttaaccaatttattttatttttcgcaaagtataacatatatacatgcacatatcgatcatatatattctagaattttctaggatatatcatgcctagctttactatgtaccacaattattattttccactaccgtaagtatattatgtctagaattatcttctcgatgtagtgcataatattatatatataaaatacagatcagtatcagtggtgtatatacataatatacataatgataaaccattaatctccaatattatattcccttataacatttgtaccacacaataatatatagctctagctaattgcatcacaaatctgttaacacgtaattgtatgtatagtacttcaaatacatatgataataaaaaaatatatatggatcatgatcatggtctggtacagtaaaaacttagactcgtgaagcgtagcaattaatcattttgatagtccactagtgagtaagtggaattgtaaagttgtgatatgaaaacatgggtcggctgcctatatatacacatgatcacatctccactcaaaaacatgtcgatcatccttaactctcacgtatgtaaaatattattcccatatttacgtgtaaccataatttgcatgccacatgtcccatgatgtataattctatatttatatagttcattataaacacgctttctcatacatattctcttctataaatacctccataattctcattcttcatatatcataaactaattaaaacacacacactacgtacttacaataatatttatccctacttagaagaaaaaacgttgacttaatttgtattgactttttttttggttaacaaaaagaagaattatgggatccttgaagtgtttgtggtttattggtttggttgttatgtcaagcttgttgatggagtcatcagagagtcgaatagtggcaagaaaggagttagggttggaccttggtggagttggcattggaattggaacagggatagggattggcttaggtggtggaggtagtggaagtggtgccggagcgggttcgggttctggatctgggtcgggctccagatcttcttcgagttcgagctcctcttcctcttcgtctagctcagggtcgggtggtggtgccgggtcagaagcgggctcgtctgcaggttcttatgccgggtcgggatccggtggtaacgggcacgggaagtgagtaattatggattacaaaaaaccatatatctattatttgtgtttgtaatgatgttatatcaatattaattactaataagaagaagagtgctcaaagtacttattacctatctagattgttatgtttgtactcctttaaagctaattattaatttgaatttgagtctttaaaatcttaaaatttaattagtgacgagtgaaatttttaattacatttagaataatatttaatattcttactaaagatggtggttattttttttactcaataatcttaaattagtgtatcacaagtagcaatttagttgccgaatctcaagtgtctctttgcactatatatgcatttttttttacaactactacggacataaaccccattttattaccatcaaagttgtacataatatctaacactataaaaaaagaatttttcatatccaatacaaatattaactcatattaatatattattgaattaattttatataataataacgttaataattttattgaaattttataattaaataaaaaattaatataaattaattttagacctacttgaattagtaacttttatagaaaatttattttattttaaaaatttatacttaaggaaaaaataaatttttgtaatttatttttgaactacatatataaattgataattttcataattatttaataaaaataatatttaagttataacattgattgggatattaatttttagtacctaaattgatattaaataaatatttaaaataaatgaataaaaatactattttaaaaataatgaactcatttaataaaaatattcgatatctcagttattgtcaatataacatgaattttattttgaaggctcctcaagacgcattgactttgtccccctaagggtggggtatgtcaaaataactttaacaccgttatatttcgtaagatagatgtttattaatcgaattctagtagattcactcctaagatgactgctagggctaaatttttaaatattgaaataatgggtgaagctcatgaaaataagaaaaatttatttttcagttattttcaattgaataaaaggttgctaatgatgttcattaggtgagttcactactctatttgactaacggtatgtttgactctcgcctaacaggacactgtatatcatatagtcgatgttgactcagaaatttagactagatttctaatccacacccgatcactagattggtgagaatgaaaaagtagttagtaattataagagagacacaataaatttatagttgttcattccctgtatcgtaaaagtaatgaagctacgtctactttaagtatttatttctcacgagatgatgttacagaaaaagactaagcgtcagaaactctaatttctagagagagaaattctgaccttgtgggtagtattctcaaagtaaaaaatgagcttagggatctctccttttataggtgaaggaagcccacaaaaataggaaaaaaaaatacaaattagatattttagaccgtagatgataatttaatagtaaaagttagctcttggtggtgatggccattttttggagctcggcggtaccactgtgggtaatccacagcttatttttgtgacacccttggggtgaaatttgctgtcgatagctttaaaattgcgattaaagtttgagacatgacttgacagagcatggaacttgtagggtgaaacttggtgttgaagtggatagagtcaaagtcggagggactccaaaagcttgtcgagcatctttcaaattaatgataccttgtgccttggacatgaactcggacaaggtctcagcctttttcctttgcatctcttaccataacaaggagccaactgtaagttcagactgaagggctacgagtttcatgtcatcgctgaccttggtctttgttgccgcctcaatcatcctttgaataaaggtcttcaggcttttacctagttactgcttgatgatggtgagtgatccaacttccatattacaatctctcgcggctataaattgtttccaaaaggtggattgtaattctttccaactatggattgatccgagagccaatctcttccaccaatctttagcggacttggtcaatgttaatgaaaaacagacacttagcatccacaactacaatttagccttttagtgacactatttagtgacccacataaaagtacgagtcactaaagagttaggagtaatttttagtgatatgcataattagacgctaattgtttggtattagtctcttataatgtgggtcactaaaaatatagaggatcattaaaaatataaagggtcactaaaaataaaattcaaaattttttaatttttactaatttaaaaaatactggcatatagtgacatgctaagtatgattggataagtatttgtccacgcacctagtgcatcactaaatcataatcataattttttttgaaaaaaaaaacaaacaagaaaaataaagttgtaacattaatgtatttttttcttaaaagctgtaatattaatgtagttaataattaaaaaaaataaaacataaaaggtaaataagggtttacacaaaaccctattagtttgctaaaacaaaaaattaagccatcatatagtgtcgtttcttcttcaccctcaagaaatgctaggcgcgattgttctctttcttcttctccttcttcgctgttggtgaccagccttcctccgatgaatgacatccaagcttcgtctcgttaatttgttatcgtcttcgccttgtctctccaatacaaggatctcgacgatcgatcgtcgtctcaagatgatctactgtcgtctctctggctcgtcatccacgattgcaagggaacgtctgagagatcaacgttcaagatgagcttagtgttttctcatggcaaggaacatcgacgctttcaaggctgtcttggtcaaccatgacgaagaggtcaacctaggtgatggctgggtcttcgacgacagtcagcttcaacggaacaagaagctgagatcttcgccccaaacccgcttcctcttcatctttattttctaattcctgctcaagttttatttttctcttatcatcgttccttttatttgtgtataaatctatgttctatggtgatttctctctctctagttgaatttgcgtctgattctttctctaaagacgatggagaatcaatatcagttgggctcaaaaatagtctggcttgagtcaattctagggttgcagttagtaagggatggagatcgaaacttgaatcaataggattaagttatttttttttttattttttttattcaaatgctcatactcataattcttggtttacgttgttgtattttattttaaacaattatctattctttttgcttcaaatcaacatacattgaaaatattttactgtaatttattttagattttgtatttgtgtttgtcatttggtataaaaatcttgtgagtacttaaagattcagatagaagtatattggaatttgattagttattttatataaaattaatattcataaaaattacttcttacgttttattttaaaaaatttagtatcatttttttttaaatgaaatctggtaacaatctaattaatctatactttttaccctaaaattgaattaaataaaaacaataccagtgaagtaaaaaaaaaatactattttataaaatctgaattaaaaagaacaaagtatttttttatttaaaaaaatttaatatagtgccatttttgtgggtcactatatctgcaaaataataataaagaataataaaaaaagaaaagatatagtgacgcttttgggggtttgctgttactttttcagtctgacaaaactcaactttaaatgcatacaatgacgtgcaataagtcattgtaaaagggtttagtgacacgcgttgaagggtcactaaaactagctttccagtcaccctcattagtgacattcagtgagtgtcactaaacagttttagagtcactcgacgtgggtcattgaaatctgtttttctagtagtgatcatcactcactctcaccatttgcatcatcttgttgtacttagataggtgggtcctaaaatccatatggccatcatacaactctatctgtagcatcttgaaattttcaggtagtggggcttccgtgatccgtctgacacacaaaactgggtccttatcctccgaatctgagaggaccccactttgcgaacgagctttgtcaaagcatagattttttcttctaacatttttttttcactatcttgaaagtcgcatctgtgagccttgccgtttaagtggttccttaggtcgtttctatgtggcctcaccttctctcctttagtcttttcatatttggcgtcaatgcgctttcagaggtttatagtggaccaactgttgttaacgcagatcattgttaaccaaatatatgaacttttcatgtaataaatatactacatagttaataataacaataaataaacaccagatatttttacgtgattttgtaattaaaatctacatactccacgagtccatcttactatgaatgattaatcttgatacagagtacaagttctctctttcaatctgatagataactttttctctcaaatttgttgtcccttttatcttggatttttttttcctatttgtaggtgtatagggtgacaattattttttcttgagctctatttattcatgactgctcatgtaaagtggacattccccacatttcatttttatgcacatagaataatatttaataaccaccaaccactcttttgtttttatccttgaacggttatgctgactatgaaggttgtttctcgctaagtgtgtgagttgtccttatttaccgtctttgtatgaaaaatgctaagtattggtatactgctgctcacagtcttcttttgccatgatgatattagcgaggtagtcacttcaacatatagagggcgagctggatgaatttagttattctctccatgtgcaaatatgtggattaataagttacaagctcttactcccaagtatgtcagtcgataagttgcaagctctttgttatctcgtcttgaacacttctattatatactctgtctatcccaacatggacatattgtctcgtcagttgtacctattaatagttattattcttatctcacatgcgtttatgtggcagcgaatttaaatatttctatcaattgtaatttattaaaacgaattatttaagtcgcatttaataatataatttaatattataatcatttagttgattcatattcctcttgaagtacacgtgtcagcttttggttgatagccgaattttgggtataacaactgtcttcgaagaactgttattctatcccaccatcctgattaacggaatcactaggtgttgtgaaaaatctaacacgcaagtatacgtattgttttttcaagtaatactcaggtaagtgaagttattttaacgaggactgtatttaagtaccaataaattaaattcttgtttctatttggcaatcgagtaaataaattttgaaactaaataaaaaattaaataaaacaaacaaataaaaggtttaacaatggatgtgaaattagggatatgatttcaattaatttgattatccatttgttaacactaattaaccattcttcttcctcttatgtgctgataaatcataaattaacctaaactattttcagatcataaatgtcctgaattgcatactactgcatctctaagatagaacaacatacaatttgtactaaagaataatctaaaattcacataagctatgtaaatgcctacgtttcacatcaaaacatttattcatttagagcattcttaacattcacttttcaaatttcacactaagatcatgaatcatgcataaggtgatcaggctaaaacatgtgttaaacataaagatgaataaatcacacaatcaaggaaaaaaagaataattaactaaatatgaatccatgaaataatgtcgaacaatatacatcacatctctaaatagggagtttagttcataattaaattcataattaaacagacacaaataaaagcataagaaatcaagagaagagaaagaaactagatggaggattgtcacggatcgcccacgttcgatcacaacttcttcttcttcttcttgtgtaggttccattctgtctatccttctatacttcgtaaccccctttcattaaaatgaatctgcaaagaagagaaagactcaagaatcaagatactccaaagacactaatctgattaatattcgtgagaatgcttataaggccacatgtaatatggtccattacaaaaagcatcagccaatgtacaaaggtggaagacaaaaaagagacccaaacaaaagatgtgaatactatggtgatattagacacatgacgaatgaatgtgactacttgaaggattaaatcgaaggactagtttggaatggccatttatctaattgggtgaggatactagttatctattctgaacagggcgtagcgcacagacaactctttatttctagacaacacaaagccataaatcctcctcaaggagtaggccttccgttagctcctgtaatacaagctctaactatacaggcccctcaggggatacaaactaccctagcggcaagacctattgttgttcctggacctaggaacccatactcacccggagttgctccaccaacgggccatgtagcctccatatatggagctccacacattgttgcaagtaccaaaaatacacagaagagatacatgaatgaactggaacaagatgaaacatgcaatcttgtacaatcacctgctcaacatcctcaaatgatgaatcttctcataacattcatagaagatgatgccaagcatgtgcattttccacacaatgatccattggtaatagaagctcaaattgcaaacaagagagttttcaaagttctcgtggacaatgaaagctcaatcaacatcctttttaaggaagcttttaaagccataagtttggtggagacaaatttgacatcttgttcggttcagctccaaggcttcaatggagatacacttgttccaatagaacaaacacaactaccaattacactgaatggagaaaaaatttgggaataatgtcgcctcaactttcaagtagtgtacctttgtagtggtaaattgcccaactgcatacaaacgtcatttttgggtgaccattcttagtggattttagagctgtaacctcagtctgacatttatgtatgaaattcccaagtgatactggaaactttaaaataattgaaggtaatcaaaagagtgcaagaaattttaacaacgtctcgtccaagactattatgatggtttgagaagtaaacatagacaaacccagaatgtcttctcagccagcactgagggtggtccgggaagaagatgaattgaatccacgtgtgggcatgaaataataatcgaacccatggaggaggtagaaaaagtatgcatcaatcacgaggatcctaccaaagtcatcaaggtaggatcaatcctcatgtgatttacatgctttgaacgtagatcccaagacagatccagtccgacataagcaacgaccattagatcctgaaagagcagaagcaatgaaagcaaaagtagacaagttgacaaacattgaattcctccaaaaaaaccttgtataaattgtaatatgatttttttttttttttttgttaataaattttaaactcctcacttctaattcataaataattgttaaatttattataatatcaaactcaaactaattagtctatgttctcttatgtatatatccacctgaataaaaagatgactcacttattgatcacagaatacttacaagtaattctctaaagttataattcactttcactgtatgaatttaccataaccggtcagtccgtctacaaaattatgattcaactaccttctttcaggtgagcaatctaaattttataaaggaatagtgagagtttgaatggggtgatattttcaaatttattaaatttaatgaatttttgttttctctaattattaaaatgtttaaatttcaagattatacaagcttagaaaagaaattagattggaactgatttttataagttctggtgcaaactctgaaatttaaaggtactactgaaagctctcaatttagtatgtcatgctacttcaaattgtttgtccaccttgactcaactaagtggttagaaggttccagttcaaatcatgtgtccagattgtcaaaaaggtgaggatactatttttcatgtacttatttcctattcaatcgttgctcaatgtttgcagaggcttttagctagaattaggccgattgttcctcctgacttttgcagttggtttgattaatttttacaaaggtgcagtaaggacaagtgtgaggaggttgttatgttgtgttagggtttatggaaggctcgaaacgagttggtttggaaccaaaagtatgctaaggtagatggtgttcttatctcaaaatagaggttcaaaggcttcttttctaaattttaaagctagtgatagagctgaattttggattaagccacaagagaatacaatcaaagtagttgttgatgtcaccattttccgtgatcgagctacatttgctcataagtcgctcgagactctcaaggagaagtagtgatggctaagtcgggtatttttgttagtacaggcactcctgatttagctaaaataattggtataaaagaaacgctaagctagattaaaactcaaccatggcgaaaaagtagagttggagtcaaattgcttggtagcaatccaatctattcgaaattcattacctatgctttctacttttggggttattatagaaaattatcgtaaatttcttgcatctttaaacaatgtttctttgctttttattaaacaatttaccaacatagttgcccatagtcttgttagaacattttgttcttttccaaatcgagtgttcaacaagggtgatgttcctgttgaagtacaaccttatcttttaactgatttagcaaattaataaaagttctatatttatttaaaaaaaaaatgactaaattaaacaaaaaaaaattgtcgtgtttgtgaaaacctcgattaaacacgagactaaagagtttcagttgaacattgtcactggagaaaggctttaaaaatccaaccttagtggaaatctgacccttctaattctaaacatggtttgcttgtgtgtgctaacaggataccactcaatggccagtaaaaacagtacattatttaaatataatgtgatcttaccatattgattggtttcttctaaataaaaatactaccatatgattgtaccaaacaaaaaaatggattgatgttttcctaacagattcatctgtttttccatattgggcctcaaagtgttgacagtgcccatggctggtaattattttcaactagaattatgtacaagaaaaccataaaattagaatccaaaacatataaaaatagtagtacattcttaacgaaaagatattttcagttaagctagaatataggaaagatgcctacctctataaccttcagataaaaaaagaagaagattctttgctcaggtaaaaatcaattcagccttgttatctgccagaaattacaaaacttgcagtcattccagaagcctgaaaaaaacagtttgaatattttgtgaagctaccttaatgatatagcaaaaggaatgccccttgttcagggtggatatacagataagaggaatcaattagtctgagtttaggcatctcggatagggtggaaaaacaaagacataccatggacgagtgttttactatggagacactagtggcgttgttttcccgatcacgggaaagaagaagcctcacatgtgggatactcttccaagtctccccaagagctggtttaggaacacctccctccccacctacagtgtgattggtcacctaatcatacatttgattcagtgttattccactattgagtaaaaactattttgaaattaaaagactagttaattcacatcaacataaattcagaagaatattaatttgaaaagaaagttaagtgatgtaaatgtgtgaaatgaatttagagaataaaatctttacataaaacgataggactgaaaaacaaccatcgaaaacaataatatgaaagttggattttggtgagaaaagaaaaaagtagaaacaatgtaaattaaacaaaattttccaaatcaaacatgaaaaattattttttttctgttgtccacactttttttttcttatattttccctaccttttctttcctcgtcaaaatccaacttccgaacatacccttaaaattactattcaagagaagaaaacttaccattactgcaagattgtgctcatgtgccaacttctttagaagatatccagcagataccatcaatgcatgccctgcaattactccacacacaagaaatgataagttttcaatataaataatatctgttgacataattacacaatgtgtgaattaactaattgaaaaccagaaacaaagtatacaaacattcctagagaaagcttctaataacacgataacatttaaaaacaaatcttaggagagaataccatgtgaaccgctgcctccaagaattggggtaataagtgaagagattgaatccacaataatcaaccgcaccatttggggtcctctctgagatctcatattcgattcaagctgatgtaaaactctaaacatagtgaagatatcaaacactgactgacagaagatattgttcataacattctgaagacgacgaccttcagcctatagatacaaatttgaagaagacagtgaaatttagacaaaactatcaatataaagaggaaaactgcagtaaactgcttaaaggaaatttcgagtaccaaatcaacaaaacatgcaattcgttgaggtgagaaagaattgcttgtatctatgtatataacatgatgtcccatctgcttttttgctacatttgaggcagcttgtagacaaacctgagagttggtaagaatttggtacacacattttcatgtgccataaaaattacttttgttgtggaaaagtagtttatcaaaagaacatatagaacattttctatacttaggtactcaaattctactatacaactttaggaggcaagaaaaatctaaaatatttctagggtcaccactcccatgcgaaatcaaattcatccttgtgggagcaaagaccacacccccttataaacaaacaccggtcatacattttgctaaaacaagacataaggagaccctgaaatccaaatcacacttcaataagacactag

SEQ ID NO: 19648 - DNA, 2106 bp, Cannabis sativa
aacacagacctgccatatttcaggtgatgtgggatcggtgaatttttgcaagcagtaggaacaagaatcagtgtcactagtgaaagccgtttaattgtttctcttaagttaaccggtgctccttttgatggtgggcaaaaatcattccaaagtgccattcgttgtgctactttctcattattctgcacagtttttcatttttgtaatttgtaattcgttatctagtagttagagcatttgttttccctattctaatttaagaaaattatgaaagggaaaaggaaatatctatcgcctttcttcaacaaaaaaaaatcggttaggtcttgatccctttataaggcttgtctttcctgtgttttttaagtttagtcaattcattatttgtaaagagagagttttgtaagaagaaacacttgagagcaaagtctttagctgaaagatcttgtaatttatttcattgaagatcaataaagagattacgagtgttcctccccgaggaagtagagcactgcactaggctcgaacctcattaatccttgtgtgctgagtttacattctagcattggattatctctgttctagaagttttgattcttacttttagcttgtgttttattcagttcatgatgttgttggttttcacaacggatgatcaaccaaatattcttacttaataacaatctaacctcaaaataattgctgaaatgattgattctttaaaagcttcaatgagagtaaaaggatgacaaaggaactatttaactactttccacaaatactctattagtacccccttaaaaaaatgaagcaaacaagtattaaaactccttacgaggattctaaccttgtagcgtagactgaggttgccactctgatcagcctttgtgtaagtccttaaaggaccagaaacataaatgatatcattcggtttcaaatgattaagacatagttttcccatctcatccctcatgttcaacactaccctgttcacaaatcatatatgaaatacagccaaattgatcatacaatactaaatagattcagatattaaaaataaaccatatatcaaaaaaggctatggagaattttgaaccctgaactattgggattgttgaatttaaggacttttcgtccaattccattcaaagttgattgtccatataccaaatcgtgctttctgaactttagtgaacggaattggaccgaagcccttctaatccaacaatctgaataactcgagggaaaaaatcctttttagcctttaaaaaatttgagttgatgccctctaaaaaaaagtgttcttttctttcttcttcattagaaacacacaaaaatacataaagctaagccatgagagaatcaaagagtaaaaatcaccattttttagtaacaaataacaacacagtagaaaattaccaaagaggagcatttgattgattggagctactgacgttcagaacagtgtaagcacaaaatcgatcgtcagagctaaacaccttaaccggttgagtcacagtgccaataaagctggcggaattggaaaactccttccgccatgtgatcgaagaagggcgttgagatttgaggatgtggttgtagagtccgatacagctttcggttgagttggaagaggtagggttagcagaggccgtagatgaagagaaggggatcaatttgaaactctgaaatggtgataatagactccgaaccttggtgggataacgaagacgaagtgcaatcatcataactaagtgaatagacagaagaacagactagttggaaagaaaagcttggatggaggtgttggtactgtcatcaatggcggattgggttgttgttctcttctgggtttttggtagcattgattgtatttcaagggttttgggtttttggtttccaacaactatttttacacaaaataatatatttttatataataattttacagcatagttgtggggaattttttaatatttacaattgttatacgtataatttttttatgctaattagtaattttttttttctgaacttttgacatgtactaaatcatgttttttgaacttttttgaccgttaaaaatttcccttgaactattaagat

SEQ ID NO: 19649 - DNA, 4329 bp, Cannabis sativa
aaaaccggacattggatagtaagtgaactagccaactaagacaaactaattaagatgaagataaaactaatgaaaagaatcaaaagttgacaagtaccttaacaaaaagcatcccatcatttcccttggcaagagattttaagacattgacagcaccattccatgatgacgctactgatgtggcaactctttgtgacttctcttctgacagctcaaaatgagatggggaaagtttttcaacactgtaccctaaactgcaccagtacaaagttccatttgaaagggttagatttcatctaatgggagtaggaaattcataactgactaatagaacttcaaattgacgtagagaacttcaaatctaatgacacggagagcttgcccctgctaaaagtgaataattatcaaatgagaaagcagcagtctatttacattcagtgctgcatcaatacgtcaaaacaaagtgttgctcttacagttttctaggtaagtagccatgaatcagtaagaatattgctattcccaaaagaatctttgcaaatgcagtaattatagaaaatccagatgcaacaaagttgaagtagatggcagcaagaacgatcaacgtgatgattgtctgttttttatccttccaaagtaatgtgtcagcaactgcaaaatagtaatgccaaattacatttatccgtgaaaattaaacacatgtatactttgcatgttctcgtacacgacactttcaagttggacttggcagctcagaataaactaatcagccatcaaaattattcaagatattccaaatgactttaggaactcaattgtgttttctccctctgcttctcatcttatagcatcaaccctagtcatcaattcttcctataataagtaatttgcccctttccttatggggttgagttgggttggaaaatatttgcatcatcaaataaagctttcctacataaggtgtactcttacttataaaattagtcatctaaggaaatttgaagattttttttggtaagatgaccaaagtccaatacttcatacctctaccacttccaagatacgtggaagctttagatggtccttctcttttaggttgatgttcagcccttaagtgtggatatgactccaatgtccttttgagaccttcctgtagaaaagtaaaatcacaaataaatcaaccaaagcaataatttcagtcaataaagaaagataatctggattgctagcacatgtaaatcaccaatgtacaggtacctatcagtaataggtttccaacccaagtacacatattcaacaaacattacaagaaaagaaaaataaatattgtaagcctatatctaagataaggcaaattattggttggaaatcctaagtagaatgcaaatacgtaatgaccatgcaagatagacttattttattcaaaggtatttttttaaaatgttttcagttcaagttcagcttatatttcatatgtcgaccgtggttctaattggctaatcagcattttctctttattcactcactttataaattttcattgcttaacctctatcttttattaaactacagatatgacagcacaagtttaaaaaaattgattggaaccacaaaatcaagagaaaagtgtaatcctgtgtttaaacaaatagttgttactcattactttgaaagatcaaacaacctgaagagttacaatgggagtgtaatcgaggcgatcctttgctttggagcaattaaaagacctagtgcaagagaggagtctaactcttgaaggtatcaactgtggaaccttcatcccatatggaccaagcagcttatatgtccactcaacaacatgtgcaattggcatcattaccaaggctgggatctttattcttggcctgcaaactacattggttcaggaaatacataataaaatatcatggaccaaatacattactgtattcttcaaccacaattcagagagggaaacattaatgattttggagattgttccttatagtaggatgctttatgcagcaaggcttataaaaaaaaaattgttcactaagagaaataattaaaagaaaaatgcacacaaacagagcaaaatagaagaactcaactgaatgataactgtgcataaacaaatccaaaaatttacaaattagttgaatggaagagctaaagacaaagaaatacctttcatagccaagaccttcaagaataagtgaaagaaactcccaaaacttaataggttccatattggttataaaataagcctgcaaaaccaaccccaacttagtttcatattcgtaagataatctaccagattccacaccaaaagcatttcaaagaatgactctttctgtcaagtcttaaggcaaatcaagttaacataattttatacggcattgttagcaataacaataaagcaatcagtttttagacaaataaatccgtaaaaaaattcagccataacatataagtaaataaaatgaaggcaataatctgttcgtgatagaaacagggggtcaacttggccagaaactacattgtatagtgaaaaagaagaatcgctgatagagagaaagggaaattaataatatctaattccaaattagaattcacatcctggaaacttctactatcaaaagcttttcccatgagacatttggatttaatagaaggaactacagaaagccaaacaatacagtttcatctttctgttgaaaaaggtaaatcagcacctgtcctgcagctctttcaacaaccgccccctctgacgataatgcccgttccgcgcaaatgtgggcatgagcaacattttcaacataagtgaaatcatatacattgttgccatcaccaatgataaactgaacatttgaaaagaaaggagaatcaaaagtgaaaatatattccttgaagattcttagtgacacataatgtaaagaaaaagggtaatgcatttcgtttgttctaatttatttatctaaatataatgtagaaaagtagagaacatttacaaataaaaaaaaacatactttggatttcccagctttagcagcagcaattagagatggcaccagcaacttatcaccgggaccaaatatgctgctaggacgtatacaacatgttagaagcccattaacaccatttgacttgattaccaatgcctctccttccgctttcgttgctgaatagtgatcgttgtgctggaaaaattggacattggcatgagcaacaccaacctagttagtcgcaagtacagtctacaacccaacccagacctctaattgaactgtatttcatcatgagattaatacatacataagtctaacagtctaaacaaataatataacggatttctgggtattattcttacaaaagctgagttgggtcaattcactacctgagggggatatggcaaagactcatccccattgactataccgtgaaccccatcaaataccacactaggagagctagtgtatatcaatcttttcactttttgttcaacgcaagcatcaatgacattcttggttcctacaaagaaaagttgaaggtgcattactacatagaataattatctactgatacataacgaaagccaccccaaaaaatacagtaaaggaaactttcagtcaacataacatttcctaccatcaacgttgaccgaatgatgcagctggtaattattgatggaggaattcggagccgccatgtgaaacacagcctcagccccttggaatgctgtaccaaagaaaaaacgcaagtgaaaaccaactcccaaatcaaaatcccttgagattttacagtgcggaagagggctgacctttgagaacttgggccttattacgaaggtcgatagtgacgtaaacggctcggccgtcgcgcaaagcttctccaagaatcccattttcctcggatggttccagatcaatggtaggacccaaatcggcgactcgaacagaaaatttttctgatctaactagcatatttaccaaatggcgcgccgcaaagccccggcctccggtgacaacacaccatctttgttcgccggtggccattattgttggttggaaactaccaatagaggattggaggttgctaaaatggatctgagattgaacagagcttgaaactcagtgacggagtaacactgcgggggaagtcagacaggtggctttacaagttgaacacatgacgaagagaggtatgtattttttggaaaaaagcattgcttttagaatttatttatttatttatatttggaaatagcagttttgttttgagaggctttcaaaaaaaaatattatttacaagcaatttttaaaatattataat

SEQ ID NO: 19650 - DNA, 4166 bp, Cannabis sativa
ctgagaaataagctgaatcccacaagggctgtcgtctaactacatgaaaataatgcagccttatatacccaagaatatcaaacttaatttgttcttaacaaaggcctaaagtttgtacttttgtgagaactgcaacaatcttaatatgtaaagaatatgttgtgattggctccccaactaccaacggttttaactaactgccagttatgacagttagtatcgggctcaaccacattaggctatttatagccatttcctactgctactttggacagagttgagagagagtttggtgagctagtttagtgtgcaagaaagagagaaaagatagataattgtattggtctatggtgtgattgatgatagtgccacaagtgaggttgattgtaattgaagctttgcttcttgagtgattgtgtcgtgtaaacattggtgatcaacttttgtaactctttcttctagctcaataaagattggagcaattggtgatcacactgttcgaaccccgtaattctcttgtgttcattaagttatatttctcttgctcattagttcttggttctggttttcttactggtttgaatactggttttgtgcattatcaatattacattgttcttgatcaaatctttgttatggttttatgtttttgattttgtatgaggtacatgatcaaggaattgatcacatcagaataaatgtaaagaaataacaaaatttatatataagaaagcaaggaatgatgacaagacaatctcataaaaggagtatagtaccaacatcaaggcttagcaaataaaactaatagaagacaaccaaccatccctactcataatctcagcactaataatattctaaggaagcaactaaaatatgacattttcattaatagataatgagtctaaagaaggtgaaatccacatcaaggcttccttcaactccgactctttctcgggtagacaatcagtaataactctgagatgcttccaattaagcaaggaagaacgacatatgttcttaagattttctggccaaatgagagccttcatgtatacaaaggaaacatataacagattaagagtatgagcttgaaagtaataaaaccagaaaatcaaattaaagaatatatattatattagacaaattaataaacttactttatatgtgctaacatgtagggtgacaatattccaagagcaattgaggttcgcaagaaatataatcaaatctgtgaaccattttctgtcatagtccaactcctccttctcatgaattacaatttttccatttatcgaattagatgactccatggatatgctgaaatttacatcacctttgtaacaaaagtattctaattttggagctgaatcaatttcaacatggatcaatccaccagaaaggaactcaaaagtgaaacttttcaagtgttgactcgaaattctaagacggtagtccaaaggtgaaggatagtagctcaaattcaaattctctagaagaggaatattacaaataagagcttccaacgatggctggaaatctttgacataattagttattgagagatttctaattttcttgcatgaagaaaaattcaccttttttggagaaacatctattattaccaaagattcaaggtttatggttttaacttgtaatgcatactcaatccatatagagttaagttccaagaacttaaggcttaaacttagcagtagttggggcttattatcaatacataagaactcataatcaagtaaccataatttctcaagagaaggacaacccaacaaaaacttaaataccacatcatcctctgcagtatttgaatggtgaatttctttcaatgacaaaattttaagagatggaaaactaaaagaacaagaagcatccaactctacatattccaactccaaaacagtcaaatatgttgcattttcaaaccatattttaggtaagcagtagtagcagaagtagtagtaggactcttcaaagatccaatgttgcttaggccatatactaagatatatttcctcaactttattctgtactataaaagctaaccatttatctatgatgtcattagctttacttttttcgcatttgcagtgccagtagttaagcatgttaagcttaaaactagttatgactgaatcgacgataaaatacatacctctttttcggtgttccaaatatttttcgatataagtgtaaaactcttgtctcccttcaacttcaatatgatcagagaaagagagtgtagggactgaataccagatgagtttccaacgtttagaaagaagacatgttcgaactacatctttagtgggaagaaacgacatcatgtgatgaatcactccatttggaagcttggaaatcctgtcttcatcatttccatcacccattgatggtgatgatcatataatatgttgttttaactagaatcaaataacccaaaaaatgcaaaatgattgagttatttgagtaagtatatagagggttggatatatatatattatctgagagggagagggagattgagagttagtggagtaaatgagttacgttgaactttaaggcagagaaagagacgtactaataatgatagataaatgatcataaagaacaaataaatgaagaaatatagagataagtgcaatttttttctttttgagaaaaaaaacaaataatcaatcaaattatacttttataacaagattcagatgtacctggctgacactgagtttcttgtatgattatgaggcatccaatgaaaaaggttgaactgtcctagtctgattattttgagatgaaaattactaatcgtttaactaagagtattgctattgggcatcagtcacagcactttccacaggtggcactctatgattagttaacgatatcttaattgtaccaatagcggtatgacactaaggaagatgctaggcaccaatagtgccttttcgcaattctcgttaacaaatgctcttttgacatatatatatatataggtgcaaataaatatttggtgttgtttctatgctttaaatttcagttttgatcaacttttgctgttgagaaactcaactacacaattatgccaaatattgttaatgccttgaaataaaaaacacaagggttgttcaattttgtgtcatgttagctgtttaattacaagttaaaaaaatgcaaattcttctgaaccaatctcaagaccacaatacatagttctgaaccaaagaaaaaaaaaacatgaatattgtaatgatgaaaattgaaaagtgtcatcctgcgtccacagcagaggagaaatgatattcttcctacaaatctgtgttggaacaaaaggtcctttacaatcacatgtattaaaataggtcatgggaagaggaaaatcagcaagaagataagttgagaagacaagacaagacaacagatcataaatcataaggattgttatttgtcaagacaagaaatggtctacttttccttttaattaactcctcatatatatgtcaagttagaacaaacaaaaatgacagtttagactttagtatatagttttactaagataatgttataattgttggatcaactctaactaaaactcttcccacctgttcatccaagacttgtgttgtattgtacaacattgtcccatattgatcaaatgtaaaatatttaatatttatgttttatggtgctccatcccaacaaaaatacagagggaagagactagattacaaaacagattaagaaaatgagtttgatatgatgagttgagaagacaagacaatagaatgagagatcataaatcaaaagctttgttatttgtcaagttataaagaactctctctatctctgatgtagtaactcatcatagaattttctatgatagagattaagaaaacaaagtctcactcttgtgaaaaaaatagtaacaaggtaaacctcaaaaaggactaacctaggcaaagaaaatagatacaatgacagtcatccctactcataatcacttcagcagttacaaacttacaatattatggactctttcaggctcgtgatgcttagaaataactctgagatgcttccaactaagcaacgaaaaacgacatattttcttcaagttttccggcaatatgagtgccttcatgcaaatatataaacat

SEQ ID NO: 19651 - DNA, 7859 bp, Cannabis sativa
aacattctcacttttaaaaacacaattataaaaactgaaaactgaaaacacagccaaacaaattatgtttctatgtttttaaactatggaattcaaaagttctccaaatattttcttacatttttattttgagatttctaatcaatcaaatttttaattttttaaagcacaaaaatgttaaatcacactacaatcaattatattttaagaaataatttttcacgtacaaaattaaaatttttgtttccaaaatacattttttaaaaaatataatttttgaattacaaaccaatcaactttaatattctggtatatattttcgagcacaaaagttgattaaaaaattataatagaaaaccaacgataacactcattataataatataatatttcagataacattaagactttttttttttaacaattacctttccattgtcattgtccattttcaatatttctattataagtgtgaaactaacctaaaggtaaacaatagtttttttgtttggacatgaaaaagaataagtaattaacaatagttaatatatcataagaaccttccaaaaatttcttccttttaagagagtgagattagatttgtgagttttactaattccactagcatcaaaggactaaaaacgaagtaataacccaaaaaaaaaaatgtatattttattggttttttcatcacaactaatccattattgtcaatcttttaatattgttattttttattttcataccaaccatttcaactaactaaactccctacatttttttacccaagaagacttaataatagtcaaaattatacgaaccctttttctttaataagcatattcttcaattaacactactttcaattcaattatttaataaaagtttcctcaaaacaatgcaattagttgaaactaaaccgaccacaatcaatgatatggtaatttttaggcatttccccataattggtacaataatttaaatacatgttaggtgatgatgaaaatgaaacacattttatatagctggcatttttgttattctcaactggcaatttcacattgccaaagcataaatatttaaaaataataataataataataataaataaataaaatatatttctctttcacaagtacagtggacaaaccgccatgtttgctctaaacccaacaattttctttcattttattttattataagttagataagcacaatatgttgacaaagtcacttattatgcctcttactaaagtcaaaactattaaattagagactattatcttagtttacttgtccccattggaagaaaaaaaaaacaatctttaaattactgccctacctaaacaaagtcatacccaaatctcagttacccatgaataataatacaataagattatatttttttgaaataacaagttacttttatatttaccattttagggaaagacaaccaaaatcacaccctcttttctatccacatatttcaaaatcaaaccatataaaaatccatcaataaaataaaataaataaaaaaatacatccccattcatatttccctttttttcttcttcactcaatttcatgtccataattctccctttcccatcatcatcatcactacattataactctcaaagcttgcctttacctcagttatggtttcaaatcatttaaaccacttttcaaaagagttgtttgtagtagtaataatagtatagtgaatctagtttcccccctaatgatacaattcatgaccaatgattaatgtttatcttaatagaaaaggcgattgccatgtgtcaaacagggtgtccttacacgtggcaaacaccttccaaataggtttttaagcattgtgatattaaaatagtattgttattagaccatcaccaatataaacaatgggtagaattgcaaattgaatttatcattctagccaattaagaaaaggaaaaaaatcatcaaagcaacgattatgtcaggaaactttttcaacttcagcattggtgatactgttaggcaatacttggcaccactttaaaatgatgttttaaagtagttagtaactttatttttttcagaattatatattaatatgaaatatatagtatctaatatattaaactacactaacaatatagtataacacttctatgggatgttaatatcgtttagcatttgtcacggtggtttattatttattatttttttaattaaccaaataaatgtagtataaaattatcaacttaagtcaaatggttaagaaatttagggttaatttgattttgtattaatttgagcccgcgattatcttcgaacgtttcacaacaaacacgtcatggtgcggcaactccccccacttgtcagtcggcaatggacgtttctgttggcgggtcagtacctcgaacaatccctctttaggcggcactgaaatgaaatcctttactattgggctttctcaaagttaatattgatactgttattagttctttagataatttagtaactcgggtatggtaattcgtgatcatttgagaattactatagcttcggcaagttggcacttggatagttcttttgttcttgaagtggctgaaactttgactatctgcaatgcgttgatttaatgcatctccttgggtgtggtagcattatttttgtctgactacttgaatattgtgctcaaacttaaaaataatatttttattatttttctttgggtctaattttaaatgatatttttagtctttgtaataggcttaaagatgctagatttgtgcattgtacatcttgttgtaatgttgttgtctattttttggccaaacttactctcataacatggaaaagtgtaatttggtggccaaaaaattttatttgtattcaaataatagcttacctctacttttataaagtgtttgttgcttttagtgtttggtggttgagattttttttaaaaaaaaaattcattgtattagtcaagagtttaattttggaaaactaaattaacattaatttgacctaaggttttactatatgtttgttctgttggaaaacattagacacactgacacgtcataataaataaaattaattcaaataattttgaatagaatataaatattttttttttttgcaacaagatatatgcttatattcgtggagattttataatttattatattattattatttataagttgatatataaatatttgtttaaataataatacatatttatataaaatattttgttatgacaacaaatatatatgtttatattcgtggagtttttgtataattgttattataataaatgccctaatgaaaaatgtttcggttgtttggtgaacaaaaataattgaaatattctttcattttaatggaacattgtggctcatgcttttgttggagcttctagtttatatcctgaatgtatggggaatatcccaattgaactgctatcatatttggtagcagagtttgaagtttaataaaacttatgaatatttattcaaaaaaaaaaaaaatagaacattgtttttaacacatttattacatatagtttgataagtagttagtaatttttcataatttctattaaattaaaataagtgggattggatattaaattacaccaataataatattatatatcataaaaatgttagacaccataaataccctttaacatttcacattataataggtataattgaaatacttatattataaatctagttagagaaatacaagagaacataaaaaaaaattaaattgattatgggaatgtgaacttgatgatcgccaacaaacatcaagaattttatattattagaatttctcctctataaattgaataaatatagggtgcatgcataaataaaatttatattatgaatcttcattagtattgattcttctacttgctaggtatatgtatttttcataaatagcattaaccaacaccttttttttttgttaataattatatcaacaattttgctttcccctcaactatttattgaaattgggtaattattgcaagacaaaatattgtaacatgttttccttcataacaataatttgaaaaaaaatccaataattgtacacaacaaaaggataaaaattattggtatatatttgtatgaattctctttgtatacatagggttataacatgcaccctatctatatcatcatcaaaaccgaggcccacattaggtacaatacatatataatttttatatgttattagtattttttaagctagagtattctaagtgttaaaaggttaaaattagtatggatattggtggtaaaattttctttaacatttataattattacacatatgatttaataaaaaaaaaaaaaaaagccaacgaaattattttatcttacaattttgttgcaatcaccagctcagaaatacgtgacaatatatttctttagcttatttaatacataatataataattgctacatatttttgagttgacaattagaccaaaaaagaatacgtgtaataaaatcgtaaaataatatacttttgctgttttttttttttaattagaattatatgtgtaacaataaagaagtttcgtcctaaatattctaaattattatatatagtcttaagaatttaatgtgacataattaattttcactacaattaaaagaaaaaagttaagatacaagataattagttggatatataaaagtatttttaaattttatttattatattgaaaagatgttgctgctggtgataaagaaaagagatctcaataagtaaaaacaaataataataataataatgaaggctagaactacttgaagacctaatgtacatgacaacaaattcattgatccaaccttaaagccacaaagatgctgattctgaaaacattgcacagactatatataaatatatatatatataaatacttctataattaatttatataaattaatatatgtatgcacataaaatatatatataaaataataaagtttccactacttgaaaagccgaccaaattacttaaaatattacttctttttagtatatgaatagaaacttcgatgaaccttagtcttcatacaccagatctatgattatgatacacgtaaagtattttgtataccatatcaaatgaaaaaatattgtcaaaagattactactatatctacaaacccttttacgtggcaaattaatgtatacatatatgtatatgtatatactctaaaaagttcattaaccctttttcaattaactataataataataatctcgtactaaccaaaataataaaaaaggccaaatacttaaaaacagtaaatgtgtaattagtttttaaatatgtacaaaagactattcatacacataacaagcccatgttcaaaaatagaccccaaaggctacaacataccctacactctctaagcttattaggcttaaaattgttaagttttgagtatgctcacaaataattgaatcgaaactattagtattggcctacatattcataatagtatatttagttatcttataacaattattattattatatattattgaaatttgctgaagagaatcaaattaagattgcgtgaaaattcagccaaaaagaaaagaagatgatcgaagaaagaaggaattgatgatattggtgtttttctcaaggagagaccgaccaatgaatttggatatggaagatagttgaaaaaacgcagaatacgatcccccattccaaaaaaggtcacactgtttttccaaggttcaatactgtttgcctacaattttatcttatcacacaaaaatccaaattaaaataatttaacacttgggaattaatggggaatatacccacaaatatttttcatctaaaattatccaaaatcccattacaacgacagaaactctaaattaaaaagaaaaacattaacaaagctaatattttttttctcttctttttcttaactcatttctcacattccgagatatatttacgtaaatataagtcaaaatatcaaaaccccagagacagctcgaatatacacacctgtcattttgccagtgacaaaatctggcagggctgactggacacgtggcgcgaatcccgccgttcacatctcagaagtaatcaaacgcagtagatgaatgtttactacaaattccattactgttacggttaatattactattattattactattacaatcaaacggcgtcgttttctgcctcctaagtcccggcactagctccggcggcggcgatgacctaatcaacgccaaattaagacccttaaagaacgggtgcttcttaacttcagccgctccgcgtttcgctccaagacgccgggtcgggtccttgtcaagcaacccggaaatcaaatcccgcgcgtgaagctcaagcggggaagaaggcatcggagttgggaaagcgagtggcgtcttgactatgtttaagagcgtgagttcgttggattgagccgcgaatggtgtacggccgtagatcatttcgtagatgaagacaccgtaggcccaccagtccacggcgttgccgtgggacctaccggaagccacctcgggtgaaacgtactcgtgtgtaccaacgaaggagcatgacctggcagttaccggctcggctacgaagagccggttagccgccgtgagtgtttggactcggcgcgaacggaagagacggttggggaagcaagcaaatggtgagagtgatgatgacgtggaggttgtgctcgtgtgtgagcgggagtaggatggagttgttgatggtgagggaacgtagggtggagatgagtcaggtgattcaacggctgggattgcatctgagcatagagaaaggtcaaagtcagaaagcataatgtgaccgtccgatctgaccaatacgttttctggttttaaatctctgtatataattcccagcatgtgtagatactctaacgctaccaaaacttcagctgcgtagaatctgtcatagtaattaagaagaagaccgagttagagtgagttgaatagagcgagttatgtctcgatcgatctaaattatgcaagaatttaatttaaaaaactggactgtgaatgtgatgatcttttgttgtttgtttctaggtaaaaaacaaagagaaaattccagaaattttctcgagaaaaaaaaaacccacagaatattcttactttgcagaagtaaagcagacaatgaaaagaacagttcgatcgcattcgtcgtaatcgagtttttctcttttgttaaaaagtaaaactctgaaccaaaagaaaactttgacagaaatttttggagttttgtagtaaatataccttgcagagttgaacgagaagcgtttgtgaggttgtttgtgtcgaagagaatgcaaatcaccgccggaacaatactccattactatgcaagagaaatgtgaagcttcaaactctgcgtaaagagttggaagaaacggatggtcgagcattttcaagatttttttctccatttctgctctgtgaaccttcttcttcacagctaaaatctctttatccacaactttcatggcataataacaagaaagattggaattaacttttcgttcgtcatcattattattattattattactcagtctgcataggtatacagtgccgatgtcgccagccccaatttttttgaggatgttgaaatcgtgaaacgttagaccagactcccgtccgaacgtagcggaacggatggcggagtaggcaaagtccgacgatctgtgtggctttagtgagatactgcggttggtgttctcttcttgagattgtgatgtggaaagctcgatcggcgccactgttgcggcggcggc

SEQ ID NO: 19652 - DNA, 5838 bp, Cannabis sativa
  modified_base (56)..(68): a, c, t, g, unknown or other
  modified_base (2441)..(2446): a, c, t, g, unknown or other
attgaagtaattgctatggatcaatcaggtacgcatacctaattattatatattannnnnnnnnnnnntgttatatacaaattgatcttgcggtttattattaatttatctaacacgcacgtcttgctcggatgttccagcctctactaactttgagtacctaatctttctgcacggttcatcaaggttaaaatcttttgtttagataatgaaatctatcacgtgtcactcaagtgaatgttaagtcaccttgtgtaaaaatttagataacaagacaaaaacaaaatttattcaacaatacacccttttacataattgtgatttattgcaatctagcttgaagcttgtaataatatgtaaatttgccaaattcttagaagattctactttttgagaacatttttgttgacttaataagttaaagccggtgccaattctccttatggcaatccaaatcccttatccattcactgttgtggtaacattaattaactcatgtccccacttgaataccataatattaaaaatcatttttaatacaagtaaattcttttatgagaagagaaattataggatacacatacatgacatgcactcttttatacttcgagcatcatgatatgatagtaataatttttttttatatataattcatgataatttacatcccaaaaataaaatttaaataatctgttgtaaaagtatatgcattggttttattttatagaagtgtaaaataaattatttaaatgtattgctataaatttctgaaaaaattgtacattttaatataacacttatctaagttctgcattcaaaacattttattcaattctttcacataagaattatctcaccacttttttttttcttcatcaattttctatttcttctttgcgttaaaaattggtaaaaacactaactcaattcgttagcataaacaaataaagctggctcctagctagaaatccacaaacagagaaaaataatatcccaccactgtaaagttttttaaaaaaaaaaaaaagaaaatagttctgatacacgtggcaaaagttaattgcttgttcaattctgagtacattaaccagtttcttcttctttcactttttttttttcattattttttaaaaaacatatattttcctttgttacctttttccatttctttctctctctaaaacctttatcgttcaacacttctgcttctttctctctctttctctttcctctccttcctcctcatcctcttcctccctctaatctctctctctctctcttctttcttccttcaaaaccaagcaacctactgtagaagaagtggaaaagagagaggggagagcagaaaaaggaagagtgagtgagtgagtgagcaagagagagacattaaaagacgaaaatgcccccaactcccaccgccaacggagatcatcagagacccagaccaccctcaaacgacaaccatcacagaactcgaccgcccccaaacgacaatcaccacagaatccgacctccacccataaacgacaacaacaacaacaaccatcagagaagccgatcaactcaaaacgacaacaatcaccagttctactacccaacgacaccttattcttcttcgtcttcttcctcagcctcctttagaggttgctgctgttgcctcttcctactcttctccttcctagctcttctcgtcctggccgtagtgctcgtcgttttcctagctgtgaagcccaaaaaacctcagtttgatctccaacaggttggggttcagtacatgggcattacagcccccaatccctcccaaaccgcaaccacaacaaccgaccctaacttaaatccgaatccaaacccgactaccaccgcatcgctctctctaagcattcggatgctgttcacggccgtgaaccctaacaaagtggggatcaagtacggcgagtcgaggttcaccgtcatgtatagaggtattcctttggggaaagcttcggtgcctggattttaccaagaggcacacagcacgagacaagtggtagccaccatagccgtcgatcgagtcaatcttctccaggccgacgccgtggatttgatcaaagacgcttcgcttaacgacagggtcgagctcagagtcctcggcgatgttggtgccaagatccgcgtcctgaacttcgattcccctggtgttcaggtcagcattatacatatatgcatttatactcacacaattcattacacactttctttaaataaatcacttgcattctgaaaattttgaagaccctcatttcaaaactgttgtttggttgccgagaaaatttatgtctacgagacagtaaagggtaccgtcgggaatgtgtgactctgggtttgtgaggcaactcgcccctgtaactgcctaacccactaccttctgtcccactcactctgctttatttatttattttttnnnnnnttttttttaattttcttttctttcaattattattattattattattattattattacaagcggtgacacatttcatagtgtgataattttagtgttgcgtgtttaaccttattgctcttatttttcccatatttttacttttatggattttcattttctggactcatctagtcaaggtagaatttgagtataaaaaatatctgatgttgttgctgttaaaatttaaaataattaaatttagaaattgctttgtttttacgcacacttttataaaacgcgccaataggctcgctccaatatgggaagcaaaaaaaaaaaaaaacctttttctatcttgctgtttttgacttggcggctcttcattatttattataataatcaactctattttactttatttgttcttattttcttaacatttcactaaaaaattaattgttgataatcaaaacattttattttcggtggaaaatagaaagtgtcctcctttaaataatatgaatgggcaacgagtgttatctccagatgaaatttttcggtgtcgttttggttataatttgttattaggaaaatgtcgtttgttgtctagtgtagtgtaggtgtgaatagaagagcagagcatgttcctagatattcgcatcgctgtcgttttctttatattttgaatttttgttttgtctattttccaatcataaatagctctggtccgttctttgggtttcttcggattcgtctttgtataatttttttttctctttctttctaaaacgaaggaaagaaaagtttcctaaggaaaaaagtaataataattaaatccgaaaagaaggtcccaccgggagtcgaacccaggtcgctggattcaaagtccagagtgctaaccactacaccatggaaccatagatgcccataacactgttctaagttttacttctttgcttttttactgttcttttagttagtattatagattttatgttatttttctgttctaaaattgaggttatatcgaaaactccaaagtgcccaattaattttagtgatttcccaatatggctgaattccttttcttttcttttttcctttttctttttcttaatgaaagggacatatttttcaaattttaagaaagttattgaacatgtttactctagtaactggatgtttagtgtttttaatggtatttttttttttttttaacttttatctgtatttagtttttaatttgcaattagttaatccatatttttttttggaatctgcatattccctattagtggaccatacatttattatattcagttatattaatatccattgaacaacaattaattgttttattttattccagcaaaaacaattaattcaaagaaaaagcattcaagtatgaaaagaatatgaaacttttttttaagcattgatattgatgaagagcactctagtactctacaattgacatagggttcttgaaggtggctctttgaaaatgtcaaacacaaacaaatgtttaacattttgcttcttttttgtgtttactcttgctatgctcctacttgaaaatgtgaattggttaaagtgtttgttgattcttgaatatgcaaccacgtgagtctgttgcatgtgggctccacgttacctcaaagtgggtctccatattcaacggcagataaataataatatgcaaaaagaaattcttcatatgcaaactataaaagaaaaaaaaaatactaattaaaaaaggggactttcctttttttctttcttttggcagaataagagcaccagatcgccaaagttttctaattgaactaaaattatttcttaattaattgtttatgtggtgagtgatgagatgagcttatagggttcttttttgcggtgtcgtgtttgtggtgagtaccaactatctagttcaggaatggaatccaacctcttctacttcatttcctttataataattactattaaaaatttgggaagagaatccatacttttcattctcttaaacaccaagaaaacttcacattctataaaataggctgtaaaatatatatattttccatgtatatatatgtgattgggatgtctttttttagtttcttttattcgattggtacatagagtaagtagatgatatttcttatcttatatagattactttcttcgtccaacaaataattgttatgcccctttgtctattttttatgcttgaattttatttattattatttgggcataagttttaagagattgattttgggtggacaggtttcggtggattgtgctatagtgataagtccaaggaagcagtctcttacttacaagcagtgtggattcgatggagtgaatgtgtagatttttttttttggtcacaaagtctgatttttcttcttctttctcttaacaagtagagagaaaaaagaaaaaaaaaaagaaaaaagaaaaatgtaaagtcctttcacatgggtggaaatggattagcacgcagtttaaaaagaaagctagcgaagagaatgaacaaagaagaggttccaaattttaggattatttatttgaagaaagaaaaaatggttccaagattttgcaaaattaaatttaaaattaattgcttcgccaagttgctaactgcatgtaaagtgtaaaaaggaaaaaactcatgcgttggttggttggtggtattagagagattccacttccctttggggtctatatgcttcctctatgttattatttatttattgggttgatgatatgtgcttataaattacaatttataattgcatacaattatatttaagaataaaaatgtcacatttatgaggtagcttattcaatgactcatttgcagctaaaaggcattatggttcctaaaactacttagaggtgacatcttgttaataattagcgatatttataaaatttaataaattaaattatacggggcatttttttgataagtagtgaattttattgaaagaaaattacatcaaactagtgaccacaaagagggtcacttcccttagcacactcgtacaattagctgaggttactctagcccatgaagctaacgaatcaacaacattgttttcagctctaggaatatgagtaggcccagccctgggtataggcgggctaggcctgtgcctagggcccacctatcccaagggtccaaaaaaaaaatttcccttttaaaattatacaatttttttttactgattttcaaaaatactatattttttttttctaaataagggctcaaaataattttttttctatggcccactaaaagttagggccggccctgaatatgagccacaacaacattttggaactccttacacaacttaatacgctaagaaaataaaggaaaaacacttcaactaagaggaattgca

SEQ ID NO: 19653 - DNA, 5830 bp, Cannabis sativa
agactaattcagccctaatacaagtactcctaactcaataactaacttcttgcttcaatctaaaaactacattatttaacataataacaactctctcttcttctctcttgtggctttattcccaacccatcttatttccctttttttttaataaagaaaaagtataccaaccttgaatgaactcaaagtttctactaggggtttgaattaacccctgtttcatttcgaaagtagaaactaattattcaatgggattttagttttcggaaaaggaccacacacctttgtccttctcttcccatgtttctcccttttaacttgccgaatgtagctgctgttgctgcagcagccacgtctgataacgaatggttttacactgctcaaaccccggctttcggattgtttggctatttgacataccatttactattaaaaatctggcatgccactcgaacgtgatgaatattcggttaccaatttcagaaacatggatgacttatcttctagtagtctgataggagtatcaaactctgcaactcgacctacaaatgagttgaaaatcaaattcagcgattgttataacgcaagtgtcagaccagtttagtaaaataaaaatagaaaaagtaaatttaccatcactgagaaccagaacaagatcactgtcgataacagttgggatacggtgagcaatggtgcagacggtgcaatccttaaactctgttcgcaaaattttctggataagattatcggtggctgtgtcaactgatgctgttgcttcatcaagcaccagtatcttcgcctgtttaagaagagcacggcctaaggaaactagttgccgctgtcctacactccagttatctccattttcgagcactgtattggcattgatgatcagtcaccgaaattgtctacttacatggctagaggaatagactatacaataaatatacctggtgtatcgagtttatgctctttctcacggattatgtctcctaactgggatttgtcgagcgcctataccatattcaatctcaaagtcatcacacaaggaatttgaaaaatatactagaacgagattaatatggaatatgcatggtattacaaacctgccaaatgtcatgatctgaatgttcttcaaggggatcgagattgttcctaatagtcccttcaaacaaggtaggatcctggggtatgatgccaagacgactacgaagatcatgcagaccaattttagaaatatcaataccgtctattataatcttcccacattctggttcaagcagccgaaataatgcctgaatcaaagtggatttaccactccccgttcgtccaacaattccgatcttctttccaccagggaagctgcaggttacaccatgaagcaccacgggaagattttccttataacgaacctttaatgtacaaaaagagactgtcagcaatttccaaactcttctttttttttaacccacaatcgcaattgttaacacatcacaccaagtaattaaaaaaggttaatgacaacaaattgaactgcctcacaagtgaaacaaaaatgctaacctttaagtcaatcagatcaattgttccattttctggccacgaagttggaggacgagaatcctcaataattgatggagcttctcctggaatttggctgtattggtaaattctttctattgaaataatcttattttcaagcttgcaaaagctaagtatccaacgcgagagacgtgcatttaaattaagaccataagtaactgcaaggcctgccatgcctgcacatatcaaaaaactaatgttagtagccaggacaattgttaaatcatgtcatttttcataggatagtgccaatgtttttcgttgtttgtaatgcacatagaagtccaacagaacagagattaaagttctagctcaaagctttcatatcaatgtatttttacctttgaagattcaactaaaaatccatttcagttctagaagttaagttcatcttactgttttactctatttacaactccgaaacaacataaaatccctcttcttaatctagacatgtaatcaacaataaagaagttacaggacttactgggatcgatactccctggtggaaagctgacgagcaaaatcatgcagaaagcaaagacaaaggtggagagtagttccatgcgtaggcatagccattctatagctgcaagactgcagaagaatggacgggcaaaacaatcaagaagataaaggttcctctttacgaatcttttttcttgtccaaagcctcttattgtcgctgctccagcaattgactcaccaaaaagatgaaaaactggagatttttgaatgctaacaatgcgaaccagctcccttgatgaagccatgtagtatttctgcatgagaaccattcagtgagcttagcaaagaattggaccgccaaattaattttaactgcatggttatgcatcgcagcagatgtggacctaccggacatgttattgcatgggaataaaattttgaaaattgatcgaaaaaccaactatataattcttccaaaattggtgcaatattattactcagctttcttcaaaacaagagcttttacattgccaagtattgaaatatttaattacctgcatccaaaggcaagcaatagccataggaatgacaagaagcaaaacttgccaagtaactgttgtcatcacaccaacaatgccaattagttgaatagtcgttgaagcaaaccctcctagtctaaaaggaatatcaagatccactacactttgatcaatagacacctgtaatgtaacaaataatacatgaaattaatcgtgtgcaattgactcacataaaataaaacagttgacaaatgattttgaagtgaaaagaaaaacttacacgattcaatattcgtccagcaggagtagagtcgaagaaagacatcggtgctttaaatacacttctaagcatcttcagaaacaatttttgcgcagctgctagaccgaatgtagctaccagtacagctctaacaaatataaaccaggagctaccaaaagcaagggccatgtatacaagaataaggaccataggactgactttaggtatgtctccttctgtttggggatttgcccatgccatccaccaattactggcaatctgaaggaattgaaacaacgtctgggcaataattataagcggaatcaataagcctttatatgctgcggccatgtacgatagatagaccttcatactaactcttcctcgaactctctcctcttcctgcacgagctgcttctttcttgagcgttttgctttctttttctctttaattgctttcagctccgcggcagacacaccctcttgaacttcctttgccaaattgtcaacgctactaccatctggatcgagttttttaccatctgaaacagatgcatttgtagacaaattttcatctgaatcctcagatgagtgatttgggatatccatggcttcaattgcgtcgtgatgagcagagaccaatgtgttaaaatctgttcctgcttgtagaagatcatcatactttccggcctgtatgattcgcccttctttaagaacctataagatacaatgaacattaaagatgaaactttgacaccaacaaaaaaaaaaagtgattctttacatatatatttagagaccgaaaagttcagctgataaatatgcaaaacacatatagataaagcagagtgcttaccaggatcaaatcagcagcaggcagaaactcaacttgatgagtcacaaaaataacagttttatctgctaatgctgtcaaaatataatcctgcatttccatattcagttgttagccattttttaaaaaactttaaactacacggtggtatcaatcattcaaaaaagcaaatctgaccttaaacaagtctgagccagtgtgtgcatcaactgcactaaagggatcatcaagtaaataaatatcagcatcttgatagagtgctcttgcaagctgcactctttgcttctgaccaccactcaaatttatacccctatcacctataatggtctgatctccatgagaaaaaagttcaagatccttctttaatgaacaagcatggagaacattcttgtatctcggtttctccattgggctgccaaaaagaatattttcttctatatttccagactgtatccatgcagactgaggaacataggcagcactgccacatatttttacctaaaaagattcagcacaagtaagaatatgaagataatatccaacaagtacagaagaaaagatgatcaaaaaccaaactgaaaacatgtaatagcaacttacttcaccagagatctttgggatttctcctaggatacaagaaagaaagcttgacttcccagaacccaccattccacatacagccacacgcatacctctctctactttcatctgtattcctgataatgttggccttgaagagataggatcccaactgaacatgccatctttaatttctatggttgtttctgtcatacctctgggaagggtaatggttgcattttcctgcaattcttcctcctgcaggaacccagaaattcgatcaagagaaacttttgtctgagccatcattgaaaccaaatcaggaaaattcctaagtggttcttgaagtatcctgaaagtggccagagcagaaaggacactaccagcagtcagctgaccgcctaagaatatggaagtaccgaaagtgatagctgaaacaaatatgggagagctccagaagatgaatgtaataaaagcttgcgagtagagcgctcggcggagccacttgaactccacacctcgcatatcctctaacattaaccggtacctatcctcccaagcttgcaacttgagaatcctcatgtttcttagacactctgatgtttttctcatcctttcatccttggcactcatcaacttgtcttgatattcttcttgtattttggcaagtgggacagtaacaacaatagatataatggtggcaattaatgtagcaacagaagcaatgcccacgttcttgtacagaattgcaagagctagaatgatttgcattggaagcatccatatatcatggagataccaagaatagtcccctaccctctgtacatctactgccatgtagttcacaatctctccactggtgtggttttgcttggcggtgctcgagagtctgagacccttccgaaacaccattgcagtcagagctgaccttacgtgcatacccagaatgtctacaccgagataccattgccttgtcgttaaggtctccaccagcttagctacaaagaacgtcccagcaaggatgtacccttcatgaggaacagtctctttcccacccaaataatcaacaaaatagctaatcatgaaaggacccacataagaaacgagagtattcaagccggcgaagacagcattgcaagctgcttccttccaaaatgacttgagaattgcccatgctaaagatggatgtcctgttggatgttcagccttcattttctcccaattcgagttcaagactttataattagtcttggctcgatctttcgttgcaaggaggggaatgtccttaagctccagaggtctcttagctccaattgaaagaagagggttcagccatgaaagtgtggccaagctaaacagcccagcatcgctataaggagtaaccttaagacaccctgcttcttcttccatgagtaaaggctcctgaagctctgagtttctacaaacttgaatacctgtatacatataaacgtatcacaaaaacaacaatgagaatttcacaacaccttacattaattttttttttttttt

SEQ ID NO: 19654 - DNA, 5910 bp, Cannabis sativa
atataggtttattacatgctggatgaaaagaacaatggccagttgcttaacttttctggatgtggtaatttcattacttttctatttgttttcattaaacaaactttacaactctttctatatgaatatttttttctttcaataattcatttataaaagaagtctttaatatggagatagtaaatagtgcatgtgggacaactttgtatggctactgggttcttgtgtgaaagatggaattcgagcttttaaacactacagatatacttatttattcttttggtacttgctctctcacctaagaggctaaatgttttcctgataaacagtcttaaaaaaattcacaaagatggagatgtaacattacttagaataatttattgtatttatctaattactatgttataaatttgctaagtgtttcttaagtacaatcacatgttatgattttttttttttttggtatcaaagtgtataacaatcattatatgtttagttgacaatggttcgaagttcattttataatcatctcaaattcttgtccaggaaacacattaaactgtaatcagcctgttgtcatggaactcatattggatagcttaagacactggtatggaccttaatgtataaacatctatgaagtgtattgtacgaggggagttaataatttgctaagtgtattatgcttatattgggatccatttctgtttttgctcatatatagggtgttggagtatcacgtggatggattccgatttgaccttgctagtgttctttgtcgaggaacagatggtactcctcttagtgcacccccacttattaaggtacaattatctctcttctagtattgtaataggtttgattgtattagccaggggttgaggcatttatcctgggaagcatgcaagcatgtttgtatggctgtttcttttatttatatttacacattaggcttatgggtatggagccttcaggttttttctatttattgttctattatagaatagtgtttcttaacttatttatctctcttgaatcaggctattgctaaagatactgttctgtcaaggtgtaagattattgcagaaccttgggattgtggaggcctttatcttgttggaagtttcccaaattgggacaggtaacaatattcaactttcccttattaattaaatgaaaagaatttacacactctacttcattatgtttttatgtttggggaaaattatttaattgctgaaaatggagatgatgttgttatgtgcattcctgctatattattgtgagaggccctttattttttggtcaattgacaatttgccattgatctcatctttttgaaatgattttctatctagtctcattttaatttggttagcagtactagaattataaaagaatttgtaaatttggaaagttaacaaatacgacgatgcattgcatgctttgtctctggtgtggcaatatttttattcttgtcatttcgaaatctcagaccttgtgggagcaaaacaagcgcttaaccatttgagctgctcatccttagttgtggctatatttttatttattaattccctcaatactcccaattcctttacatattcattttatttgtcttgaacaccattgacattcacatcttgtaggaactatattaatttctctaagtacattgtttttgcacatctcacctccctcaaaaatttcttcaatacaggtgggccgaatggaatggaaaatatcgcgatgacatgagaagatttataaaggtaatttgtgacttcccacctcttctttcctcttggaatgtggtagggcttaaagaaaatgttatgaatatacacaatgtttgtaaggtcgttagttttcttttctcttttcttctttcatagaagtactcaatacatgctctttttctcctgttataaaacagattttaaatagatcttcacaaaaatacatgaataaatttcactaatgaaaaataatagagaaacagaattcgctttatatagggaaaagaagaaagaaaagaaacatgctcttttttcttctttctcttttgctttttaaatttgttattcattgatttgaatataatatttcttagtttatgaaaaagaaaaatgtttgttatcaactagttgccacttttctgtatcttaatcttttgttttaaacttactttatgtagggtgactgcgggatgaagggaagttttgctactcgtgtttctggatctgctgacctttacaaagtaagcatgaatcagatttaagattaagtaccaaagtagtattgcaagtattgtattgccttggtgaaagcctctttatatttatctctacttaccattttgtttagcaacatgaccaccatttataatatttcagaattaataaaacatgtggatgtccaaaccttttataggaagacaactagagtttgttatgctttctattattgaaactaatcaattacatcataatgcatgaatattatcatactgtcattgctataatattattaaaagctgtatgtgttcatttttcaggttaacaaacgaaaaccttatcacagcattaattttgtgattgcgcatgatggtttcacattatatgatcttgtttcgtacaatttcaaggtacttaaaaactcttgttaatttatttgtttatccatcgaaatttaatttgtcctatccttgtcaatttatttgtttatccatctaaatttggcatgttttctaattttttgttttgtagcacaatgatgctaatggagaaggtggtaatgatggaagtaatgataacttaagttggaactgtggttatgaaggtatgtccaaatgtttatgctactttttacttgaactttttggtgattcatttattgtgttgatttgaacaggagagactgacgataattccatcaaagctttacgctctcgacaaatgaaaaattttcacctggcactaataatatctttggtaaatttaattatagccaaagtcacatattattgaactttttttttccacatcctttgatccatgtctcttattgatattattatttaatgaatatgactagggaacaccaatgatgcttatgggggatgaatatgcacatactcgctatggaaataacaacagttatggacatgatgctgcccttaatcacttccagtggggcttggtatggttttgatttctcacgatattccttttaatatataatcctgtagtacttaattctaataatttattttggtgagccagttagaagcacggaggaataatcacttcagatttttcaaagaggtgataagatttcgacacactcgacgtgtcttcagacgtgatacttttttcaacaaagtaataattcttgacttctatttctttatgttatatatcactaatttaatgcaagtatttatttacgaagagactcatacaatatatcatctatgcagaatgatgtcacatggcatgaagacaactgggacaactacgagagcaaatttctcgcatttacgtaagtaaatatattgaacaactgaatataatatatgatcctcctactgtattatattattgttatgtataagagattttgtcatccctgtcaaaaatagaatggcatgtcaatatttactcatcgcattttcattttctaagcatttacgatattctatgaatgcttggtgtttacttaggaaaacatggttgtgcttttgaaaattgtacatgatgttgtctttagcattttgagcatgtaatattcactatgagttgataaaaataaaataagaccatgcggtaaaaaaaaatgatgctagagccatgcgagtgtactgaagaatatactaaaaccaaaatgaaattaaagcataacatggagcccaagaatttcagaattgaataattcatttaacattgaagaattcaaaagcacttttaaccgaataattcctttcgcagattccatgacagtgagggagaagacatctatatggctttcaatgcgcatgactattttatcaaggtcactatacctccaccaccgtcgaacaagagatggtttcgagtggttagttctaccctcacttgattcattttcgttgtaactaagacaaatagacaaatcttcaagttgttctatacatttaaaatattggtagataatgattgataatattgtttggttataatttggaagataatgaaactaactgcaaacgttgtccaaattctgcaggtggacactaatcttgaatcccctgatgactttgtcatggaaggagtacctggcattggaagcacttacaatgttgctccttactcctcaattcttctagaagctaaatgatacaccgccgattaggcttacctactctaagaggccaaagaaaactaactgtaataacagcaaggcggaggcggcagttcctattaataagctgtcctaatatgttggtttagagctgctaattatgtttagtataaaaatagaggggctggtgaattgtataagataagaattgatttgtacaaattgagtaaagcttactcggggagattctcaagcatctcaaatagcttgaaactttgtaattctttagagatgttgataagagcatttttgtatatattttgcaagttcagtgaatgttagtttttatgttttagataatttttaatcgtattgattagatgagaagaaaactggatgaatttcatataaatgtgcttagacaaccttgcagtgttgcaaattgctgggcctacttaaaaaggcacgggcgcgactcttaatgagtaatgtcgcggtccacctgttttaaacaactaaaattaggtttatctatcttttttagctatataaaagggtctttttcaatactttttggtaaggctaatcatgaaacttaaaaaattgaaaaaatcgttaaaaccgacctacaaagcattgttgaaatcgaaactgttttaactgaaaaccaaaaaaatcgacaacaattaaaattgctattgaacggttggtttttatatcggtaacaaaatcaaaaccgactgatcgtgtattacaatcaataaatttaaagttttagagacatatataatatttatttatatatacgttcagtttaataataaataaggctaaaaaattacttttctcacttttttccaaattccaactcactctgcctctcttagctctctctctctctttgactctatgcctctctcaatctcactctccattttccatccaagccccaagcccccaattcctaaatctctgtcctccatattctttttctatctactccatgtctatgattcaacctatgtaaatgtttatcgcacatattcatctttttttttattattttatatattcgtctcactattatacattctctttatttatttatttcttttttttttttttgcagaaaataagaaaatcacaacttatttttgttcctactttgattttttacatgtgtgttgtgagaaagttggtttcttttttacacagaaaaaagttcagttttggtagtttaaaccgaccaaaccgcaattcacaatggtcggtttttaggaggtttctagattagtcgtttagtttttcggattgcaccaatctaaacgtaaaattgaaatttgaatttttatatagaaaaaaaactgactaaattgattgatgctcagtcctactttttgggcaacaaatgagagaggacaaaattagtaagtaattaccaagagaatgacagaatgaattgtaagaatgatgagtgagattcataagcctctctgagtgactgagagtggtttttataggcgtttatggaaggatgttattgttaggttttaatttgtgttacttttgagt

SEQ ID NO: 19655 - DNA, 3152 bp, Cannabis sativa
agattaaaaggcaacctgggcatcccataattgtcgttaggaattgcctggggacaaactgttatcttgttgatgaatcctctgaaaacaagtcctccacactgttttgggagtgaaacaagaattatacttgagatggaatttccatttaagtaatgaaaccacgtgtatcgaggcaaaaggtaacatgggcgcccattaggtgttttttccctagacagatttgtttgttctccaaaagcatttgtatcttcgtatttgatgaaaacaaatgaagtatctagaaaacatatcagaagcacctcaagctaacatacgtcaacctggtcgcccatgctaaggaaaaaaagtaacctgggccccacgcctaggttgaaattgcttagaattcttatttttgatgtcaaatcttctttttggtggaaagtgcacatgcaaaactgatttcgtcacattcagatgaattttactcagtgaacttgagttggtgacccaacgcccggaagctgcacacaggcaacatgggtgcccataataggaatatgccccttctgggtatcagttgcataaactcaagtccacacaatgttccctgttggatttaagaaatcggggtgcaaagaagttcccaaaatccaatcgttgtgtgcccaaggaagttggctagaagtcaacctaggcccctatgcttacttggacaccccctaggtaaggcttgctccaaaattggttatggagcttgagacttggttgtggcatatttctcatgtattagatcgttgtttctaagctagctgcttacaggtattgacctagaaatcaaaactgatgcaatttagggtacacatgtcaacttaggcgccaaatattgacctaggcgcaagttgactcctgagatgtccaagtgacaccttcatcttctagttctaattttaagtgtcattgcgaacctgattgcttagactgtttgaaggacaaaactcaaaaacgaatttgtggggtctaagtgattatctaggtgcccccttatgtcaacttaggtgcttctacagtgcccaacgtgcaagttgactaccatctctaggatgcgaaaccctaggattattttcctttgtgtcacatgtcaaaaatgatatccacatcatcaaatcaaactttcgtgtaaatagctgtctcgatagtttttgttgttttaattttttttattactcattatattatattaccctattttgaacttataaaatattattatttttattattaatgtaattatttatttatttctaaaaagtaaattgttatttcatctatcactaatcccaaaaagaagaaaaaaaataagaagtatgaaattgtaacaaacaactttcattaagaaaaaaataaggtaatagtacaagaagagaatcaagtagtcaaaacttagtaaaaaaaaaaacttcctagtacaaaaacaagttgaggagttgattttgagttgtatattgtaatagggttaatgtcttgttattttttgttgttttgtagttgtcattttgttgttgtttttttattgtctaattgttttatagttgtaatttttttggttgcttttagttgtatttttttaattgaaatacaatattttctaattttgaaactctaaaacaatatttttgaaaatttggttttgtgaaaaaaaaaaaaagcaaagacatgaaaaatataaaagtaacatagaattaaatatttatgtaaaaatctttttattcatagatatagatgtgacatgacaatagctagttaagtgaagtaaataattaaatttaaatttggaacttacataattaattaagaaaatttaatgagaatgataaaattttattaatcaaatcattttagtttatggtacgtacaatatgggattaagtacgacacaatatagaaaatatgggtataggctcgacacgacatgataagcttgaaaacacgacacgtaagcacaaatagattaattcggaagtatgacacattaaaatgctcaataatttaataactataacaataatatatattttcttatcaattaaaataatagtaatattcaaattataataattataattattttttatatgattgtgtgtaactattattggaaaatgatataaaagtaattaaaactataaaatacacattttagtatttagctcatcaattgtaataaaaatataaaaatatggagcacaaatttaaggtcgtataagaaaacaagttggtctatttacaaaaaatgagcctacccgaataaggcacgacatgaatctgagcacgacacgaaataggggtgttcaaaaaatttacaaaccgtccaacccgaataaaccatccaaaccaatctgaataaaccgacaagaaacacaactcgaataatcaaacaaaaaattcaaacagcccaatgaatatattgggtgatggaatattattttaacccacctaaataatccgaataaatcgaataaatcaatttatatatttttactaaaattatctataatataatacataaattatgtttaatagttaaactattttacatttaaagtttgtattttatagtttttaatgaaaatttagactttatagtgataattttgttcatatttaaatattagagttagaaatttaaaatttacagatgaatatatttttttcttctatttttgaagaatattgtgtaatattataatatttatttaatttatatttgtgttatgtttaaatttttaatattaatttaaattataacttttttaatcttaaaatgcgtatgttatacatttattattttaaataaattatttgaacaccaaaaactaacaataattaaaaaaatgtaaggatcaatttggacgggttaatccgaccggactaacgaaatcattgggccgatattttttttatttttttactggatgggttacaattaaatatttgtaactcgatatttatattaagttagtaaaaatatattataatccaattaaattagcctatgtacacttctagcatgaaattaatagatttatagatcgggtctatcctataaaattatgggccaagatgcaaaatggccttaaatctaacaattaagttaataaatgtccatt

SEQ ID NO: 19656 - DNA, 1964 bp, Cannabis sativa
actctcacatttatttgaatcaaagttatgagctttgaataaaaacaagtaattctactactaaattatatactaattaataaaaagctatatatattgagaaaatatatcatcagctatttatgaatattggaccaaaaacaaacatggtcacgcaagttcaagcttgatgatatatatataaaccaaacaaaatagctaaataatattgttcataataataataataattaaggacagtaattttacttttactcttaattaatatcaggacagagttccatgtagccataatcaagcaattcttctatcatttgctcaatgtggtcatcttcaagtggttgaataaattgtacttgactattactagtagagcccatttgaccagctgatcctacccagctgttctgctcgggccacgcgccgccgctggttccggcaatgccgagggagcctccggtggtgattgaagcagagttggtggtggtggatgtggattgtgccacgtgggtgtctttgaaaattaagggttgtttggtcatttgaagagatgccacgttgcatttttgaagcttggctcttaaagtatctgaaagaagcttattggctgagtttgaagaaagtggctcattgggattgtaaggaaaatttgtacgtgcttttgcgccacacatgatcctagccgcttggtcatatgctcttgctgcgtcctctgccgtttcgaacgtccctagccaaattctcgttttcctacaccaaaaaccaaaaaaaaacggtaagaaaaacgtgaacgaaaaagaaacgtttcgaaaaaaaaaattataatgggaattagatgagaattattacagtaaagggtgacgaatttcggagacccaagagccccaatgtctttgacgaacgcctctataccgctgttgaggtctagccatggaggtttaataatgtcgaaacgttttttggtcagatcggagtgattgaaatgaaggtgtttgatttattgcctgagagagattttgaacactttggttttgtatagccaaagaagtgactgtagtatgtagtggagaggggaagagaaaatgggcaatggggatttatataaccgcttcttccagccattatgaggggacccattgggttttttttttaaaaaaaaatgatttattattaaatattaaattgtcgacagatgaggaaaaaataatgtaaaataaaaaatgtttcttttctaagagaaaataaaagaaaatggtatgtagtagtaagaaatggtatgtattaatgattatacaggcagtcctaaacaggggtccaaaacaaaaagcacacggtttctatatgcaaaatctattcatatactaatacaagtctttttagccaactaattaaacccaaattaaaagaaaaatctttacttacctttaattgtttcttcttacttaaattaaacttttttttgtacctgtttagtctttatatattatgactttaaatgttatgtcactgagtcttatacaatccagcaaccattaacacttaaccttaaaaaagttttttatttgaagagataaagtatcaaactttttttttctttctttcatagatctcaaaagctttgattttgaaattctttgtactagtacatatctagttgatttttcaaagatttttttttcaatacaacaaaacaaaagcattattattatttaggagaaaagaatatgacaaaacaaaacaaaaaaatgaagaggtttttctagagatttcatgtgtaaaaggcggtatagtatagggtttttttgtatttattgtagtagttaagtgaagaagatgggtacgtgccacgtggctcacatcatcatcaatcatcatgatcataattttctaaacatagaaaaccctaccctacccatatgctcttctctaagatctaatgcattgtgaagagacataaccatgtt

SEQ ID NO: 19657 - DNA, 6511 bp, Cannabis sativa
  modified_base (169)..(174): a, c, t, g, unknown or other
aacaaatgtaagggaatgattaccttactactgattcccattacttattagtaaacatgccataaaaagaaaacgaacgaggtattttctaaacctatttggaaagtttttggcttatttggccttttcaataaactccctttttcattttaaaataataataataatnnnnnnaataaataaataaataaaatagtagcaattgcaatacactccctttatcatagctgaaagatttgtgtgtgttgttataggaaaaagcagagttgttgaaaagaaaatggccaccgaagaagaaagcgcagtgaaggagcctttggatctcatcaggctcagcctcgacgagcgcatctacgtcaagcttcgctccgaccgcgagctccgtggcaagctccatgtacccccctctctctctttctctctctatgtacattttagggtttccgtaccattccattgctcttcttttcaatactactatcgtctaggtttagttttccagcttttattcgattcgattggtacccggaacaatgtttagggtttagggttttaactgtgttgttattctgtggttaaacctttgcaattggtcgaaatttgtagagagggttagtattgtattgttgattagataaagatgagcacttttgagggttttcttttttcttggttcaaacttgaaacctaaattgctcatttactgataattgttcctttcgatactaaattgtttgttttggggcgatactagtgaagagaaccctattctgttgctggatatttctaccattgtattagttgtcatgatagattttcttctttttgtgggctttgtatgtgcaggcttatgatcaacatttaaatatgattcttggtgatgttgaagaagtagtgaccactgtagaaattgatgatgaaacttatgaagagatagtacgggtatgtttgattttatggttgttatttttagagtttaaatgtggaagtggaaatagtaactattgggtaactttgaaccagatagtcattgttctgtttatctaagcacaagtatgctcacataaagctaaaagattttcgatgtcgttctcgatttcgaagaaagttgttcttctttttgaatggaaaattactgtgagatattttataatgacactgcatcactgaaatgaattcatgacatattcgaagaacccattaggcaagtagccaagggcattttacttgcatgtttatattccattttgactttgaatctatactatagtgtcaaagaagctaatttgaattgaagtgcatgaaaacggggctgcctataaaactgaatacagagttagataaataaagaaatagtatttttcattggttctttgttttgtcatttcttttgctctgagggatgaacatatttgattactaatttacacttctttatttcagactacaaagcgaatggtcccctttctctttgttagaggagatggtgtcattcttgtttctcctcctttgaggacagcttgattaattgtgtactcttcacatggaaaaccagtaatgatcgatctagtgaaactgttactatgttaatgtgtgtttttttttttttttctgattattagaaagaacggtttttgtgatactccctatcaagtatgaagagttcagttgtacttttaacatggctgaaattgaatgaatgaaattgcttaaattttagactagctttctcacattccttgtaatgttcatgcagaatgagagaagttaccctactttgctaatttgcttttctgctgttcctctgcttcacaatagatattaaatgataaaatatcaatcaaattccaaaactcatgtacttgatttttcactgctcaatctattttttggtgttaatttaaggtcccatcttgattttttggtgttaattgctttagaatgcatgccatacttgatataacattgtgaataaatttcactttttcaggaaccataagaataaggataagaataggaatgaaataaactttaatacaaaattcaccaaaattcttttctattccattccattatcctctaaccaaacataccctttacatatcgattataatgtcccggcccatttgaagcttgttgttattaaagaaaacaatatatgtttattaattcatgaaaaagaatatgaaaatgaattggaacttgcttattcaatataaagaaagattggaacttgtttatttgttgatgattgtattgtatacttacaatatagtttcatcttgggaatagatgattagaaaggatttcagtgtaacaacaaaatagatgagttatatacttagtacaaggatgccaaccaccatgagccttattcttacttctctgcagcagcatagagtgccttaatatcctcaacatcatcatagctaccgagaaatatcggagaacgttcatggatgctcttgggaaccaaatccagtgactgtcaagaacaaacaaacttttacgatttaaaaataccgctaactcagttaaatactgaaaacatatacaaaaatgaaaaatctgacaataccctttgagtgccggtgaaagattgacctccggcttgctccatcaggaatgacatggggaaaacttcatacagaacactggtttacaaagggtataattttatcattatataactgcaaaagatgtaatgaacattcaaagagaaaaatgaagctagaatttaactaatcataccgtagtttcccattggggctcttcttatcaccagggtataagaagatacccccatatagcaatgtgcggtgaacatcagctaccatgctgttaatgaagattttaaacatcagggtttgtaaaaaacacaaagcaaacattatcactgagtattttatttaaaaatagctaattaggatttctctttcgaactttgacatttaccaaattatgtctccgaacttttaaagccattaaaattttccctaaaacgtagcgattatccatattctaaatcgtcttccaactttgacatgtgtcaaattttgttttttgaactttcgtttacgtcaaacacccattagtaaaattaaacgaaattagacaaaatcctaattagcttttaaaaatttatgtactgttgacatattcccacttgttattgaacatgtcttctccattgagaaatttttaaaattagagttggtaaacattgaaatcaccattcaaagggttaaaaatctattaccttccaatgtatctcagagacttaggagaagaaccatcagtagggtatttgcatttctccacatacctgtattttttaatcattatgagtctacatagtcacagagtagaagccaatagaacaagagaaaatgactaaattgacttgaacatacttagaagttggaccatcccagttcttggcatttccctcattcactgaataaatcttccctctcttgggaatctgagcaggaacacacaagtgttaaccaatcaaagacaagaacaaagatctcgtgtacaacgaaagcaaagactaaccgaacagcatatgaaaaagggaagaaaactcaggcgagcaatacagttttgtttcaaggcataaagctttatgcattatcatgttatgtactgaaattgaaagtataccttgatgttagggtgagttagtatgaactccccaagagaaggatcaagagtgaatccattgacaccttccccagtgctcaacacaagctgttgaaaaaattacattacaaaacaacagagcaagcaacatcatcagcattagcaaacttaaatacaatcatttcaaactcttgaaactacaaaagaaaaaagactgcatttttttttggttcctcattaagattaacataccgtgcaagagcttccgtacatgcaatagccagcagccaccatattcttcccaggttgcaagacatcatcaagaccaggttcatgatcatctttgatagcataaatcccaaatatctgaaaaaaacaattaactcaatttagataaaacaacagaaggtgaaaggaaaaatattgtctgtgatgaaggaatgtatcataccgtcccaatcgaaacaccacaatcaatgttggaggacccatccaaaggatcaaaaacaacacagtacctgcagccagaacaaattatgaaatggtaagttgtagtgaggttgaaaaacagaaaagttaacacaatcaatcattcaggccagagtgttatgggattcgaacccatgacattgtataatatgccatacaccttaactaattatgctatgaatatttattgtttacaatatacttaattttacttaaataaaagcttaataattttttttattttattttgagccaccgaaaggtgcgggcactaagcacaggcctagcccgcctatgtttagggccggccctgcaatcaatatatatgtatatatacttgcaggaattacaacaattactagttttatactgctcacaacacaaattatgaaacatgaacattcatagtagagtaactaaaatatttagtaaggtggtcaaaaataatgagatgtattgctcaatcaaatgagctattatatctaacagatttagctttatactttatagcactattcactaacctatacatattatattaattttttaaaacctttttgtaatatatattattatttttatttatttgctttttaaaataaataatttttaaattatatgaagaagatttagagaagcaagtaaaataaataaaaaaaaaagttatatattttaaaagatatagagaagttgatgtaattgctagtaattgccaatttgataatataatttgaaagacacaaatgagcaacaattaccttccacgcatggatttgtcgacaatggttgcttcttcatcttcttctgacacaagaatgctctgtcaaccaagaaacacaaactattatcaggtaattccattactatttatacagaaagaaaagcctttttcctttattgacttacagttcgaccactgctaatcaaagctttgacaaaaacttcatttgaaagcacatcaagctttttctgctcttcacccttcaatcaaaaacccaaaataaattcactgacaagaaaaaagaaccatatatataataattaattaattaattaattaaaaataaatacctgtacattggtctctccagcaagccctatgagtttggccagaccagcctgccacaacaaacaagcaataatccaaaacatacccaatcacctttacagtccaagtcaaaagtaaaagaaaacgaaagaacttatagtataaaaagaacccatttttcataaccaacaaatgaaaaatcaccattaagtaaacgaaaatgaaagaaaaagaccttgttaacagcagagcaaacgaatttgcatcccaaaacgatatgactgagcaagatagtaaagtcaccacgagactctggatgcttagactgttcgttcaaaacgaacctcgtaatggtcatcaaatccgtccggtaagcgtcggcctcgtgatccatctctctgttcgacgaaaatccccaatggaaaaaaagaaaaaaccaaatgacccaaaagagaaagatggtaaaggttgtttctttttggatattagatgatgatgatgatgatgatgatgatgatgcggtggtggtggaggtgctcggttcgaggccaaatgaaaaacaaaaaagattccttttttatacactgagagaagccatggatagatatagattgggaatttggggggattgggttcttcttccttttgtgtgaagaggaagcttctgatgacacgtggcaggcgttggtggtcgtcagtcggtcacagcagataacgcctctcgtcgtctttcacggtcatctgattcgacggttcccaggtttttgtcattatcttatgtacaatatatgcagacgagggccgttattttagtttgttttttttatatttgtgtaattgcaaataagtccttaattttgtgttttgtattcctttgtacccctgcctcttcctttctgacgtggtggtgactggtgaggcgtaagctttatctctctctcactctaaattcttatcgactcagattagtctttaagcttacttggcatgcatttatttataatttataaattgaatttattggtggcatagaatcgggttatgtgtgtaatttagtcaaaaggaattgttaatttcaatgggtattaatggctcaattagatctattggttcaaaactattatttctttcccataatgtattataacttaattagtgagcatcattactcggtattagtagtgctcaatatttcatatgtcagtgaagatatcttatatataataagactcatcttcacgtcctgcttaaaggacaataatacccttctattgtagctggttgaagtgggtttattgtatttttcatacaattatatattttttt

SEQ ID NO: 19658 - DNA, 3884 bp, Cannabis sativa
gttatttggaattttaggttatgggtttgattttttttttcttttataatttaaatgcttgatttgattacggctaagaattttagtgcaaacccatatgaaatttcgtgcttaatttggagaatttttgttgcattgatgctcttatatttcgtactttctataatcttttaagattttggttaatagtttgatttgtctttgatacagtctttgctggtaaaccacttgcatgtgaaaagcactgattttcttagagtccttagaagaagatgactgtgatcgatatcttgactagggtagatgtgatctgcaaaaagtacgacaaatatgatattgataagcagaaggatctcaatgtatctggtgatgatgcctttgctcgtctcttctctgttgttgaagatgatatcgaggctgctcttcaggtattctcagtcactttggatcaatcatttaattggagttcactgtttgtttcccagaagaaataaaaaacaaaaaaaagaaagaaagtggacactggaattcaaaccaagttcgttagtataggtgatttcattaattggtggaatttttagggcttttttagggttctactgatctaaagtggttgattttgtagaaagcggaggttgcagcgaaggagaagagtagggcgtctgcagtggccttgaatgcagaaattcgtcggactaaggctcggttgctcgaggaagtaccgaaattgcagagattagcttttaagaaggtcaatccttactcttctaatcttattatttattggtcttttgtgaaatttcaactcttgctggacaattatggaagatgtttcatattgtgaagttaggtatagggtgattgtacatgggaaaatgaattagtgtagtttgtactttgtttgtaacggtatacttcatttgtttgatgtactacaatactgcagattttctaattttggttgatgaatagagtaaaaaccatactatttatttcaggttaagggactatccactgaggagcttgccgctcgtaatgatttggtccttgcattgccagataggatccaagctataccggatgggactccagcaccccagaaacaaactggaggctgggcgtcatcagcctctcgtactgaaatcaagtttgattcaggttttatgatcagctctgtcatctgtttgcattgtaatctttttgattgatgatactggttataaaatggatgatattactttgcttatgtgtttcacgtgagaaatgctaaaggtcaccaacggtgaggtgtcatatcgcttttggtatattcacgtatcactaatttaataattattatgcaaaactgctgaccatttgtagggcgccacttcatggtggtgttgggcactggtatctaataacagtactagtttcacagggctatatgacttttctttgcttatgtgtttcacaattatgacagagggtcgatttgatgatgaatacttccagcagagtgaggagtcgagtcaattcagggaagagtatgaaatgcggaggacaagacaggtcaaataggatcactgtgtttgtatcttaagaaagtttgattacaatttagatgcatgatattttctttttgggcattctttggttttttatgctcttttttgacattcctacaggaccaaggtttggatatgatctcagaaggtttagatacgttgaaaaacatggctcacgatatgaatgaggttagttgtctctgcgtttgttttcttcttactcattacatattccacatttgaactcattaattattctttatgggatgaacaggagcttgataagcaagttcctttgatggatgagatcgacgaaaaggtgcgatatagtgtcatccacattcaatttttccataagctctgttggagatagacgtactaatttagtagatatcacctaatgcttcttacgtgtttacaggcggacaaggctacatctgatcttaagcatacaaatgtgagacttaagcacactgtcaaccaggtatgaagcagcagattcttacatctagtaaattttccaactataggtttctctcatgtcacatctaagatgacttctctgttcctaatcccagctacggtccagccggaatttctgtatcgacattattttgctgtgtataatactgggaattgccgcatatttgtacaagtaagcctgtaccttggtctgaatcatttacaaagtcatctttttttttttgaagaaaagcgtacatatattataatcaaaataaattagacttcacggtcattacgaaataagtgttccgggatacaaccgaacctcttgtgggtaaacgcccacttagccacattatgtgccacaaaattacaattcctactaatattcgaaaaaatacaactaacaaacgaaggagaggatttgaaacaaaaagagacatagttctcaatctcccaacgggaaacctccctattaagagcgttgataaccactctcgaatcactctctacaataataaacttaaaaccttgattcttcgcgatatccaaagcaatgcaacaagccgccgcttctccacacagcgcatcggcaaactccaaataagaagtgtggagcattagattgagtttttattgaaaatgtgatgtttttgttaataaaatcctgtctagttagaggctacctgaagcaaacttgatgttcatgttgatgaatgatgaataataggtgtattgcttccatttttttcacttcatgcatgatttatattggtgcaagtgttttaaactgttcaaaaatgttgctgctgagaattaatacagaacaacaaccttattgaatactttcatgtacaaatgcaaaggtgtggcttattcaaacaatttgctgtacaatatacactccatctagatctctgtttcatttctcaaatgttttggatgttgaaatcttatttatgtttattggtctattattccgatacgagatattctgatgcatattgtctttcgtatggcagtgcactgaaaaagtgagatgagctgaagtttcacattttcgaagtgttggtggcttgtggtaattttttccttatcaagaagcagaagagtttatggtatttgagttgtgtattatttggttatttatgacttcctttctaaagagtctgtgctcttcaagcttggtgcctttgatgttgtacgctttgatcaacatgcatttctgtataaatgtcttttcacaatgtttttatctgcccattagagctgagctgttgtttttctgaatcatcatataatttctggtaaccccattctcttttctagacatgttcttctaaacgtggtattcattttttattgtattctctatgtttcatcttaaactttatcaaaacttggtcaggaatcgttttctttaacatctacaagaaaagtttagcttaatgaataagaataggaataggattaggttgtttggttagatttatggaatcagtgattgaatatacatttttatgtttggttgactatataatggaatggaataaattaattttgaacaaaaataccataatttttaaaacatgattaataaattaaattgaatatattcaacttatatatattttttaaaaaaaataaaagattgatatgtattaaaaaaaaattaatatttatttataaaattgatatatattataaaaaatttgataaatataaatatatatttattgaatttactataaaatattcttcaaaaaaacttgatataattttaaaaaagaaaaattatataatcacatcaaaattttaaactaaacattataattttttaattaataagatcaaacattgtccatacataaa

SEQ ID NO: 19659 - DNA, 3986 bp, Cannabis sativa
  modified_base (3578)..(3585): a, c, t, g, unknown or other
cacgagtctttgttatttatgagagtgtttatacagagaatgttcttggtgaatctctctctctcttctttactccattcgatttcttaattcatcgatcccccctttttatgttctatgtttgggggtttttatagtgtatttcgagaaagtccctagaaagggatcactcgtctttaagtgttagccccttgggggcacaaattcctagcaaatacaaaataggagatacgtgacctatgccctatgtatcttagggattaggtgaatataatcttttatatccttccttgattgatgtgagtcttcataatgaagccgtcactagacttgtcgattatcgtgtaatcgccgtaaaagagacttgcgccatctgtcaaattctcttatggaggttctgatatgtttcccccatgtaggattaaatgcaaaatgactgctcgaacgatctccttttctctcagagatgcattgttacatttccagctcccggagagtaaaggcgtgctttatgcttctctccgggaggctcactccatgagatgcactgctctgtctatgacttaaccaatttctgtgagtgggtgttctttcagatctacgtgtcgcaggcagccgctgccacgtatttcgggaaaaatctgaggcaacaatattaatactatttttttttttgaagaaacgtaatcagaaactttattaaccttcaaactctactacaaaataagatagcaaatcagttgggacatcctcatactgaaaatacgagcaggataaaaactagaagatcttgcgaaaacgtgagctactgagtttgcttaatgttttacaaaataaatcaaaacattattcaagtccataagtaaatccttacaattttgaatagcagagccaaacctcaattattattaatagtataatttaatatccaacttcaattttaatttaatattattatagaaaaattattaatcaattgtaagatatattccatgttaatatatattgagtattataggagcctaatagtaatattcgttggaatacactcatatctcaggaaagagtattaattttaaattacaatcacttattttaattttttgtataatctatatttcgaatatacaaatgaaagtattattttttttctatataattgaatacgttatagttatgctgttctatattacttttgatatatttgcaaaaaaaattgaaaaaaataaatttgactcataataattttgttttaatattcataaagttgtaattttaagtcattgttagttatataaaatagaaagttttggtggacaaactttaaggtcgtgctttattttttaaatggaaatatcaactttattaattattaatttttgctaccaaaaaaaggtaataaatcaaatggaataaacttcacaccaaaacttcaaaaataatataaaattgaagctctaataaaattatgagccactatattttaatggaaaaaaaaaacaaaaatatttctcaaacgtagcaaacgtttacaatcctaaatgacatgatcaaacaaaaataagtccctcaaagcctacacaacacataaacaatccatcagtcttaggaatcacctgttgctattgacggtctttaatctaactaagagcctcccgaacccctatcgctctttaacaagctctggttccactgttgcttgcaagagagtagtacatccttcaactaaaggactattagcatctcaagccactatcccaaagccaaacttatgactctcatcaaataaagttacatcaacatttattttgatacagtaaaattcaattttcactccattattcacttgtgtatcaggccatgacgactccatctaagagttctgagcttgattaaggtatctctagctttcactgtttttctatttcataacaagttatttcggggccccaaagagctcaataaatgtgttttagagtgttttggtattctcaaattttgtaactttataaatatatgtgaagagtaagaaaaataatagtgaaaatatatgtaattttgaagtgaaatacatttttcttttcaagtttgataattttgctaaagtaccaaattgaataaatttatttgcttctttattatttcactaggtttttctttttgaacaataggaatatcacgttatatcaaaaaaaaaaacaatgggaatatcacgaagtctactattgttactttaaactatatttattgatttttttttttaaaaaaaaaaaaattacttgaaggatgataaaacctcaacaaataataagaaaaaattgggaaaaaaaattatttgatatgaattcttgagaaaaaagaaaaattgaaatagaagatttagcaattttaatatgagaaatgctaaaggatatctacttgcttagagcatctcaaatagtaaaaatttagagaatgtttgctgagatagacatattatgtggcaaaatattaaaatgttatgctattggagagaaaaaaaaatatcaaattagaaaggttaattaggatttttgtcctttgaattttgacatgtactaaattatgctctttgaatttttaaggtcgttaaaaatgcccccgattattgaatttaaggacttttgtccaattttaataaaaaaaaaatctaatatggataaaagtttaaaggacatgatttaatagatatcaaaatttgatgagcataatttagtacataaacaatcactgaaatagtaaaattaaatgaaattatacaaaaattcttaaatctaacaatcttaatagtttaaggggaatttttaatggccaaaaaaatttaaaaaatatgatttaatacatattaatgtttaagtgaaaaaaatcttaagcgttgaataatgatataccttaatcattttagcatttctcattgtttgatggttgtctttgctgcattgagtgttgttgggaggtggtgtgggccccactggtagcatctgagtagtaatagacagccgaagtgggcccggacacgttgatgctgactgtaattcatcctctttcggcccaagttcacattcacatgatcaaatctgtcacaattaacttttaacaatatactaatactattttttattgggaatcattgtctttctctctcatataattaagagcaaattataattatatatgatattttaaaagttattatgataaatatgtttaagtttgaccaatttatataatatattttttttattatttttaggtcttttatggtatttgatatgctatatatgtaaattaggtttttaaatctcatatttaatgtttttatttgtttaggtagttttatttgtcattgatgccggaaaagtcactagagtttgctaccggtgctagaaaaatcaccagagtagcggtcggtgccgaaaaattcatcagagttgttgcggatgctagaaaatttgtcgaaattggtattgtcgccgaaaaaatcattgaaaaaatcaccaagaaactagtttcttgaaaaagtcatcagaattggcatagtcgccggaaaaatcaccaannnnnnnntttcttgatgaagaaaccaattttttggtgattttttcggtaatttttctgatgacaatgccaattctgacaacttttctagcgttggcagcaactgcgatgacttttccgacactggtagctactccgatgacttttccggtatcgatagcaaactccggagaattcatcaaaattggcattgtcgccggaaaaatcaccaaaaaattggtttcttcatccttggtgatttttttgtgatttttccggcgataatgccattctgatgaatttttcgacgccggcaacaactccgataactttctcagtgccgacagcaactccggcgactatgccaatttcgatgacttgtttcagttaattttattgtttagcatttatatttcgttatgatttttcat

SEQ ID NO: 19660 - DNA, 4213 bp, Cannabis sativa
tgtaagatctgttaagtttgatttgtaattctctatattatttccctactgtaattcttaaaaatgtaccaagaaattataatgtgttaggtcataatttagctaagaggactttaggactagaaaggaaaggaaagtgatttggaatggataatgttccaattatatagcacttgtaacctgcacttaatggttattttaatatagttacaagctgttttttcgaagaaaaaaaaacactacagctttgctcattaaaacattacaactcatggttcaatttaaagaagaagaacaatcctaaaagtttcttatacacgcacttaggatcctcatgacaaacataaaataagacataatccatctaccatagctatgcaaaatcaattagtgtaattagagacacaagcatgggcctcacaggccttagcagttgggctgggctcaacggtgggattgggctgaacgggcttcacagcaagctcggccggtaagtctttgatgcccttcaagtaaaaagtatagaagagcttaaaggggaacacaatctgctgcagtttcacctcaccgtacacaccctcaaatattccagttccaccagtaatagaaagacatgtgtcctcgtaagtcacataaggaccctgcactgatatgtggccgtggtctccgaagtaaaagctgaagatggcctcgtaccggtcacctttcatttccggtttgttctgaattagaatacacatccctgctgttattcctatccgtttctgcaagtctccggtatatatctgcccccataaaaaaaaagaagagaatttaaataaatttacttattaatagttattaattaaaaatagtttgatttaactaataataaactaaccttgttgctaaagggaacgagatcaccgagtgaattaactggtttttggcttaaacggaggaaagcagggcttccacgatctctttcattgaactcgtacacagacatttcttgaactggaacattagctgaccacaaaacatatatgttagatttattaaatttatatacattaatacatataagtgttgaaaaatacgaaccgggtctttgcgaagaagccatattggagttgagaagtgtggttggtcaatagtaattgagagaggaagaaagaccaaactttataggataaaggaattggatgctacttgctaatgaatggttggaaaatgtagttgtgttgtaataggaatttatagagatatttatagatttttcttctcatgagatggggatacgacatagttgttgagatattaattgggattaaagagtcatgaacttccaatttcagcacgtgtttaattgtaattataatagtttttctagagatgtacacaaatattgtttgtttagtttaggatatatatgaatgggtcggtggggtgtgtttgatggtggacctgcggtgtgcgcgcataatgttgcggatcgtggtagcctagactctatgctcccacacatctattacatttttaattgtaagctttctcttttattattttttaattatagttacaagattaattttttaaattttttaaatgttttgaataatttatcatgtcgtaaaataagtttgaattttttttaacacctatggtacaataaaatatttgaatctctatttttcagttaacctattcagatttttttttaaaaaaaaaatacatcgatgatattataattataacgaatataactataaaaataaaaaatttgaaaaaaaaaaattcaacatgtgatttcaaatgcagaaagtaactaagagattataattaacattttactttaatcttattaaaaatttaattgggagtgctaagaggagaaatttaaactttaaatccattagagagtgaaaatataacttgtaattatttaattttacaaacattccaaaagagtatacatgtttcgagatcccgtaaaaacttttacaaaacattacaagtcatctttacatgccgtcttaggcggcaaaaactgagaatacaaaatacctcattcggtagacccaacccgcgtggtctagtgtgatccgaatatgtacaatataccgccaagccctcgaactcatggctgatcacaaactgatttaccctttcctgcacaatagagcacccatgagccaagtctagtaagacagtataaataacaatatgcattatattctcaattcaaataaatattgatgccactgtatacattgtctatttaacacagacctacgtgttgcgcacacacgtctatttacaataaaccacatgcttgaacataagaacaacctatgctcaaaatactaactcaaagcccacacacaaaagcatgtcacaaaatcagcaaaattctcaaattcgcatgcctgaacataaggcattcaaaccaacaagaaatgcccagaaaaacaaagccaaacctagaaattcaaaccctattttcatccctaaaatcatacaaaacaatctagatgcaagtaacatacatccataagctcaaatacaacaaaatcatcaataatccttaacattacaaacaacatggcatcatcaactctcaagaacaccaaaaatacattcaaagagcttcaattaaaatcagaatcaacacaattaaaagagataaagagttttaccgcaatctccacaagtttcaagcaagaattcacccataatccactctaaatcaaaagctttctttcaatttgaaagaaatcaaaaatgaagaggttaagggaaagagagggggtcgggcaagaaaggttcacaccaaaaattagtattctcatttttccaaaaaatgattttttgttgaacaatacaataaatggtcaaatgaccaaaataccccatagtcaattatatccacatataaataaacaagagaaaatttatcaattaacacacacatatatatacaataatacaaaattttccatttatcattataatgccataaattaatcccaaaaatatattttaagccccgaacccggttcagcccaaaatacccgattgtaactatactgcgccgacttgttagaaaacacctgcagatagacaaaataaacatactatgtaataatatagtccataaacacgatatatcataaaattatgattttacccttctcaggttaaaattacaaaaatactcctaacacactaacgaggtcttaaaatacaatatatccatatagtttcgcatattaaattatataatattataattcctcgataaaatatgattaacctatttagggttcctaatccggtctactaacctaagggtattacaattccgaagctatttcaatgctctatcaagctatcgacaccaaatttcacctctaatggagttatataaataagcatcgggttaccctgagcaagtcccgccaggctccaaaaaatgaatatcaccattagaagctaattttcaccattagatcattatctatgaccaaaaacatctaatttgtattttctcctattttagtgggcattcttcacctataaaagaagagctttcttagctcatttgacacattcagaaaactacccagtaagtcagagcttctctctctagtttctctccttaaaaattagagtttcttacacttggccttttctgtaataccatctcgttagaaataaaaattcaaagtagacgtagctccattactgttgcgatacagggagtgaactactataaatttgttgtatctctcttataattacttaacaaatatttcattctcgcaaactccttgtcgaatgattttctttaacaagttgggtctaaagtgtggtctccacaaaaaccttcatggatctcatggataactgctctgatctccgttctgacaatacacttcaaatacgtatctaacaattctttttagtacaatcgtccatccagaacaacatatctaggagcctagtattaaattttcctagcgataaccctatccgccggtagctcttaaaaattgagaaattggtaaatcatgcctatccaggagttggagtggtcaataacatttacgcttagtacttaggtacttagaacttccagatgcccaatggccacaacttcgtattgctcaatctctgaatccattactaactttgccaacatgtacgagaaggctttctgatccctggggac

SEQ ID NO: 19661 - DNA, 2797 bp, Cannabis sativa
tataatgaaaacaaataaatagatagctgaaggtttacttttggatgagataggataatatcaaaaagtcatccataatcttagcatcatagtagtagaaatatgagagataattgcaaggctaaataaattactgtatataataaaaatcatatattaagaaacattttaactcatcaacaggtagataattactaaaataacgtgaaggatataacagaatacaaaaataacatgaacaaagaaaatattttatgtaaattgcggaagaataagccctccactgcaagtccaagtcaatttgaaattaacaagaagacaatcaaacaactgtggaccaccacagaagcattccaaaccaactgaaagaataatggataaatcaaaaaagaaattaaagacaattacaaaatttcagctggggaccttttccacaatccaaaacaaagaacaactaactaccatgctccaattcaagtagagcagttgacaaacttagtaataaaagctaccaagtaaaattacaaagctacaattttaagagaatatcaaccttttctgagcagctgcctggagcttagcttcgagacgctgaccaaggtcctcctcattcgaggaagacctagatggacttcgaggttttggccgtgccttgcttgataagtgttcatagtattgctgcactcaaaagatttaattttaattttcagagcaaaagtattacagcagctacccagcaaaataatgataacccagaaagtgaaaaataatttacagtaattaaaaatatattataatgatatcaagcaacaaatgaatactgctatcatatcaccaaaaaaaaacgcttaagaaaataataataacaaaattcaaacgcaagaacaaccaaactcacctaacaaaccaacaacatccttcctcataaagattcagtgaaaacaaaatcagatattctcttcaataaaattaaataaaaaaacctttttagtgctatgtttggtggttgcaaattaatagatgaataaacatataaactgaattactttattagaaatgattttctaaagctaaaaaaaaactaaagatgaaaaagggtagttaagaaaaaagcttctttcagtgatcaaaattcacataacaaccaagacaaaaactaaaaattaacaattttcggaaagttaaatttttattttttttttcatcaaacagagagagatagggggagacctgtcggcgaaggtcggcgtgatgaagcttggcttcaatttgttcgacggtgcagggagtcttacagtggagaagcaatcttctgctaagccgtctgggtattcttggaggccacgtgtacgacgccgtttcactagctgcaacaaattccatacctttacctatcccctctctactcgacgatcaattaaaaaaaaatataagtgaaaaggataacgacgatgatgattatgatgatgatgatgatcaaaacgacggcgtttcttcacatgctttgctattcttttcttcttccttatgtacacaaacacaaatatagaaaggaagaaagaaaaaagaaaaggaaacttagaagttttttttttttttttaatgaaagtagaaaagaggaaaggccagaaggcgtgtaggtgggtgatgtttctatatataattgtagaggaaagaagatttagtgttaagctgctgctgtgttgtggtgtgtcaatgtgtttatacaacaaaaagcaaattacattttgcttatccgaattatacgtgacacgtcatggatgtccccactactactcttccttctttcctttgcttgccttgtctaaagctgcaattgttgtttatgatgggattgggagtttgggtatttttgttgcggtggccctactttttgttggacacgaattcaccattttgcccttccatccattcattctcatttcttcttccctaccctaccctaccctacgacctattatttattttattttattttagagtttgacaaattagacacctttttaatgccttgtgtccttccttgttgtgtcaatgaatctacgcgcataagtttggtttgttcataaatttagctgctattcttccgttacgaccgttgaaaataatattaataagggggctgggctgggctgggctgcttctaatgttgcaaaaggaaaaagtcatttgacacgattagctcactattcaggttaggtgttaaattaatgaatattaagacatatcggcggtgtctaaatcctattttatataataatatatatataggataaactataaagtctattaaacacttatgaaaatagatgcttccagctttttactctcattaattttgtaagggtaaatactatttgaatattttataaaagttgttaattggactatctattttattaaatgacaaaataaaatttatattttctaaaattgtaaaattagaacctgaactcaatttttaacaattttattttttaatataactagctttaagacaattttattttttaacaaaaaatgtaaccagttttatcataacatctttagatcaggttattattaagtattattttgacaaaaaatcagttcaagatcatatttatacaattttaaaaaataaagggtctattttgttatttaaaaaaggaaaatttacatgatacattaacttttgtcattttttttacaaaaatactaccagacagtattttttacttttttactgtatttttttataagtttcatattataatatactgtgttaagttttcac

SEQ ID NO: 19662 - DNA, 4557 bp, Cannabis sativa
ttatattatttatttttttatagaaaataaattattcaataaaactagctgacttgtgacccctagtttatagttatattaaaaactaatttagtttcaacacaagatcaacaccaaaattaagttgaattcctgacaatttagaagaaaattacaacaaataataattatggccctgactttcttgaaattgactcgtataatcgatcaaggagatatggtaataattacttacaaagttaagcagaactaataccagcagcacaccataagaagtaagcctcgtttcaccagaactcaacttaagcagcgtctacgctactccgacactcatctactagagctatactcaacatttcggtgcagaactgatcatcagatttcaaccacaacgcctgaaagcacatttacaaacatcagttccgtacgaggtacaagtcaaattcgggcatgagggcattctatgaaatttaagtcatagtaaagacttcaaatcaaagaatgttatcagtccagatgataatacaaacatcacaatacgcaacactcagttttgcagtgtcattttttgaactaggcttccccgattattggagaccatgaaactacaaggattgctatgtatgtattaattaaaaagcatttcagtcgatgcccaagtaaggtctcagcagaaaccgcttaacagatagccagacggacaagacactacggagaaataagcgattgaatacttactttgtgatagtatgtaattgcggcagtatagttatcctacccaccatgaaacaagaaaaagaattaatcatcgtcgatcatcaataaaagaatatctaccaccttactagtttaagaaataacagaagaaagtacgcgaagaaaatttcatatacctgcagatgataggtatatgcaagacctgcataagtgctcaaactttttgatgataatgcaagtgctttttcgtagtatgaaattgcttcatcgtatagcctgagacatataaaaggttatttctttcaaaagttagtaaaagaaaacaagttcccaaagcctgaagatgaagtaatccttttctaagtaaagaaagaaactctatacaggtgaaaaggcaatctataacttatttaagttgatcagaaaagaagaaaatgatattaaatctagtgttgaagattaattggcatccaccttgtaagaaatattttatcgaaaatagaaagcagagtaaaaattcacgcactttaattttctgaatgcatgggcaagattaacgatagtcggttcccacatttcacttagaggagaaggaatgcaagccagtgtttgttcaaaccaccgtatagctttagtataactgaaaccagagtgaatactttaatacattagaaccgaaataggaaatgttactagcataaaatagtgttcttgttaaaatgtaagaaaatgaaaacataacggacaaatttcttttctttttccaatttctagaaggaaaaaacaatcatacttttagctccaatttcttgaactctccaatcatactaagaatttaacgtttgttattgaaagtataatttgtaaatcaagaaaacagaacaagaacttgattgtgctagcaacttagatctatctttttcatctcaaaatttattaaattagatttcccgatgaacatatttcgaaagcaattattcataaggccaaatgttagaccatcccaaatgtatcagaattttatcatagtacaatagcattattcatttatagctcatactcatcaatctcctcgaactaagaaacactactaaatatcattgaaaagaagcattcacaaagttctaggaaatatcttttagaaagaaaactctgaatgttgtaaaaaaaactttcagaaattttcatcgataattggcgttgtattatcagcacagatataagatgagctagtttttcagaaacatcgtcacaaagaaaaagagcattaggaaattaatatggagaccaaagcacttactccttcatatgataagcaacaactcctaattcattatatacaagcggatccgatgggcaaatactcttagcctgcataaaaaactgacagacaagaaaaattgtcaataaaacagagcaaatatgtataaaatcataaatttagaaaagaacatgtggtgcttaatagtatatataactatccaataagagatgaagtattataatgtttgcttcctagttgttgttaatctataaataggctttgtaattataataacatagactgcttaataaattaaacgatttagatttacgtaaactcttgagcaagtaagaaacttaataagtctaggctttatatcacactcaagttcttttaaacttctaaatccattttattatgtttcacttttccattcattcgtatgtttcttcgtaaacttgagactaaaaattagggaaatcattcacataattagtgaaattgaatatagatgataaacacagaagaaaaaaaattgccaaacctcgcatgataatatcttcaaaacagtcagtttctcacaaaaagcaagtccgaaaaataatagttttattttatctaactacgaaactatttagggagcaccaagaaaggagctcgaacctcagaccttgtggtagcaaaccacatgtctgaccagtgactattcgagctaccaagagggtatctgaaaatgaaaatctagacatgtatagagagagtaaggcacctgctctccaagtttataactgcgggttcgcatatactccatcccaatgtacagagttggcaaatggcacctggaaaagggcatagctatagaaaacgggcatataatataataataataataagagaaatgaaataataagatgctcgtataatcagccatgattattgatgtatattctacttttactttctttaaattgacatattaattgtatacgtgcatagctatagataaccgtaatttctattgacaataaaagctaagaatgagttccacttaaatcaagcctgaaaagctcacgaaacatctgcctctatgatatatacccgagtgacaggaacatcattagcaagagggcgagagtaaaaaaaaacaatacaaacccataaattaccctggaaagagacgagcagcagtccgatatgctgacattgcttgatcaccttcttctagagcagcaaaagcattaccatagcctatccatgcaggaggaaaggttccatccagactggtagccttactgttgcatagaacaaaacaaaatcaccgattactgtcagtactgtaaataattccacaagtgagaataacatctaaagctagtaagcttgagcttatactactagaccacaaagtgcagcacctccaaattgcaacttccatcttttcttgttctttttttattttccagttattttataagaggcaggaagtgctacttggtatgcctaaaatactgtgtattacattgtgaaaaaaaatatgttactccattacttagattcacttccatgaagctgtctaaagttcaagattttctacattttaggcattgacacctgaagtttgtagaagagacttatgcaaaatagatataataatagaaggaagtttttgtcaaaatgtagtgcataggaagtttccacagtatatcctctatggaaaggctttatacatgggaactttttgtgaaacattcgtaataagaggctctatgaaaacaaaaacgcagttaaatggctcgtgatacaagtaaaatgcagcgcttataaaaagaagaaccaacagcaatagtaatagaaaactcaactagagtaaaattcctaacatagaggaggtgcacaaaactcaatggctacagcttcaacaatgaaatacctgaaataactgcgcgactggacatacttcttgatgcaatagtaatagcaaccaacagcaaaccatgacaaagccctaaaatgtaatgaggtaataattagatgtgctgcagatgaaaggacaagacaaatatttcttttacacccaagcagaaaggttatcgaggaaaatgaacaatgcaacataacatttttgttttccttttaaaagcatgcactacaaaacgattatcctaaattccttcataattttggattttgttaacattgctaacaggaaaagtattttacacatgctgcaaaaatacagggttctatcctgggtaacatgaaggataataaataaacaacattcaagagtataactaaataaatttgcaggataataaaatcagtctcacttttgaggataatccttaacaagattgcatgccatcagatagagctcatttgaatggccaagctccatagcagctgcaagatgtaccaatgtactcttcagatggaaagggtccttttcaaggagtctatacaaaaaatgtaacaataaaataaaatttatacacgaacatataacaagaaaaattatatgtgaacacatgtagaaaaaaaatgtattcatgtattttcaaggagctaaaatcaaa

SEQ ID NO: 19663 - DNA, 3844 bp, Cannabis sativa
aaataatgccaagtttttatgcaaactgttcaggcactaccatttgaaataacagtcatgtcacatagcgcaatgcaacatagagatgcaatggtcaagctcaagagatatcattcctcaacaggactgtcttactctcgtaaatattgatcaaaagtccccaactgcaaatctgcctaaaccctaaaaacttaagaggaatatctgcctaattcacttgcaatttccatatgtgagctatatacagcatatgttacctttccaggtgttataagtcctttttgctcagcatcagtaatcatactgaaacctatcctgcagacaacatataaaaacaatttgatgaggattctaacaaataattggtttcatattcagtacacatgtctacatagcataaatgtgttcagaacatctttatccttagcttggaacatgttatatctggttctcatatatataataaacaccaaaagtgtcctgctttacttaaagtttatgtgacgttttctaacagtgattgacatgacatgacaaccatagtaaccatagtttcctcacctgtccttgacactgcaacatggctccataatctcaagtttggcagcaatgtttgcaacagaccccttcacaatattattcaggtaaaccatgggagttttcccaataagctgcattaccaaaagaacctcattaatttaacaccacaagagttgttcaggttgcaacttctactatggttctttcaatgttaaatttcaatttttttaaggatgaaataatcgaatcaatgtcaattacataccaataaacaattcgaaactttaatgtaagcacaccatgtataaaaattagataatacccataatcgtacaactgtcagtgaaaagtgtcaagcacaccatggttacttacccccaaccccccaaaaacacacacaaatagtcaacgaacacgaaagactgttcctttccatttctttacaaaaattaaattgaaaaagaacctaaatttatcaaattgcctatccacaatcactacaaatccataaagtttagttttttcttttccatgataatgaaaaaaggaggtgggatagaggaggtgtgacctgagtaacatcttcggcaatgttaagaccctcagcttgtggtttgagggaaacggctttgcaaacaatggaagaaccggcgaaaagctttctgggtctgttggtgaatctcagagccgaaaatccctgtttcggaacgaacgaagtaactgcacagagctcggatttggtgcttcccaaacacgcgggcaatggattgaccagagaagctgaacccatttttcgttttttctttctttcttttagggaaaaaaaaaacagagacagagagagtggagaagagatgagagtgtttgtgtttaaggttatattatggatacggttcttatgggtgagtttgttttcttagatactctctgattttaccgtttgttaattaagactttcttgaattgcccaaccaatcagtttctgccatctggcggaaacaattacctgctgactttacaagcttgaaactagtattggagattaacataaaaatcaaaactttggtctaagttcaatgaaccaatatgttatcaatgaaatcaaatcaatcttgtaatgacaagctttgaagagttattatgactattccttctataagtcaacacatttttctttcgccttgaatgacaaagctttggatttagctttttctttcataaaataccaatttaaaaaatattatttataagtaaactaaaatttattcaaagttcgaaaataatatctcaatttttttttttaagtagttggggaactcttaacttctcaaaagaaaaaattgattttttatggtttaccatcactagaaaagggggaaggaataagatggttcatttttaatttttttttttttttttgaaaaggaatgcttcattttaagttggatttattcatttttattttgatttttggatgaaaaaagtagagtaattgccttcatttcacttcactgtgtacatataggaaagaatattgtggagatttatggctataattgatgttgatgtaattgactcatcctttactctctctctctcaaccttttattgtggagaatcattttcctttctaacaaacccctacaaatgatacctatcccttcagcataatcaggagtcatgtttaatttgaatgaataaatcccaaaacaatattttctttttatttttttaccacatttataaacaaacatcaaacaagtagcattttgtttaactcaactcaatcgataggcacataccttcattttcaattcataaaaaagagctggaatagaaagcaaacaaacatttcgagttggtcataaacataaccattaccattttcatttccattagcatattagaaagaaatgtcaaattctacttctctactaacaatattccataatggtaaaagattttcatcaaaatgtttgtacaacactacattactcacatttcaattttcaatttcaatactaggttttcgtcatacaagctcctctctcaaaacttacttcttgttcatgtagctaaaactttcaccgccgcttatatctccccgagataaatctgcttatcgctactgcaagatccaatgattggttcagttgggtggaagacacactcgttcaccgatccaatgtgtcctgggagtttatacaagatgcgtcgggaagtagtatcccatatgtaaaccatcctgtcagaacttccagaagtgactttgcttccatccgcagaccagttacatttcaacaagttcttttcaaagttgtgctggtggccttccattatcttcacacaacggttctggggtgcatagggtcgcatgtcccaaatgcagagcttgcagtccattccgttagtaagaagataggaaccatcagggcttaatgacatacctgttatcatatcttgatgcccttgaagagtcatcattacttcgcccttacgcaagtcccagaccttaacatcattgtcaataccacctgtgaagatcttatctgatgcatctgagaagctcacagcagtaatttgatacttatcaggaaatgtttggattgcacccctttgacgcatatcccatagtttggcagttccatcatcagatccactcactatgagaggaggtcccctgcgggttgggcaacaagaattcacaaacgacgaatgttctgccatcttttttatttgtctccctgtttcaacatcccatgccctgagagttttgtctggactagcagatatgatctgggacccatcagtagtccactgaagatccaaaactgcattcttgtgtccttttaagaccataaagttcttacattcaccattgacatgccataagaaaatttctctgtcgtgagaaccagatgcaatcactgttccagctgggttaaacttcattgtgtatatagcactctgatgaccagtcagtaacatgattggtgattccaaactagaagttctttgctttccattttggccaggtgcttgagaagcattatacggaacagcagcccattccattggccttggaccaactacagataaagcactttcactttctgtaggatgaacctgcatcatctttgatctttttggctggtattggacagaagagcaaacaatttactttataagagttccagttcaacacaaaaatgaatgagttagctaattaagcccaaactcccagattgggaaaaaaacacttgtgcctaaatgacttcatcacaaacgcaaccagaagatatat

SEQ ID NO: 19664 - DNA, 5554 bp, Cannabis sativa
gatctgccgccatagggtcttaaggaagacccaatgaggctaaggttgtagtcgaagttctctttgtgttaaccatagtgtttgatcagattaattgacaactcgctctcaataaaatcaataaactgttgacctcaaaatttggccaaccgatagcggagtcatatttaatgctgattcttgccacatgttacataataagaacatagaagtaaataagacacgagattttatagagattcggcccccttagctagccggtaattacctactccccttttggttatattgataccaaagataatactacgcagaccacaattattgtggaattaagtagctctcttaagattacaatgtatgaatcaataggtaaatctctaatgagagagagagagagagaacctttggggcgtgtagaagagaggagaagagagagttagggtttttagacttagagttgagagtgtagggagcttagaggtttaatgacctagggtgttagaattaggctaatgctctttatatagtagagcttacatgcttaatatcccttagaaataggtaaatgaagccattatttacataattaagtaataaaattcaaatgactgaattgtcccttgaaaatagatattttctctatatttttgtgggctttcaatgcccaaaccgttgcttgacttgttgtccacaaatgagagttacacatcaaaacttgtcaggccaaaggctggccgaccatacaattcttgcacattaaggtatggtcggccatgttcctgccagagtctagtaggtcatgttccttccaactttgtcaagagttgaccaggtctttgtatgtgttggctagccttagtaggtgatggctagcctttgtgatggctagccttagttatggccaaccttggtgatggccagtctttataggtggaggccagcctttgtaggtggaggccagcctttgtaggtggaggctagcctttgtacaccttttccttgcagaggttaggcttccttggccgaacagacctttccttagtctgaaagtcaccttttggctgaccagtttgtgcctaagctcggctggccatataagcgcattctggctggcctatatgctccccttggctggcatggtggtacaactccttgacggctcgcttaactcttttcacttgttgcttgacgattttgtcatatcttgtaaggagactttgttctgctattggcaaggttgtatttcatgtgtacttggtcttggcttacgtggacatgccatgtcaggtggttaaaatttcaaataacatgtttggaagttggattttccccattggcatcaaagaatctctgttaaacccttgtagttgtattgggcaagatgacaaattagtctcagttaatccaattacctaaaaagtgaatttgaacaaaatgttgatagagcttccattgtccttagtactctaaaaattcttttgttggcaatttgggcttcaattactagagggttattgtggagaaaatatacgtgcctggcatcctcttcggtaaaagtgataggaaggttcatcattcttgggcactgtactggtgattgtaccaaggcgcacatctccctttcatgatccaactccttcaaatacctcttttaggagtttcgaatgcttcctgcaatgtgcggtcctccaaaaatagtggcaacatgtccatcaatgggtggcagagccaaacctggtggatatgggttccttgaacctggaacaaggaccgttactgcagcatgtgctggcagagcgggtaaagctagaagttgtgttctaggagcttgagggagacctaccccctaagggggatttacaattccttatttttctgaagcaagtagctttctgtgaactaccccctgtttgggacaaattattaggatccgaatccactaacccaggtgttcagcactgactagcgtttcaatttcatctttcaagtgcactcattggcggtgtgtcccacatcaccgtgatattcacactctttacttcgatctcttttgtgtttccctccttgaggcatcctcggaggcttccggtagtcgaccatattgcatgttgctttgaaaacattttctcgagttttaataagacttgtatacttggagtatttaggtttgtattccttccttggtttctttggagccttgctccaattctgattcttcatgcctcttttattttaagaatgactcacatttgattttgaaacttctgcttgttgcttcaattgtttgggggcgataatgcatctactttgtgccgcttcatactcaaagaaatgggtttgcataggtgcgttcccagaggtagcgactccatagacaaccggagagtaatgagttcccaaaagtgtgactactagaactggaacttgtggagtaaaacttggccatgctacaggtggagtcggtgctggagagattctaaaggcttgtaaataagcatcttccaatcgcataattccttatgccttagacatgaattcagatagagtttcgaccatttttctttgcatttcgctccataagaaggggctaactgttagtccagattggagggctacaaattgaatgtcattgctaactttcatcttcgtagctgcttccatcatttgctaaatgaagttctttaggctttcaccttattgttgtttaaggtagttcaaggacccgacctccatagcgtagtctctagcaactataaattgctcttagaaggcgaattgcaactctttccaactgtgaattgattcgggaattagtcccttccactggtccttaacagacttcgtcaatgtcagcgagaaacaaaggcattttgcatcatcacttacttttgccacttgcatcattctgttgtacttgaacaaatgggttctgggagtctgtctggccatcattcagctctatttgtggcattttgaatttttttggcaatgaagccttaatgatccgtttggcatacggttttgggtgttcatattttgagtttatgatggctccactttgcttccgaaccaactttgttagagcgacaatctattctttcaaccttttggtgtcactatccgggagatcacgtatgtgaaccttattatttagatgattttggagatcgttccctcagggtctcaccttctcccttttcaccatttcatacttggcgtgaagacatctctaaaggtctatagtagactagctattttcagaaaaacttcttccaccccattatcctggttaacaaaatcactagcgcaattttttcttcccttaggcttcaatacttttgtaccaagccttttgattggcacaatattgccttgtggagcataagggcatcccagcctggaggcgttggtggccttctgcgtgtgtaagggctggatggctgtgttcacattttcttgggaggcaatagggaaggtttagtttgaagtttgcctacattcgcttttcccttgtcctttataggagctgaggatccaacgtcgacagggtttgccctattttctttgttgacaggttccttcgaaacatcctcttcgaaatcttgttctaggtcaccaagttttgctcggaggcaagccatcattttctccattcaacgagagaactcttcttgacatgccaacttttgttgagtttcagctaacttgtcgaatactcgaatcaggtatcctgttcatagtagtatccatctttgtagtagtcatctttaatttcaccatcatcttcttcttcctcttcctcttcttcctcttcttcagggtttttctcaacagattgttctcgtcgtttgtttgttttagccgttcagccatcagtttcaaacacttctccgtccctcacatggctcgactcagcgtgctttggagagggtggattagcgtcgtccatggagacatcctagcctgagggaagaggtttctcgataacgattttcctagtagccaccattcttataaatgctaggtagctttgtgtctttctacagttctcaatgaaagcaccaaaatatttaccgagatgtttggaaactaaatatttaagagctttaatatgttaaacaaacgactaagtgaatgagaaggagatttttacgtggtttaggtgttactaaaccctagtccatgagtcaatgcatttgcctttaaggctttaaatttattacatatgaagttttacaactttgagaaccctagttcttgctgtagtatttttcctctaggtttctcttaatgaagaagaaagattaaaagagatctctcagtatgtttctatctgtctccctttcatgaaggcataaagggttttatataggcttagattcgagtccaggcatatccgcaacccgctagggtttctgtgcaaaaatgggcctactattgggataaatacattaaatacatgactttgaagctcacaacagaattttggctcgtggggcggaagtgtccgtacaaaggagagcttgtgcgatctagacaggtgtcacacgtgtgtgcagctacagtagacaagaatgtcataggaacatcattggacaaagggatatatatctccttgcgttacacacactactatatcctaacataggggataatatctgatttggttggcccaggcatcagagagcagccacgtcaccctataaggccttttggaagcacctcttgggcttcccgtctagatatacttcattgcctgtcgagaggatgccacttgctccctcttctagaaggccaaatgggctccatctttgcatatttgaaggcttgggccaagcattacgcggatgaaatactcctctaaaatatcacgtgtttctcatctagtatcatggataacaagaataattttcaattcacttaatatatttattggatagtttgaatttttattaagttattttaggttttattttttgtcagtttattcaatttgatttgagtaatttattttcatagggcggtttgtaatttttttaacacccctaattattgtactacatattaaataagttaatttcaaaatgaaaagaaaaagtttagaaatgctgaatactattttcaaaagaaaaaaaacaaaaaagcattctaccctactcaaaaatttgattgggagattttttttttttttttgatatgagcgtttatatattacaatcatgttttacctgagactcgaaccgaggacttccaaaacacacccacccacctatggccacttgagctagcctcaagtgataaaagaatggaattgtgacttaccaaaagtataatttattaacaaaaccaatgtaaacttatatttgtgcattaattaataaactatcttcacagcacatatgagtttcaaaaaataaagaaaagaaaaaagaaatagatattgtaatattgtcttgcgttaagtcgttaagccactcagactagtttagtggtgagagagaatgaaaaaaggagatgtcatacaaaacttttaaactacaagctattaatt

SEQ ID NO: 19665 - DNA, 3081 bp, Cannabis sativa
  modified_base (3035)..(3036): a, c, t, g, unknown or other
aaaacaaatttttatttaaaatatgtaagtcaaataaataagtttttttcttatacatataatacaaaataataaatagctatgatattctggttcaaaaaaaagcagctattatatttttcattaattagaataagtagttaaagtcgagtgtatgcatgttgaatagtcattattctgtattatttttctaacaaaactaacagagatctaattcacccaaaatagaaaaattaaatttattattttctatcaaaccaaccatctaatttttaaaataaataatgaagggtggtttactattatacctgtaattacaacatcagtgagattgattccaaagatgagactgctgaaccttccaccttctgtatcccttcctcgaccatacgatggtaatggttcaatcactggccaatcattctcatcctacatatttacataaaaactccaatatataaatcatgtgtcttgttttaataaattttgagtttcatggcaaaatagcatcttttttggagttataagcacaatttcaatagttgtttgtaaaatggtttgatagctagtcagaaaattcagacaaataatccaaaagtttagacagctcaccaaattaattttcactggaaaaccaattttacaaaaaattattaaaacttggacacaacaccaattaacttcaaaatcaatgtagccgaaatctaatcatgtaatatggcccatattaagattaaatatatcatcacatcgcatataacatggaccccatcaaattgtgattcccacttctcctcctctcaaattacatcgtagctctttttaatgcttctttaattaaacaataaataagagcacatttaaatacaggcggtggatcaaagtgccgtgcttataatggttatattatattattttattcattagtactcaccaattagattggtagatatactaattaataataataacataacattttcatatgacaacatatgattctgttctgtccatcaggtacatctaaaagtaactcttttttattctcctaaatatatgtagtaaatgtggtttgtgtgtaaataaatggtaataataataataattaagttaataacctgtgaagcaagtagaacagcgtccttgtcaagaaaaagagtgaaatggctagtgagattgaagcttccggtcaaccatttcccaggtggaacaaagagtaaagatccaccgtccgatgagtactgactcagataattgattgcagcctgaaacgacaccgtgtttagtgtcgttccatcaccaactcctccaaaatctgtcaatgaagcactgtgtgacctgcaattaatggatgagtactcaagcccctccattgatgagtaccgcacctttgtttgtattcggcttgaaattaccccatttgtgctcagcaaacccaacaaaatcaaagctaaaactaatgccatttcaatcagctgtatctatgtataacatatatattcaacccccaaaatgaagagaaacaagaaaagatgtagttatttggatttactgaaaaatgaagaaaattaaggagtgggtctagagaagaggggatttttgtgaacctgacttgttattgggacagttctcagatgaggtgagagttgggagagaccacactttacaaaagtagagttattggtcttttggtatttttttagcaaagacgtctaataagctatatataatattgagcttgagtagtgtattgattaatttatttaaaaataaattaccatttttctttactccatggttttgcttgactttgaaatcactaatttaattttagaataccttttttgacgtaatggacgtgagtatgaggtaagaatattatgtgggcacatgtagaaaagtacatatatatgatttcaccggtttcatatagctggttataagttttcaactatgcacgtcaaaagttaggctagttttagttttattggttgtgataatctgttctgttgggacagaattggacttgatcactcgacccccatggctcacgtctaacgcatttgtgtttgttttgtttagggaattgttatgggacattttatgactctcgtacgcacaaacattttatctatattgccgacactgtttcaaaataatatccatattcttaagaacctacactataccaattgttatgatttcagtttcagacattaaatcttgcaatataattaaaagaatttggagaaaacttcaatttctaatttatgtttgctaaacaagcctcaaatcaatcttttggatctagtttttgggattaattatttttttcatttatttagttatactagagaaggcgagtagaattcggaacctcgatccttttttaaaaatgagtgaaaattatacctaagatcactactaataaaattttatcaagctgcttgttttatcttggttattatttttctctttttttttttcaacagaaaatgtgcatttgtaacattggggcaaacaagcatgatagtaaaagatgataaatttgcaaaattttaaaattagaaggggataaacaaaaataatcgagggaccaaaaaagtattgtgtaaaaaagatagataaaatgacgacattatcactgcagtactcaagcaaataataattaggtgatctagtttttgaaaagtttgtagaactactgaggtatgctcgaaagcgatggaaacggttaatggagtttcaaatgtgcaaaagcatatcgatatgatgaaactatagatataaatatttaaagtagaaaaaactaagtgctaaaaaagtgctctccacttacctgagcttcatatttattgttaaattaaaaaggcacattaaatggaaggtgtgcacatgattgaaaagattgagggaatgttcaaattatgtgcacatccatataataattataataatttgaaaaggtaaaaaaaagttattcattatcatcaacccagatgtaactcaaaaatataattatatatatatatatnnatctttatatattaaaagtgcctgcatttcttggtttaacagaat

SEQ ID NO: 19666 - DNA, 2596 bp, Cannabis sativa
  modified_base (2526)..(2564): a, c, t, g, unknown or other
gtatcttcgaggaaccctgcatgcaaagacttgttcaagtctatgtatgcatgtatgtgattgggaatctttgaggaattcttcaaagactgaattaaattataaatcaaattgtacttatttatttcaccttgaaaattaagtaattaattgatgaggaagcttcattggcaaattcctcacttggtgatgttcaaggaaccttaatgtctcaatactaatacaacacactaattatacatatattattatatatgtatatataataatataatgtacatatgtggggaatctaatgcatattgaatttcattagtaaaaaaaaaacatatatttatatttatattgacatttttatttatgaaaaacaccaccctagctatacctagtccatgttattctagtaggggtgtttctggaaaattgtgtatacaatcttgactatatatatataaaagaataacatgactacatatgccaaaattcttgttaccatagtccataacacatgaattaattaatttcgtactatattatatatatatttatatatataaatatagaggtgcagctcgaagtttcaagtagatgactggtagtgtgtggtgacaaattaccattcaattttcaatatatatagacagtctaagtttacttttcctctttttgacaagtgattaatgtcaatgattaacaatataattactcattagactaataacacatgatcatacacaataaagtttcctccaaacatataaatcatcatctctatttatatataaatattatatatataaatatgcatgctataataaatagtatagtatatatgaaaacgagatatcactataaaaaaaacagttacctttaataattttttaatctcaacataaatttgttatgaataaatgtaatttttattttaattaataaaaaattacttgtaactaaaacgtaatttttagatacaagttgtaacgttttcgcttcaagcctccattgagcccttacacccagagaataatgactcttatacacgagtacgtcagtactctgtctgcttcatagactgatgactgaccctacaaatcaagacgagtatttccagcgtgctttgtcctcactcgcgcacttcctggaaatacttctcaggaggtcacccatcctgaaattactccaagtcaagcacgcttaactaaaacatgaattgatagatttttaaaatagcttcaaaacataagttaaatcacgtcaattgaatcaatattgagagagttatgaccatcttactgaaggccagcacccaacacccaagttgacatccaacgctcaggttgacatccagctggcgtcaacctgaacactgggtaagtggaaaaacatttgagacttgcatttttgatgtctaagtggtatgtttgacatcacctagtcagattctttgctctggtgatgttattcactagttcttataaatgtttctttttggtgaaatcgagtagactcgaaactccccgattttgttgatatttcatcatgttggaagggtgaaatatcaaagtgtgaatttgacttgtcacaagtcgtagctctcgtttactatgaagaaataatctgatggtcgaaacggaatcaaagtctgataagcaaaacctgattgtccccagtacatgtcaacttgggcgttgggtgctttccggggctcgttttgatacttctaaggcattcgagattgtgaacgaggtctcctaccccattttttttttaccaaaataagaagaatgctcggagtagaatttgcatttgaggagcaaaaacacgtaaaccaggttgcacgtcaacctgtgcgcaaggccctgtgcccatgtcaacctaggcgcgatgagaccgaattttagctcccaaaggatctcgcttgctccctgaaatcacttgtatctttgttatttctaaaaacaaaaaatatgcctggaaaaattttcaaaaaaaatgactgaaaatatcccaagttgacaaaatgtcaacttgggcactgggtccagctttttgccactggttggttccgtttgattcccacaaatacttgtatctcagttatttgtcaaaacagagaatatgactggaatacttataaaaaaaactgattagaagtagccaaagttgacaaattgttaacctgggtgctgggccccaattctggctcccagatgaccctgtccgttccccgtaagcacccaatcttaatcattgatgaaaacggaggatatgaccagaagacttcttctgaattgcttatggaaattgcccaggttgacaaagtgtcaacctgggtgctgggtccctattttggcctccaagttgacccactttttccccaaagtacttgattcttcattttagatggagatgaataaaatcctcgagatacttctttaatactatgattggaagcaccctaggttggtaacatgtcaacttgggcgctagctgcactaggtgcttgttggaaatattttaccaggnnnnnnnnnnnnnnnnnnnnnnnnnnnnnnnnnnnnnnnatatgaattctaaaacaatgaaaagatcggaa

SEQ ID NO: 19667 - DNA, 4795 bp, Cannabis sativa
tgttgcattgaaaaattaatcagaatataatcctctttatagttttcatgacatagcaagaaccacattattaatttgaaaattaatgaccttataaagtaattatgatatgtgggcacttatttgtaatttcttaaccattttattcttttcacattcctattacacttttcatcagtatagtaatagccaatgacaagtccagatgaataatttaaacaaaaacctagacacagaaaatattttctacaagaatgttactaattttaaacaagtaatttcttctaggaaactatgaaagacaaattacttacgtggatgatcattatttatttgaggatgatctgaaatcaaatcagatagtcctttttccccggcttgtgtaatgacctgtttcagccgctctcttgctgccttattggaacaagaaagcgcaatctcaaaatcaggctcagcaagataataaaagagggtgtgggactggtacaatttcaaaacaacacttgtactccaaaaactaatttgcaaataaacagcgaccataaagactttaatccctcagaccaaaacatgctttaacaaactagaatcatcactgtttcaagtaaggaaaagtcttatcaagtttaccctgcagttctaccatgtatctaaaatcatattttcacctttgctatatgcctaaagtggtgcgaatccaactataaggcagtatacagacaacacatctgaattccacaatgagatgttcatttcaaagagaaggcagggaatatactatattagcctagagtaaagttttgagtagctttgtgtgtagttgatgaaagaactcggaacaaaatgtgttactgattatggaaaaaattagattcttttctggagttctattttaggggttatgtcattccttttgtacacaaaatttatagtaataatattgctaatgttcctccatggatcaagaatttcgctttttcgaaaatatcattatcttccaataaaaaggtataaatgaacaaatcagatctcaatctagtaagataatagctacctacagaacccaaatcctattgctatgaaaattgagacaattacacttgataatcccaggaaaaaaaaaggtaatttcgataaaagtgaacgttgctgattctttcttcttatcattttcccacattccaagaaaacataggaaggggaaattaacacatgcagtacatacctccaaattcggttgcccaatatccgaagcataaaacaatcgtagcttgaatttctgaagcctataagattgatcactagctgtccgtacaggtactgcaacaaattgaactcaagccatcaaatttcttcttcgaaaccctagaaacgcatacatgtacacacactaatacaaatatacacattaacaaaagaaaatgcgttaccgtcgatgttgttgaagctgcaaaagggactgagcatttgaacgaagttgacgccattcttaagacaagcttcttcaacgagcggcgtgccgagcaccatcacaacaggagtgatctcgtccaatagcatttggccaagtggcgtgttcgccggatccgccattgtttttttttttttcgatttcaattgcctttattcggaaaaagtgtagccgattctccgttgggattcgatagccaaactgagctactcagtgagtcgaatcggttcgttgcgtgagtcactcgggatttggctccctcagatctccgactacgccaatggcggatggtttggagaggaagagcctgctacgagtcgagagatggtatctctctggattagaggaaatgggctattaacggggctatgtggttctcaatctcatttcgggcttttagtttatgggatttttacctcatgttttttactttttgagaaaattaccactacaagcggaagcggactttcttaaaatatttacagaaatacatttttaatactaaccatataacgaatatgttgtgaataaattagtacacgtgtatcgagagtatcttttttctttttcttttttcaactctctgatttgaaaattctggtgcttactaagttaagtcggcttatgttttgttgcgacaggatgttgagtgtgcggttgggagtgcctcttcgcctatgtggaatcaaatttggaaccttaaggttcctctaaaaacgaagaactttgtgtggagagctgctgcaaattgtctccctactaatcataatttgaggacaaagaaagtagagttgaatgtgctctgtccaacttgcaaaagaaatgttgaaataacaatgcattgcctggtttactgcccttttgcaaagggttgttgggagcgattggggttgaattttctcgtggggtctgaaagcagcttcctcgactggtgcacgagagtttggtccctgttggatgctgcccgtgtggctactgtggtaatggtgtgtgcctccttgtggacattaaggaatgatctggtttggcgtaagaagcaaacgtcaattgaagaaattgttgtcttttaatctctcccttgatcattggttacatgctcaaaataatcctctcattcagtggctgagcatctttacttttgaagacggcgttgagcaccagactaaacctgctgatgattttattaaggtaaatgtggatgcagctatttttcataatcgtgattgtcatagctttgcttgtgtggctataaatagcatttctcttcttttaagtgttatctctagttgttggcttagtgtttttcaatttggtcttgctgaaacaataggcgtgaaggaagctttaagttaaagcaagaggaacaattgggaaaaggtagtagtagaaacgaattgtcttgtgttggttcaagctatctgtaaccctcgtcctttgaactctgtaagagcttatctatgctaaaatctaccagaatccaatctatgagattgcaattcaagactagcaaaagctaactagccttgagaaatgattttatttatatagaggatgagtacaaggcaaaagcaagaattaaagaaaacagaaagcaactgaaagttgttacaaagaaacagtagtaacagttttagctaattaactaactaaacagttagttaaggaacagtagtaactgtatcatcccccctcaagcgaaagggtgttgtacacacatgaagcttgtgcttgaggtaatgaaatcgatctgtggacaggggctttgtgagaatgtctgctgtttggtcacaagaaggaacatatcgaactttaacttgttttgctaagatttgatcacgaatgaagtgaagatcgattttgatgtattttgatcgagcatgaaagaccggatttgcagctaatgaagctgctcctaagttgtcaacccatataattggtggtttagggagatgaactttaagttcactgagaacagagcatagccatcgtaattctgcagctgtgtttgcaagggccctaaattcactttccgtactcgatctagccactacaggttgcttttttgcagaccacgacaccaggtttcccccaaagaaaattgcataaccacccgtggaccgtcggtcatctgggcaactcgcccaatcagcatccgagtatgcttgaagacaaagttgtggtgcaggcctgatgagaagtccctcatgaatcgtccctttaaggtacttgaataaccttttacatgcttcccaatggactgttgttggagcgtgaatgaattgacttaacttattgacaatgaatgcaacatccagccgagttaaggtcaagtattgtaaggctcccaacgtgcttctatacagtgtttgatccataaatggctctccctcagacagagatagtttgtgtgtagagcttgtgggatttggagatggtttagcaccttccatatggagtttgaccagtaaatcagagacatgtttggtctgtgataagtacattccagtggcatttcgagctatttccacccctaaaaaatagtgtaagggtccaagattattgatagagaagacttgattcagttcctcaataagggtgttgatgattatgttgcttggtcctgtgatgattatatcatctacatacacaagaagcacaattaaatccttgtcagagcctcggatacatagagaagtgtctgaacgagatgctgaaaatcctttctgaaataatgatgtggtgcttgctttagaccatataaagctttgtgaagcttggatacatgagttggtttctcagcatcaacaaaggcaggggctgaggcatatacacagtttcttggagtgagccatttaagaatgcattcgagacatccagctggtttattggccaattatttgttacagcaatggtgagtagcaatcgaattgttgctggtttaacaaccggactgaatgtgtctgtgaaatcaatccctggagttagaaggtagccctttgctacaagcctagacttgagcttatttactgaaccatctgaatttaaatccgatgcacccatttgttgtcaaccaaggtcattgatgaatcataaggaaccagggtccatgttccatttttttttagtgctatattcatctttcatggctttaaaccatttaggatcggccagggcttgtttaagagtctttggttcatttggagttagggtttatggactccattcttggatcttgttgtcatgggatgagtatttgtggcttgttgaggaagaggtaactgaccagaggttgggtttatggtgggtgaatttatgtctgatggt

SEQ ID NO: 19668 - DNA, 3678 bp, Cannabis sativa
  modified_base (30)..(31): a, c, t, g, unknown or other
tactccactcattgccaattggttttgagnnggaaccccatgattctcaacagtcttgaatccgagtcacgggtccgtgttcaggtacaggtcccgaatccgagtcctgattcgggtttgggtcccgaccccaggtctgggtccggatccgagtctgcgtctaggtccgggtctaggtctcaggtccgagtctgagcctgagtcttaaccctaatctctctattttgattttgtgtgattttcttgtgtgaatcgtatgtgaatctctaaccctagcaagtgtgaagtttctcaggatttcttgaattagttcgaaccttagaaactgagattgattgttttgttagggttgttattggatcaagagttattggatcaagagttattgggctggtatttgtgtcttaaggctcatggacacatgagtaataaattgcaaaaatactagtttatcgacattaaattagtctaataacacttatgtgattttcttgatatagtattgaaagagtagctaacttttcaacaacttatttattagtatgaaaataaactttgaaatgtgaatcaactatcaagtatatcaataaatttgtaatgaatttcaccaatttctgccgcagaattttgacactattgggatttggcgtatttgtaaagaattcattaaattagatatccttctatgatatcatgattatttacaagtgttatttttttaaaaaagtaatggaactattatcaatactaaccaatttttatgattataaagactaacttaataataataattataaagaaacatgagctcaaaaaattaccaattgaggagaaattaagaatatggttatcatatcacatgtcattggagctcacacaatttttttaaaccaagtaataaaaacaaaattcacaaatattctataagaaaaaaatatatacatttatatgaatcggtcccctactgagatgttgataagtctatggtaccaaagtctcaaaatgatgataacatctaaatgtacgtagttgatgagcacaaagattcacatgtgtccaacatatataacaatttttggaaaaaatgattaaagttaattgaataataataataattaaaaaaaaaagagagagagaaaaaaaaaccttaaaattaaaagaaccaattgaagtagtagaaaatcattattacaacagaggtaactttagtaaataaagaacaagacacatatatatatatatacacataacaacagttacaacacacatattaatgaataatttcatataataaaatattacttttaattttgacaagtatgtgtactaaaattaatataagagacatttttaattatttctcttacattttcaccatatataaatacagtccaaagaatcagttttttgacagtttcagtttggaaaaactcatgcatgattaggtttcagaattatttctctgtcaggatagtgaaaacacaaaattcagtaatggaaattaatgaggattctcaaaaattgctgacattatagtctgtctatatacacatatatatatggtccaaaataataattgtgaccaggtaattgaggtgtagtatttcattggaacaagcatcttcatctcattgagtagtaaattcataaataataataataataataataatatatagggaattgaatgtgaaacagactagtcataaacttaaaagaaaatatttcaatatatagagagttggtcagatcaaaattcagtgctcttatttattcaactcagtttccatagtaaaaaaaaaaaaaagtaacacacaaaaacagtataagaaataaaaaaagtgacattattgtatttttcagaagtacccataattcaaattttttttttttattttaattgtgtaatattatatgacattaaagaagatggacaaaaataggttagaatgatcaattatgaatgattttatcctggctgtttaagggtcctacacacacagtactactactgctataaatgaatgaatgtgacatttatttatttttttatttttattatatgatcataattaattatttatataaaatgaaaacggtcaaatttgatttgttggagtaggatcagatatgtataaaggtaacatcttttgaagtaataaaaacagagcccaagtaaggtatgtttccaatacaagaaataatgataacacagaacagagatgaccccatcagtaggaaacatcacccacttaattgtcacacatttatatattaataataataataatatttgcatttgcagttaggaaagccaaaaaggaaactgttctctcctccatatcttttttgctctattatatattatatatatatgctttgctttgctgtaagaatctcattcattgtcttgtaattttctttctctccttccttattgtatatatacatgtatatgtatcatcataactcataagcatctatctcttttctctctgtccttttatttggtatatatataatatgatatatgtatatgtattacttttgacagagactgatgaagtgaagagggacatgcatgatgtgttcattcatttcaaagtttggttttatatacttggtggtggtggtggtggaagtgatgaatgagattccctaaaaataaatatataaacatattttatttcaaataaataaataaataaaagaaaaatagattctcataataataatgtgggagagagtaaaaagggtgaacttcacatgtagaatatttatatacatatatacaactttaagttgaatacaagaaaaaagattaaaaatgaaaagaacctatttttatttttatctatctatatatgatatatgattttctttttctctctctctacaagtcaaggtacaaaacaaattgcccttaaaagggggtcaagcacaaacacacacgatcccttttgtacaatttattttttctttttaacttttttctttaacgaattgtagtcatcactcatcacaataatgtataataaaatatcatataataaatatatatattatgacatatatacatcatgtgatatgcctttgaaaaagcttttttaaaattaggttttattttgttgggtatgtataggaataaagtaaatatatcaaaatgtgcaatgtgtgaggccatgatcattgtatgtacatatagtaactttggtatatacattatttacattatctttttattatatatgggttctttaatcaactttttgttacttttgatttgccttttggatttgggtggtggttaaaccaaagcatggccaatatggttgggttggattaatgtgaacaataatagagaagaagtatttacaatattgaaaaagagaggtgatgaaaatatgataaagaaagaaagagagagagagagagagaagaatcacactactaagctacttttcatctactctccttcctcatcaaggctctcatgaactttcatgataacttaaaagcaattctttataatagtttcatggccaatatgatatataaatatatggtattaattaaaaccctaataatataatacattaatatataatttatagtatattacttacaattctatatccattaacctaaacaagttataagtagtaatatacaatatta

SEQ ID NO: 19669 - DNA, 3877 bp, Cannabis sativa
tatattattttttatattttttaatttcttttaaaaaatatccataaaataatttttttttttttaaaaaaaaaagctttttttttttttttttatatattatactattattgacatactttgtgtttaataactgagaccgtaagaacaaatatttagagatcaagattcgaactttggtctcccctgttctagaagaccccacctctagtatttttagtccaaaagtattaataaaagagtatttctcatatgtgagtggagagctactatttagcatgttttgtgtatttttcttataaaaacagatgacggaccttttctattgaagcaaaacaataaaatatcatataaaataaagcttagaacttttgtcttgcttgtcctgtactgagcataagttttacatttgagagtccaacaactcagagttgaaaaagaagaatcgcgtgggggctgctggctgtagctgtatgaagttggagacgaccaaaccaaaaccaaaagagtctcaaaggagagacaaaaaagacagaaaataagagaaagaatactagctttcatccaaacaaaacaaatgaaaaaagaaagaaagtaaaaactttccctttccctttctcgtttctcccttttcccttttaaaactttctttttttctaataattttatcaaataacagccaaaacctgatacccaaattctctgttctcttaaatagatccatctctttgtgtttaggttcaccaaagctcgtggggtccataaaaaattttctgggtcgtccttctattccactataattgcttatattctgagatgatcaatttgttttcttctggtgaccaaggtttttcttcaactgtgtaataataggtaggggcttttcattggttggctttggctttggtatttttggctgtgactgtgactgttactgggctaagatgcaatcaagtgggtccgaaaccgccagccctactacccaacggcttcaatccttgtcaattgctgatactagaggaagacataggatacaagctgagcttaagaggctcgagcaagaaactagattcttagaggtcagtgtcttcgattttactacatatatatatacggtttttgttgtgatggtcagaatttcgttaatttctaaaatgttggctgtttgattttgattgtttcatgggaaatctttgttcttttatagactagacatgttgatatttaaaaaccaaaatgtattttcttatatttttatggtacaaattttgattcaagtattaattttttttttttggctaatctttggaggtatgtgtaaagagagacattagctttgtaataataatttttctgggcatctgttcttgcatcttactatttcatttgccgtttaagttttctgttctaatattaaaagctgtaagttagtgttccttggaaaaatacaaccaaaagttacactaaatacctttgaggaatcctgtgcttcttttttgggttttaaagtactgggagatagttttggttttggtcttctaaacacgttgaacttctgctaccacatttcattggacagagtactgtaacattattttgatctgcactctgcagtggatgataacagtttggagtctttggttgtaaatatgtgagtatttccgtacaataggagcaaagattttaaaggacagtttattgttatttagtggcatcatgtcttacagatgtttttgggggttactaagaaaattacttgtcatgttgcttaaaagtgtgctggcctgtgaatttgataatattgacttttgactttcttgaaaggctacttagttttattcatccatctttctgatggcataataatgtactgggaccaaatagtatttttacttcttgactctagtattgaggtgctcttcactatgtagtacacctgtccatgttttgctcttgtcctttttctgtaaatgactttaaatgccctttgtttattttattccttacaaagtctcagtctcagtttttcaggcctggcaatcatttgtcatagattgcccatggtaaactttaaattacactaatacagtttgttaagaggatatattggttagcaaaatctccaagaacataaaataataaaactctgacatctggaagtttgtctcctggatttaccagatagtaatatttatgatcaggagatgctgcttataaatgatggcattttgtggcaatataagtaaacttgataggaacttgctcttatgctcctctgatcatttcttgtttcctacttagcactagtgtagtaattgaatgttgtcttctgtaacatagtgatgttaccaaaaccatacctttgtatttaatatttatgaatctgatcgacgcaggctgaatctcagtggatttagtattaaaaatatgtatttaatatttataagctatactctggttaacttacttggcactgtcaccgaactcccaccgactttggtagaaccattctcatactaagcccttgtgaattttcactgacagggtttagggcctaggggtgatactgaggcagacaatttgtgttattgctttctttttctaacttgttatgggagtgctttatcacatatattgtctctacttcgtactaatctagcatggtgcattttctaaagaatgtttggcactataatttctttcccacatctgtaaagctctttgttactttttaatgcacttgtcctgagttgtggggttattttcctgaaaattttttggcagaccatcttcaataattacagtttcatctcgaaaatactggaaggtttttgttatcatactaaatcagtcctagaattgctgggattttattgttctttccatattaatattgttcctggtatttggcatgtctcctctgtatttctttaacatatcccttttaacttttaaggcacctattcttcattggattgtgttgtagaaattctatctttacaattttttcgtgttcttgttccaaatttttgtctttggttaccttttgaacttgtttcttctagttgcttgctcaataactgctagggaacttatcaaattaacattttgttgtgatgtgaaaaactagaccaaatatatttttgattcaaaactgtatgctattgctaagtgactcctctgtatgtgatacacacaggaagagcttgaacagcttgaaagaatggaaagagcctcagccgcttgcaacgagtaagcgtaaaaccgtgcatgtgcatatttgaattattgaatcgttagtctaaatcttagtttttaccatttcagattttcaaactgaattttctgtgatgatttcagaatgctgagtaatatagaaacaagacctgatccattactcccagtgtaatgctttcttctagtcctatccatgatttcataaatttatcaacataacttcatctgaacatctgcttttatctgcttgacagaacacatggccctcttagtccattatgggatcgatggtttgaaggacctcaagattcaaaaggttgcagatgctggatcctgtgacgattatcgataactacacaaccctcatcatcatttgttaactacagctttgattcacaagcgtttacagttttactgtttgtagtcaaatttctatgaaaaaaaaacttgtgcagatgttagtttacaggatacttcatcatttggcgagcagttaatgaaattgacaccagtttgcagagtgtaacaatttttcaattgaaacgtttcctttgtaatttgcatagtacatatcaatcagatttgaaaatcaaagaaaaataagaggattttaggatgttaacatttaaaaccatctaca

SEQ ID NO: 19670 - DNA, 4312 bp, Cannabis sativa
  modified_base (43)..(52): a, c, t, g, unknown or other
  modified_base (3381)..(3389): a, c, t, g, unknown or other
aagttcatatttagggtgtttatcaacatacttgtgagtagannnnnnnnnntggtaaaataattccaacaatatgctgataattctaatcatgattgaaattttaaacaaataaatagaaattgtcatgatctaagttttcaaaatttaatgcgggaaacttcatcgatctgctatctaaattctcatcgcccttcgacacgagttatgcttgtattacatgatgggggcttaagagcggaggaatgagctccttcccacaaatctttgttagcgaaatatgctagtgatttgagctgaggcaatatgctcttatcactcaacatagtgacgatggaagacatattaggcctatcaactggtttttcttgcacacacaacagaccaatgtggatgcaacgcaatgcttcttccatgttgttgtatggatcatttaacaagcacttttcaataagcttaaatgcactgccttctttcatcagagtccacgcctaataaacattataaatatataaataaaaattccaaagagtcaatgtaatatttaataaagtttgttctatgcacacttaccaatccggtgaggttaagaatgctatcttcgtcgtaaaggcctctacttttctttccacttactctttctaacaccaatgtgccaaagctaaatacatcagattttattgagaatagggcattgaaagcatattctggtaccatatagccactgtatttgcatagcaatgtatattagtatgtaatatatttatattaaagcagctaaaagatttttcaagatgacttactaagttcctacaactttcttagtgtttccttctatttggtctccaccaaaagttctagctaggccaaagtttgaaaattttggggtccatgtcttcataaagtagcacattacttgctttgagatctcgatttataattctcaatcttgaatcacgatgaagatagagaaggcccttagcaattccacatacaattttgtaacgcttaggctattctaaaagtatgctttgcctttcatctacaaatgttggcttctacatatattagaaaaaaattggcaaattgtatatatataaagaacaccacataggttaaaagagtgttaccaaaaatgaaatagtataggcttttgttggacatgtactcataaatcaatagcttcatttctctatgaatgcagtagccaagtatcttgacaagatttcgatgttgaagcttagcaattagcttaatttcatttttgaactcattgactccttgtccagaacacattaatagcctcttcactgcaatttcttgacctccttcaagcgtaccctaatacatgaggatgatgataattacttactaatttcaatattgatttatttccctatctaggtaaatgagagaagcttactttgtaaacaggtacaaaaccaccctctccaagcttattattctctgaaaaattattagtggcaatactaattgtatgtagatcaaaccatggaagctccaagtcatcatcttggctttcgtttctctctgaaaattactagtagttgtaaatatcaaagcctcaaaacaaatgcaaaacaaaactggaaatataaccacagattgaaatttacaaaatggaccataaaactataacaattgttatgtaggggttctcaaaaaggacatgaacttcagacctatggcagcaaagcaaaccatgtgttttttgagtgctttgtaaaaatagcttttatgaccattatggtcacaaaatgatcatagatttacattctgcgatcatgatggttgcatagtgtaaattaaatgagattattttacaaattttagcatttgaaatgattagtttagcaaatttctctcgatatggtgtgttttagatgtaaagtggtaattaattacatatgaatttctattgtcttatttgacaaaatagttagtaattacataagtttagtaattaatgtttaaaataaaaagtttttaataattacactcaagatgaattaaaaaataaaaaatggacagaatgaagtaaagaagagagtgttaccaaaaatgtgtgtcctctgtaaaagccaatcaaaataaatccaccaactaataatccaacgatgatagctataattatgactgctctctttcacgttcaccttacgacgactaccatcagctcttgtttcattatgaatatttggagctgtgaaacaaaagaagcaaacattagtcaaatattgaacaaggaaaaggagatccatataaaatgtactaacaacacatgtgatgcgaacctatttttgaatttggtattcgaatataagtatattgtctttcaccaccgccagaaggacacaaatttcatttgagtaatttgaccctgagaattgatagctataagccatacaagagcaatggcttaagcatttactgtcgcattcgcttggataattaatcttagtcacccaactatatttagtatcaggcactttgaagcctagatatgcatcaaatccttcgtaactaatagaattgttgctggaacttatgtcatcccacatcccttgccgatacaatattctagaggagaattagttagaggatatgtatggtgttattcatcaaactcaatctcataagtgaataagtcccatcccaatttcattcctgtcaacaatgaatcagtaggataatgaaagctttcccacaagtagtttgttgtgtttgcatcttcctcatctctcaaaaccaagtttccattatccaacagctgaaccaatggtttcgcggcttgtttagacgtgtttgtggaccaatggttctgaaaaaaccacaagatttcctctgtcatctatagtcaaggagccagattgtcctacataataaatcagaccttctgatgagttaatatctctcagaacttctgaaagtctaatgttatcaactacaccaaaagttgtcgtagaaacagaagaaagtgccaaaacaactaataaggtaaccagaaaagaaagcaactccatttatgttaataattttctagttcaccactgcaccacaatgcatgttaatatttggtttagtagtttgctctgtattgcacacaggtggaatgcatattagtattaggcttgtttgtagaaaagtcttggtcattgtggaaaaacagcaatcataaaaaaagtagttttgtacaataataaaagtttgagctatattttcattcgaaaaaaagttgagctatattttgtacaaaatgtattttgtaatatttttacatcaacttttactattgtgcttcgatgcataattgtaaatctgcaaaatttaatatgttatttaatgctcacttaataattnnnnnnnnnatataaaataataataataatgtaaagttaaatgtaaaatttaataataataataataataataagagaaatgctaaagggcaccaatggtacctagcactctcctacatgtcaatatcactattatcgtgtctcatatagtttaatgtaataacttttagggagtatcgctagataatcgcaaggcaacatgtctagaagggtgctaggcactattggtgcctactagcaatgctttgataataatacaagtcatttaatatagagaagtatattacttaaaatttaataataaaatattaaaatagaataatggtaaatataaaagcataacatttattgtgatgtaaattttgcatcaaaaatcttgattatgatacaagtcggggatcttctacccacgtgcagggcagtcgtgtgctatattgtgatgtaaatttggatcacttttaattatgtgagatttttgcatcataatttagcaagtcgacttttaacaaagtgaactatattttacatttgcatcacttattgcatctcatctccattagagatgctcttagtaggaatatgcatgtggtagccacattagatcaattcttctgcattaggtcaggtcaaccatcaattttgacatttctaaaaaaggtttattctaaataaaagaaagttttaaacaattaaagtacctagaaaagaaaataactccattattaattttctagtcgatgatggtgcctcaagaagcacaacgggaattaatggtattggtgtaagtagttttcagaaatactttgaaaatcttggtcagtcaatgtggtattgaatactcttttaatccccagtaatacgcaaatccagtgaatcataatgatgtacaccataagttaagagacatgaaaatggaattaatggcatatgga

SEQ ID NO: 19671 - DNA, 3284 bp, Cannabis sativa
tttccactcatcctcaacaggactcgaaatctttactaaagtacgattaattatcatattagcaaataaacagattactaattaaagctggtagaagagtctatccatgatcaagagaaaaaggaacaagtgcatctgttcttgttcatccaggaaagaaagattatatatattattcatcaaaaatttcaatagtgccacgtgaatttcttttgtgttcaagtggcatggagatgaagatatgaggcacatttccaatgggtagccgtcccaactgctaatacgaaaaacatcattcataaaggccaaatggaagtacttaacaaaatcatttcttaaaattatacatttttttactggttttgaaaaatatcacattttttctaacattggcccaatttttttttttctgtggccgactttgtttcagggccgaccctgaatgtaatacatgtcgtcctcgagcagatgagacacaacctaggattgctctcatgatgggcataagctgagcacggggtcgagccgatgctaggcataaacgagttaggtctatgcctaggagccacacttttcagagctcaaaataacaaataaaacgatctcatttattgagatgtatgacacgttagataatggtgtgagttcgagtctcatgacattgacactcattttcaatatggccttaggctcatttattctcaaggtcggcctggcaaagcacactaactaatgtgagcggaagagccaagcttcatccaccaatggcataagaaacacacactgaacacttgtgttcggttataccttgaatcttgctttttggcctgatcatgaagactagagtatccatccaatggttcactccaacagattaatgcttggtgagatcctctcaagtattttgaagaagcatgttcaaggcaaaggcacatgataaccacatcacatcatcaacaagccattaaacaaattgaaaaatattcacaagttatttggagaaatttggttaaatctgattttcaattcaagtgcaactataacaaaaatatagtggataaaaccagtataaaaactgactgttatttactctatcattctttcttagtgtcagaaattagtataatatgagtattggatgatagtgttgtgttgtgctactatacttgcttcgggtagtttttatatggattattaagtggatttaagttgttctgttaattgttatgtgagtttttatgtatatttttcgtaaaaattttaaaaaaaaaattatattgaagtgtaaaaatgaagaactgtttttgcatttccgtataaaaactaacggaacaacctaaatcataactaaaattcacatagcaatccacataaaattaccgcagcaactcaaatcgtaaatttaaaataaatgaaaaaaaatagaatttgaagtaattcttattttagaaatattgataaatacgtgaaaaaaaaaattaccaccaaaatatgatttttgttttctgttttttttttacatttttaagtttttttttttgctaaccagttactagtatcaaattaattattttaaaaattcattttgtaaaaatggttaccagaattaatttttgcattactagtaatatgataccataacatgagatgcttattaaagaaattatcttttccactcatcctcaacaggactcgaaatctttactaaagtacgattaattatcatattagcaaataaacagattactaattaaagctggtagaagagtctatccatgatcaagagaaaaaggaacaagtgcatctgttcttgttcatccaggaaagaaagattatatatattattcatcaaaaatttcaatagtgccacgtgaatttcttttgtgttcaagtggcatggagatgaagatatgaggcacatttccaatgggtagccgtcccaactgctaatacgaaaaacatcattcataaaggccaaatggaagtacttaacaaaatcatttcttaaaattatacatttttttactggttttgaaaaatatcacattttttctaacattggcccaatttttttttttctgtggccgactttgtttcagggccgaccctgaatgtaatacatgtcgtcctcgagcagatgagacacaacctaggattgctctcatgatgggcataagctgagcacggggtcgagccgatgctaggcataaacgagttaggtctatgcctaggagccacacttttcagagctcaaaataacaaataaaacgatctcatttattgagatgtatgacacgttagataatggtgtgagttcgagtctcatgacattgacactcattttcaatatggccttaggctcatttattctcaaggtcggcctggcaaagcacactaactaatgtgagcggaagagccaagcttcatccaccaatggcataagaaacacacactgaacacttgtgttcggttataccttgaatcttgctttttggcctgatcatgaagactagagtatccatccaatggttcactccaacagattaatgcttggtgagatcctctcaagtattttgaagaagcatgttcaaggcaaaggcacatgataaccacatcacatcatcaacaagccattaaacaaattgaaaaatattcacaagttatttggagaaatttggttaaatctgattttcaattcaagtgcaactataacaaaaatatagtggataaaaccagtataaaaactgactgttatttactctatcattctttcttagtgtcagaaattagtataatatgagtattggatgatagtgttgtgttgtgctactatacttgcttcgggtagtttttatatggattattaagtggatttaagttgttctgttaattgttatgtgagtttttatgtatatttttcgtaaaaattttaaaaaaaaaattatattgaagtgtaaaaatgaagaactgtttttgcatttccgtataaaaactaacggaacaacctaaatcataactaaaattcacatagcaatccacataaaattaccgcagcaactcaaatcgtaaatttaaaataaatgaaaaaaaatagaatttgaagtaattcttattttagaaatattgataaatacgtgaaaaaaaaaattaccaccaaaatatgatttttgttttctgttttttttttacatttttaagtttttttttttgctaaccagttactagtatcaaattaattattttaaaaattcattttgtaaaaatggttaccagaattaattttt

SEQ ID NO: 19672 - DNA, 9911 bp, Cannabis sativa
  modified_base (5276)..(5276): a, c, t, g, unknown or other
  modified_base (5643)..(5648): a, c, t, g, unknown or other
aatattatatatttttattattttttttattatagtttatatatatattaacttgagtcacgtatgaattatttactcttcttcttctctttttatgacacagttgtctcctttctcagatctaataatctccaaggtgtttccaagaacatcgcctgaagaagccacattctccatgatgacaaaaggagttcaaatctacctagaagaaacgttagtgacaaaaggggttcaaatttctattaatacattccaaatatatatatatatatatatatacaagaaaactagcacataccctttaaatagttgtgactgacttaaagtatcaccgtgagactttctaagattaacaagaaattttgccaaaagatctctttgcaagtctttctcctcgaaagagtctatgacccataaagataccattgtggcgtggaagcttggggagtttaactcattaatgcattgggcaacttctttctcatctctagcactgtaggaaccaagaatcttgtcaaaatattaactgagaaaatattaaaagaaatatagtattttttttttatttttattacaagtcaacccgccaacccggccaaccgtaactcgccgacctgtgtcctattcgggtccgggttcggtttcatttttttgaacccaaaacccgtgaactcgaaacccgcgaatccaaaatccggtaaacccgcccgatgttcagccctagatatagagcttcctggagaaagttattgatggtcaacttgtccacttccacttttacagcctctgctctcattgggtccaacgatctttacttttggtgaactggtattgcatcctcgttgatggtcaaggcgtggcaaattatgttgcgatcaatccctgtcatgttagaatggctccacaccaacacatcctgatttctcttgactgtatctacgatgcttgctttcattgctggagccaggtttcttcccaccttaatggttttggtggggtctttatcgcagatgttaacttcttccacatcctccaccggctctatgactctttctgtccctacatggggatctaactcatcctaagaagttttcctaggtaggttcaacccccgcatgagttctcattctaggggcaatcggtgcctcctcccggaccatgaaaattttccattaagagatgttgtaataatcccttgcactcctttggtcacctctaattgtcccaatgtgtccattgtcacaagggaacttcatacataaatgggttattaaagttaccactccaaaatccactaagacagggcgtcctagtaatgcattatacaccgtgggggtaagccactaccataaatgtactatacttgtaagcactgccattattttctcctctaagggtgataggtagttgaatcctccccattggcattagggcattcccattaaagccatatagttggataagacaaggtgacaagtactcatcagtgagtttaatcgctaaaaaagcatgtttggacaggatgttcgcggtgctttcgttattcacaaggactttaggcaccctcttattctctatccaagttttaatgaccaaggggtcatgatgaggaaaaaacatatgtttggcatcctcctctgtgaaagtgattggtgggttcattgttcgagaatgttgggtgggtgtttgtgccaacacacacaatctcctttctctgtctaattctctcagaggcctctaaaaatttctagaacttcttgaaaggcgcggtacacccgagatcatcactacatctctgtcaaccagtggtggtgctagccttggggatatgcaggtctcaaagccatcaaagccaccacaatcggagctagtggagtggggagcgccaaaagatatgttttaggaacttgagggtgactcactccatccagaggatttatagtaccatactatccaaaaataatcacgtgtccgtgaatgaccccctgtctgggatatatgatgggaatctagacccattgtcccaaatgttctgctcttatcaatgtttcaatttcatcctttaggaagtcacattcgttcgttgtatgtcccacatctccatggtattcacaatacttctttgggtctctctgaattttccccccttaaggcattctagggggcttcctgtaatgaacaatgttacatgttgccttgtatatgttttcacgagtatccacaagactagattacttggtgtactttggatggtactctttcttggatcccctcgcctcaaacctcttccccctctcttgtttcaggagttactcacttcttgctttggtacccatgcttttgattatacaggtgccacactacatttgttttgtgccgctccgtacccagagaaatgattttgtgtgggcacaggtgcaaactcagaagttccgtagattgtgggagtgtataacattctaggagcagtggcagatgaggtctatgcaggaacagaggttaccggggtttgtgccgaaggctaagcatcctctaagctaatgaagccttgaaccttggccatgaattcagagagggttttagccctcttcctctatatttctccccacaatagggagccagctgcaagcacgaattacaaggaaacaagcttcatatcatcagttactctggttttggcagctacttctatcatttgttggataaaactttttagagtatctcctgcttgttgcttgatattggtgatagatcccatttccaaattatactcgcgggcagacacaaattacttttggaatatagattgtaagtccttctaggagtgaactgatatgggagttatctttctccaccaatcttctacaaatttggtgagggtcaacgagaagcacaaacacttgacatcatcgctaaccctggccacttgcatcatcttgttatacttggctaaatgggtcttgggatctgagtgtctgtcgtacaacttgatttgaggcattttgaagttctccgagagaggagcctccgtgatcctcttgacacaagactctaggtcttcatattctgaatcagtgaaggccccattatgcttttggaccaattttgttaaggtagctatctacttttctaatcgttttgtgttgctatctagaagatttatccacaagccttgttgtttaagtggttttcgaggtcatcatctcgtgacctcatatccttgctcttagctttattgtactttatgtctaaaagccttctgaggtccacaacgaaccaactatcatcggagtacttctcctctgccccattatcctggtttaccaaatcattagggcggtcattccttcctttaggttctggtacttttgtaccagcccctttcggtgccacatgacctttctaggctgaaggacacccaagcccaaagtcattgactgtcttttgcgcctaaaaggccttgttggcctaatttgaatattttttttcgaggaggcttaagggcatgagagttttttgggtcacccacttttgcctttcccttgtcctgtacaggaacagaggtttcgacaccagtggggttctccttggtgttctttctaacacattttgttgaaatatcatcatcagagtttccttcgttaaatctccaaacttactttggaggcggtccaattttttttacatcttttgagaaaatctttcctgatgaaccagcttttgttgagtttcaaacaactccttaaaaactctcgttaccttgggattgtgttcgtaaaggtggccgtgtttgtaaaacccatctttggtgcaaccctcgtcatcttcttcttcctctacatggtcctcagtatctttgtcattgccaacatggtcacgctatatgtttgggtccccctcttgaacgttcatgttggacgtgcccccacgtcccgcactgctcggctgggcgtgctcaggcaagagggggtttacctcctccatgatcgtcttgatgatgccccgaggagtccttttgtgaattattttttgtgtggataccatgatagtaatagtggttttcgtctttcttcggctctcaatgaaagcacaaaaatatttaccgagatttttggaaactaaaatatttaagagctaaagaaatagtaaatgacaaaaattaagagaggaaagttatttacgtggtttaggtgttaaaaagccctagtccgtgagttagtctattagcctcgctgagcaacattaatgaatttacaatattatgcaagaaaccctaactctttttccttaagttcttttctaaaaagaagaagaagacataaaaataattttagcagagtttttgtagtgtgtttttggcttgacccctttgcatgaaaatggagggggtattttaggctaagtgatgggtgtgggtcaccccacgatccacctaggatctctacttaaatcccaatattggggtaaattacatacaatgtagagctaactagttggtcctgtgggtaacattacgctcatgcatgctacagctagataatggggaccattttataccactcggacatgtgtcatgcaaaggttcaacctttaaaagtgacggacacatgtcactctaagcttggtcctttctaagaagtattctataatgtccgtatggtagaaggatggtggcggtgcgcgcattgccatgtctggatgtaggagacaagatcagattttgtcaggaaaagtataactgtccgtttggtgacctggctcatgagaaaagtcgatattcgcaaacacccatgatggtcaatctccgcaataggtttctctggtgagcatgggagccatccgaaacgagcctttctactaggctcttccgggttcgggagaggcatttcctgtcccactcttgggaagcaaatcttgttgcgagaagaaatccctgtatctctttgctctggatgattcttcaactcagggaaatcttttagcgattgtgcgccttttaaaggactttaactcacgaaggatcaattgagtcttttccattaaaaaccacgtgtcatgtattgcataaatacaaataacaatcttaattctccatatatatcttctatccctaccattgatagtattttaaggtgttgatctggggaccatggacccataagtctaagctccaataaactagataatttattgaatctcatcaattaaataatcatgtttattaattctatatttactccactataaatatgaaattgaactcttagtaattatanaattatatttactgagttttactgcaatgaccattgatataatcaattccagtgattagccctccttgtttcgattcgtaattagttttggtcaaattactattttacccttctaattacttctttatcctttagtaccgttaattcactattgaaagtataatttagatccaacctaaatttatggacaactttttagttccaaacttaacacttaaatggaaccaacattcgatctgttaggaaagtcaagattctataattgtagatcatattcgcagccatccgtattattagattcccaaaatagaagttgtaagaatcatattcccttagaaactttaatgagtgaatcaaagaaactaannnnnngaacaagagttcatgattactcaagatttaggtcgatctactattgatcatctttatgatatgaatttggtctttatagtaaacgatatgtttaataaagacaacttaattatatattggtccttgtcatatataatctctattgtatacaacaacttctcttagatgtcatactacatcagtaatctgaatcaagatttcttgcatcaaataatgggtatcagtgaactgtactagcaaccgttgattaaagattctataactttaatatgttgttgactattttattcatagctaagtgatcttaattctctgtacaatacaagccacagtctcatgtatgaatatagaatttttcgatatttatatataaattattcaatattatatatattaataatttaacattcaagcatatatgaaaatattcaactcttatttatatacagaaatatctttacagccttttcagagcataaaccctaactgtcatttcatcttccagataagttaaacactgttgatttgcaatcatgtttgatcgaatggttcttatgagcttctacttaacccacataaattgagatcttccttctcaattccatcttttcgtcgtatttttagagaactagagagctttaacaaactctctacttcttctcttctttgtttatgccctcaatgttttttttagtattcttccattattgccatttttttttctcaaaggtaagagcccaacacaaacaaaaccattgttatcgagagtctttttaaccgattatgcatttttactgattttgagttctctttcatttgtgcttttctttaatcgttaatttaggttataacattagtttaaacttttttgggttttgagattttagggtttatattatgagaaaaactcattaatttatcctcatttctaggtttttatttgtttttttagaaataaagatgtatttagaaaaatgtccttatttgaaccttaaattgaaatgggagcccaaaatttataaggaacttgttcccttatacctaattttacctttactacatgaatctaaatctttatcactaaattagaaattaacgatgagaaaattagagagtcaacaactctcaacactctagcttggacaactaggtcatttacaccagaaatacactcatgattaacatggtaaaaattacagacactaaaagacttagccacttcaaggatcttgaagaaccctgcggccagcttccaaaaatgtaagttaagtctcgtatagtgccgactgagaagagaattgttaccttttgttcaaagaatatactcatatttcttacatgtgtttttaataattccttactctctatttttgaaatacattattattaatcattattaatgtctacattttttggaaaggagaagatagattgattagatagcaaatatttacaattttaaaatataaagtataatgcgtgtttaattaatcatacattgcatatcgaaggattttggtaattaaatatagagtacattttttgcagccaaaaaaacaaaagaatattgtacattttgaggtgttaggttaacgtttataatttgtgaagaggaaccgggacgttgagccacgtcagaatgggtagtctcacacgttggattttacggtaatttcaaagtaaacgatgggtcccacaaaaataggtcctctccctttcatgtgatgtgtgtctttttgggtccttattacgttttacttatttaatgcgctcttctctataatagtagaatacaatagaaacacttttctttatttttttgaaaaagggaatacaaacacttattaatattatacgagatgatatactagtagtcctagagaagatgaggaccctcgtgactcgggctctattattgacatgagtgggcctaaccgtatacaatcaaaccctctacagaaggacacgtgtttcaatagcgtggtccatacgtggaagatagtgattcgacatagttctagcttcgtggtcacatctcacatacatactattatttacttaatatatctactctactctcattacagtcacttatttctctcttcattcttcgccatttcaagatttttttttttcttttgtttctttccttctcaaaactatggaccaacaacaataccatataagtcattttagttctggttttcataactgtaaaatcataatgttacatcacattaattttgttactaatcgtgtacaataataggaataaatgtacaaaattatttagttttcttttgccattattgatatttgattaatataatatgccaaactaaagtaagagagagttttagacatatatacatttttagatttttttatggtgagaaatttaaaaaatatcctattttgagaacatttaataatttgttttaattggacaattgcattgtaataccgtgatcttgaattaaaaaaataattcaatgagtagtgttaaggagactttcttttgcactctctctttatttttacgacaagtgttaattattaaacaatgtttatttttacgtaatatttagtcataatactattattttattacacttatgccattaactaaatcacttcactaatttataaataactttatatttatttttaaaagtgatatattttttttacagttttaaaaggtaactaccgtataatacattgattattataaatttctttaaaaaaaaaaattaaacatggcaaatatactatatatataaaggtatatatataaacattatataggattttttacaccacatatactgaaattttcaacttttttttttttacttttttattgtggagcagaatttttttcaaaaatactaagtaagttttatactatactgtgttaagtttttactgttgttccacagttgtttttttagttatttcacggttgttttaattgttttattttgttgttttacggttgttttataaaaaaaaaatagtatttttgtaaaaaattccgtatgacactaaaattgtaaatttttgcccaaaatccaatatttttgtaaaaatccctataatatacctactcatcatagataatcggaccaaataaaagtcatgctattaattaattctctttgatgaatttgcctaccaagtcaaatgttaaaatcaaatactctaatgctttaaaaaataaaacaaaactaatcgtcctttaaatattacatttagatatataattatctaaattataattaaatattattatagtaataaagtaatataattaaatattaatatttaataataatcataaaaatatttatttagtttgatttttttaagaccatagaaatttgttcttctaattattgtatgttgtaattgaattaaaaatttgtaccattttaaaaatgaaaaaaattatattttttttgatgtaatataattaaaaaaatcaatcaaaaaaatataattataaaaaaagtttaaaaaattaaagggacttaaaaaaaatgaaatgtgacatttttaaaataaatatataattatttatgactaatttagttttggctactaaaaaaatagtgaagtgattagttaaaatgtcataagtgtaataaaatatcaaaagagttttttttaattaatttttaattttttaaaagaaaaattagtgttttaatttattgtgtaattgttttttttaaaaagagtattttttttttacatcaatcaaacattacattaaatgagtgaaacccatgctaaaagttaattccaatctcttacaatacaccatatcttagtggccataaaacctcttttatattcataaaatataacgagacccattttatttttaaatccttacagacagtatatttttttaaatctctataatagacgagtcctatatttgtttaatatcaaacaatatgagtggaaatctaaatatatttttctctagttaaatacaaataaaacaagatatcatccatataatatttaaatttatacggtttaaagaaattgagtttatttataaataatgtcatgagactatgtacataatattaagaaatacacattcactattcttacaactggtttgttaccgttagtagtggtcttgcactgtcctgcatttttagagctcgtttggtacgccgtattataatgtattgtattgtgttggattgtgttgtattgcattgtattgtattgtattagtat

SEQ ID NO: 19673 - DNA, 1825 bp, Cannabis sativa
tgttttttgtgtcaaataatgcaaatgccatctatcaagttgcgggcaaattgaactatcctcctgagtgacagaattgttttctttaaactgctttaggaattccactctatgcatagattctcttcgtgtatgaaatatatgactaactagttaggttgttttgaatgtgaaatgttatgctgaggatattcttgttggtgtcattgtgataggaactacaactatggtgcagctggagatgcattgaaggttaatctgttggagcatcctgaatacatagagcagaatgctacccttgccttccaggctgcaatctggaggtggatgacaccaatcaaaaagtcacagccatctgcccatgatgtttttgttggtaactggaagcccaccaagaatgatactttgtccaaacgaactcctggatttggtgcaacaatgaatcttctttacggagattcaatttgtggcaagggtgacattgatgagatgaacgtcatcatttcccattaccaatactaccttgacctgcttggtgtgagtcgagaacaggctggaccacacgaaatgctaacctgtgctgaacaggaaccctttaacccacccactcctgctgttcctgctcagtcatcctcttaaactctcatctctctatctagttgttagatagcctgttttgtcctaaaaaaaattataggttcaattactctccaaaggtgaaacatcaataagaggtggtctagtgagatgcttccatgctcagacattctctactttcaaagctaaactacccagttaatgtataaggtgttgttcaatttgttgtttctgtgtagatttgatattcatttgtctcaaaacatcccaagggtactgtgtggttggttaatttgatatatgtaataccgttttgctcgtgtattctgttggagttgcagacttgtaaagttgatacataatgtaccctttattggtacgcaattatttatttgcatattttcatacattatttggggtgaattgcttctatacgattagcaaatatagaataagtgggttcaaagttcaatgccatttttctttccaataaaaaaagttcaattccatatcttgtttgagtcacaaaatgtgttctaatataatttttaattgtcggtgaacttggcttggagttgggacatggctttcagtttaaggttagatgttgttttctgtgctttatttagtaatagtatgacgcaagaatcggttcttttttgtcggtctaaagaaacgaaaggcaattgcgttgtctcattctgtagcattgcatgattatttatcgcatagtcattgtttttttccttattatgattgtaactttctcaactattcatttgttgacttggatgactacacgtttattaatcgtttataaacttcattataggatttagggtgcttttggaagtaacactttactaggtattatacactatttaaaatttggataatttgaaatggatgataattacttataaatttttaaattattgattggtaaaatatttataaattatataagaaaataataatttttaatacctaatatttaaaatggaaaggtgttcataaaatactcaatctaattaaatctgtaaaattcaatccaattctatctgttcatgtaaaagtaactcatctaatccaattcacacatatttatatatattttaaaaaattatatacaattaattttttaatgtaaaaaataataattcaaaaatataatacatattatacaaagtgggtaaataccattttggaccttgtgttttgtaaaagt

SEQ ID NO: 19674 - DNA, 2523 bp, Cannabis sativa
ttgtctgtctttatcttaaatggttttaatcggagtagttagtaagtgtgacgtctcgggaaatcggggcgttacaatacagattccatgcaattatgacttgatttttaggggatcactaagcatgatgcgaggggttcaaggggacgttccggatcagggcacccaccgatacgctcatagaggccaaaccaaaatgaaagagatagcatgtatacctacttgagtaggggacatgtatcaattctctttcaaagacgaaggcctatgcgagaatccccaagaagtaggatcaagcattggttcgaatgggtcgaggactcgtttttagagtagattgaccaggatatatgcacatgaaaggaaaatatagagtggggagaatactcatcgccattatcacgatgaacatgagagcatgattaagtcacagagttatcaatcttaaagtttctctgcgacaaggttgattagcaattacgaccaaaggaatgaaaggcgacgcgaccccattctttgtgaacacttaattgtagacagctggacttatgcgaacatatgaatcataatgttccatatcttcgaaatttattaaatcaaaacacagctcatcaacaacaagttgagcagccagtcatggatcctattcaattgagggtaattttgttagagaataagttcacgcgatatcaagatggagaatatgggaaactatcagggtatgattctaatgagcagacataaccttttcatcctgacacactcaattcccaattcccaaagcattttagaatcccaacgtcgcgcaatatgacgaaataaccgacccagttgcacatttgaaaacttcaacactaaaatgtgagcaagtaacgtctccaacaacttgtggtgcatattgatcccaacatccttaactagggcagtgattaggtggtttgataaatttacgaaccattccattacctcatgagagcagctatccaaagagtttaaaaagaaattctaggtcgcaattgtcagaaggccaaaaacatcatcgctaacaaataccaaacaataaccaggagagtcactaaaggcttatatgagtcgttttagcacaacaacatcaaaagtaagaaacttaaatgataacactctaaaaaagtgctccaagaaggtataaccactaagttgtcaagcgcgggaggcgaactatgcaaatgatctacaaggtcacccagtcagattgagtaatgagttcaatgacagggcattaatctttgtgcatgtgaaaagaggaagcatgcaattaaatgaagatggtcaaatggggctcgggagataaacccaactcaagtaccgttactgcaaatactgtaacaatgaaagtgggaaatgcgatccagaatgggtcaaataaaaaaaaaataaaagattaatcaaaagattcatcaaaggataagaagacacaaaagaaacacaagaagcatgttcccatatattctatttatacagaatttaatgagactcatgaaaatatttttctcacaaatgagaatcggatcacttttcgaaggctcgaaccaatgaggaactcaagaagtaagtgagatccaaataaatattaccgattccatagggatattggacatactaccaaagaatgtcgccaattgaaggacgagattgaaggattcatttctcaaggatatctcaagcagtacgtgagaaacaagggaaataaataaaattagcccaacaaccagaatcaaaactagggtgtacaacctccctcaattgagggtgaggacatttcggttaactctggagggccacatcttgctggaactaggaatagtgtccaaattggtatattaatcacgttaaaaatcaagagtcagcttttgcaccagagtccctcaagcgtgcaaaactcgaggaaccaccaataatcttcattgaagaaggtgtagtgcatgtgcagttcccacactcagatcccttggttatcatagttcaactcacaaaaaaaagaataaaaatagttctcgtagacaacgtgagtttgattaacattatttacaaagaaaagctagatggggctagaagatgcaaaattaagaaaatgtatggtgaatttttgtggcttcatgggggacattgttgcaagtctaggaaccattgaactcccacttgctatgggagaacttccattgtcagcaacccaaatgcaagagttcatagtaaaggatatcccttcgctatacaatatattgatgggtcgtctgaagctaacatgattgggggcagtaggctcgataaagcatctgtccttaaaattcctaactcattttggcattggcatagtgaaaggcgaccagctgacagccaaacaatgttatgggttagaattaaagatacaaagggcgaaccaccaactaatggcaattataacagaggaagacgagttatgcgagatgaaacatttggatcttaggatccaagatgaatacaatcaacttgaaccaattgaagagt

SEQ ID NO: 19675 - DNA, 5329 bp, Cannabis sativa
atatataatatttgtcaatggggtgaatcggcagtggtacacatctgaacatgactaataataattataagtttttttttcttaaattatttctttggtctaatttaaagctttttgttcaatcataacagtcaaaaatagagtcatgaccttgtaattcttctttatctaataacatgggaaaagcaaaatatatacaataaagaaaagaaaagaaaagtgaaaagaaaaagaaaaacagagagattgagaaaggaaaaaaaaaaaaaaaagaaagaaagaaatttgcggtgagaaattaaattgcttttctgttaatttatatcttattttaattttatttatttatggcatatatatatatatatgtcctaattaggataatactgaacaaagttatgaaggaaatgaaggaaactacaaatataaatttgtagaaattcatttaaatttaattagggtaaattgcagtataattttcaaaattttcactttgattgtactgaatctccaaaactaaaattttaacggcaaaatccataaaattattgtactattagcaaaaactcacttctgttccccctgacctcattttctccaacgtggctcaattgagtccatgttaggcagattggcgcatgccatgccactaataaattaatgacatggcatataagtaaattaaaacttagttttgttaatctataaactaataaccaattaaattaaagattcaaaataaaaccaaaggaagaataaaaagagaaaaagaatatattagaaactcaaaaccaccaaacctagatcgagaggttctcagtggcagtctgggtttgcaaacgagaaaaaaatatcaagtatcacttttgttgatcaaaatgtaatctacttttaattagtaaaaaactttgaataagctatgccaatctttgctttgagttttgttacatcaaaatgtgtaccaaattagataacaaaaaatataaattagaagccctaaacacttaagtgtttgtgtaaaaggtaagcatcatgtacactaattcaaaatacaacagtatgtgcactacatcacagtattcctcctaagcactatgtcaaaatactgctctaaacgttgcttcagcctatctattagaccttcctgtctcaactgacccagctccatcaccttctgcagtcttcttagccttcctaccattttctttttctctttttctccttctcttgagtgtttccttgattgaattttggattggtggcctgcctcctttgttctttgagccttaaatagaagcaatgagtgttattttattgacagtacctaagttacaaataaataccagatttgctaaaatttgcatttaagaatttgaagttaaaagtatattacataggctggagcaggagcatgtgttgtatcattcttgcaagtccttttttagtgtccaagttgcttgcatttgccacaatgtataattgcaccagtgtaatttggagggggtggctcatcaacacttcttcttctctttttctttagtctgcttggaaaaatatttgcacttagaggaaagattgaattttgacctattttgggccacttatcaggaccttgcacagggtaaaataattttctcataacacttgaaagtatctattttgtaccaagggtgcacataattataagattcatggttgcaaagctagattgaagtaaggcatgtccatatgggatgtctgtcagctgaaatctcctatacatgtgcataactttccatctaaatcgacagtgaaacagattcatctaaaaatagttgcatttgcccttgatacggcacatcgttttgcgacctctgctagcttatctgtaatttttacaatattattgtgtatagtgcctttccattttgatatactctccacttttgttataaaaacaacacataagccaatacttaaaattgtcatgaacaattaaataaaaagtaacaaatcaagcttaaaaaaaaatattcaacagtcaatgagcatgttgattatggttgcaagttttgttatttggaagggagcctatgaattcgaagagtagatacgggaagcttggggtgaatctagaaaattttgtgcggaagactttgtagaatctaaaaggtatttctagataaacttgtactgcatatgaattgtctctctggatatcttgtcattagtctggagatgcacttctagatagcttactgtcaatcttggttattcatctaggcaaaagcgcttgtacgtaactggatagcttgtccgtattaaatcttttggattgtttgtactaaaagtgcgttatcaaagctgacgtggcttattgttactagtaatgagctggaatatttaaagctatgtaaatgtatcacgatgttctcagaacttttttaggcaacaatgcaacatttgcattattaaattcatacacccttcaagttagaaatagaataacaagtccatttggtacctttcgttgtaggctttattacgagccatccaaaaagtggagcataaaatgctagcaaattgagtgaacttaaccttgtcgctcttcgctctatcagtcaagaactctagactaaggatctagttcaccacccccttagagtcattaaagtgcaaggcattccttctaatattccaaggtttattagataaattttattgaaaatacaagtactgtattttaaaaaatagagaggactactaagcgcatgacctatttttaatatctagtcgagtgtataactctatgtccttaaataagactgactcttggttaagacgagcaagacgtgatttttaatgatttttaaaaaatataacacattttttaattgtaaggtaaaattttattttttttttaatattcaagtgacaaaattggataattgcttgtaaatcaaaataataatttcgaagtaacaacattttaaacatgaataagtttgtttataatattttgatttgtataagttagaggcttttcatattttaagttttatttttggttaacaacttatatttttgtggcacactttttgtttattttttttaaaagacaaattgtctaccatatagatataaacttaatagaaatatcactcctactaaaaactttatttgaaaaagaacagaaagctctaacaaaattataaaattttacttaacaaatcgaaaattttaaaaaaaattataaaaaaaatacgttaatactatttattttaagcttttgaacttttttatttacaaaaatatttctttagcaaaaataaaaaactatttttatggttgttttatagttgtagttatttttagttattttatatagtttatttatagttgtggtgaggttaaattttaattatttttttagttatattgttgaaaaaaaagtatatttttgtaattttaaaactttataagcttatttttgtaaaataaaaattttaaatcctaaaattgtaaatataacataaaaaattgtatttttgaaaattctcaatttttatttattgtgaataattaattgtcacaatcaatcatacgtggaaatcatcacacaataagaatcttatgtcaaaaataataaatttcaaattgtgagagttaaaaataaaagagtagcttcaacaaactttagtttctttactttgttcttttccagtttatgtttgcgactaccactaaatccatgtgagaactcaccagattttcaatatccatatataatttttttattatttttcttaaaatttctttctaatttttaatcatttttcttaatttcctttcacattaatggttatgcagtttgattgtgaaaccaaaaacaatattaacttctcacaattttattaaatgacaatttaaagttaaactcactttcacacttccagtttaattttagacataatataataataaaattgaaattttaatttcaatttttaacagtgatttcgttcatgttcaagtcaaataataattttgaatttaattgtattaaaaaattatttaactaaaattaagtgtaaagcattatttcgtttcgtctaataaaatgcatataaaatataaattgttatttaactagatatattagctatttacactaaacaaaggagttaaattaatattttcctataaaacattagggctcaaattaaaattaattaacccaatcacattacacataatggcaaatatatactagaaaagtaaaacaagactttctttacatgtctcaagatcattacaacttaacttctttaattagtaattatttctactcttagttaattaaaaccataacaaagctaaacacacatatagaacttatcatatacattactcactaagacaatatacattaaacatacacatcttgagacacataatgattttattcaagtgctagaaaatgagggcatttaaggttggttggtaagaaatgagaaagaaaagcatgagaagtaaaaaggccaatccccaaggagagccaccagctctatgtatggcactaggctcagaccctggaataggaatactaagctccctacctgaggacaaccaatgaacaacaattaccaaaaccaaaggacaaatcactaacaccctttgaattagctccgaggcggtcgccatgatcgcgtcgtaaacaacataaccaacaattccacacacaagtattgtggctgccattacaaagtaccattgatctgagagtgtgaaattgcttggtgatgatgaatatctttgagctgaaaaatgagccattgggaaagtttggttagtttttggtgagtttgtttttttcaagagttaaaaaataataaatggggctagagaatagagagatatagtacataataatgtcatcttttttttgttctttctctactggagtcatgcaatagagtattgttattaaaaagtagtgtctagcactatttagaggtgacactttataattgattagtgatattttaaaaatagagaaatgctaaaaggcacctgtggtgtctagcaccctcatacgtgtcaatattgctattggtgtaattaagtatcggattccatatagtttaatataataacttttagggagcatcactagccaatcgcaagacgacacgtcttaaaggtgctaggcatcagtggtgcccaatagcaatactcttaaaaaaattatgtaattgatttgttcttactctctagtgcagttatgcaatagggtattattattaggtgttaatgatgcctaatactacctaaaattaatatgaaatcc

SEQ ID NO: 19676 - DNA, 2180 bp, Cannabis sativa
tcacatatattctattaatatttattatatcagttcaaacaatatatatcatttaaagttttcaataaaataaaatatgtatcattaaaaaaaataatattcttccccttcttcataccttaatttattatttttttaaacaatttaattttaatttgatttgttcaaataatatgtattttaaaaattaaccatataaattatatatttataacaaatataattaaaaattatcatttatttagttcaaaataattaaaaaattaagactctacaatcatttttgtgtgtattcagagagtttttttaatagaataattacttgcatattaagagaaaacattaaatgaaaatactaaaatttaaaatttgatacaatttaattattatcaaataaaatacaaccccaagtttgtttcttagttttatataatgccataaagatatatttatttttagtttttgcatccaaattgttttctctccctttttagttatttttgtaaattttagaattttatttttgaatgatttaaagatatttctttgtatttaaatttactataactttgatgtttaaaaaagtaatttagtgttagttgaatttgacgaaaagaatgcaggtgttgtagtggttatgctatgagtatgacacctctccaagcctctgctcaattaacacaaaaactaatttggtgtgtagtcgcttttttttcttaactggtgtttagttgaatttgaggttagtgagttttacctaaaaaatcaaataaaatgaaagagtgtatatatatgcgttgttatatatttgaatgtagtttcgtagctttgacgcgttcgaatccgagtcggagagatcaacgaagaatcgcttccctcccaaacagtagtagcttccacttttgaatctctctctttggaagcatctatgaagtttctctttcaggtaaagcatcttttttttttttctcaacgcgtctctctctttattactgtttcattgctaagaaaattattcaagaaaagtaaacgcaaccgctctctcccttccttctttctttataatcccattcctctcaaaataccaagatgacctttttgaccagaatttcggtcaattcaaccactcttttaagagatttttcaataggttctcattccgtatctgcagaacttcggtgttcacttcataattttatttccaagaggttgtaatctctctcacatattatacgtgcaattcaagaaatagtgaaatacgtacccttttcactttggatagttatactctaagaagtcattttcttgtgtttgtgaattttttttttcggattcggataaaaggttcttacttttttcataagaaaaatcaaaagtagtgttttatcctttgggaacactttgttgagtcactgattagagaatatgttctgaaatttgatttgtacataattccattcgacagaatacaataattttctaactgtttttcaccatttctattttcaagtgctgcagttgggaggtggtcatgactcatttaagagctgataataatgtgcttaaggactattatattccagattacattcttgtgccgggatcggtcattggagattctagacatgttccttgttgcccagtcgttgtgttcataaataccaaaagtggtggtcagctaggaggggaactccttcgtacatatcaaaaacttcttaacaaaaatcaggtacttttattattattattgatttcgattctaattctatgtacaactattggcgcttcagaatcttgaaaagttgtctcaataactatatggatgaattctctcaatagttttaccatgctgctcgttttatttgagcatgcagtatttatcaatacaaactgccttgttttctcagcattaatattctatctgggtcttgccagtatttaaaatatgtttaatctcattcactcaatgctgaattattttcatgttatttgtttgtcaaattttttacaggcaaagaaaaatctgtttaacaaataaataaactaaaaaattaaacaatttttttttaaattaaaaaaaaatcatcttagccacatatcctgttcttatgtttttctataaatatgttttcattaatctatttatgcacatttaatctgctaagaaatttacaaatgta

SEQ ID NO: 19677 - DNA, 3204 bp, Cannabis sativa
caagaccaagtttgtgacaaaaaacatcaaaccgtgaacttgaaataagcttagtaaaaccatctgcaatttgatccgtagcaggaacatgttgaactcgaaccatctgttgtgatattttctctcggacaaagtacaaatccaactcaatgtgcttagtccgagcatggagaaccggattagcagtgaggaggactgtacttaaattgtcacaccatagtgtaggaggttgaagcagtcgtatatgtagctcggtaaacagagagtgtaaccaggtgatttcagagactgcttgagcaacactgcggtattcagcttcagtgctggaccgagaaaccgtgtgttgttttttgcattgccatgcaactaggttcgagccaaaaaagatggaaaaccctaaagtagaacgtcgatcatcgggatcactggcccaatcagcatcgctaaatgctgtgagttcaagttctgtgagaggtttaaatgtcaaaccaagagacatagtaccacttaagtatctcaaaatccttttgactgcattccaatgtgtattgagaggttgtgccatgaattggccaactttgtttacgctatatgaaatttctggacgagtgatagtcaaatattgtaaagccccaactatagaacgatacaatgttggatcagcaactggatcaccttctcgagcagataatttcattccacttgtcattggagtaggcataggtttggctccatccatttgtgctcgagacaatagatctcgaatatatctctcttgagagagatgaagacctgtggaagtagattgaacctcaatgcctaaaaaataatgcagcttcccaagatgtttaagtgaaaattgtgagtgtaggtccttaatcaaggaatcaataagattggggtcactacccgtgatgatgatatcatcaacatacactaagattaaggtgacagaggaggatgtatgtttgatgaaaagactttgatcagattttgaagaaatgaatccaaacaattccagacagtgatgaagtttctcaaaccaagcccgtggggcttgtttgagaccatataatgccttatgaagcttgcaaaccaagtgaggagcttcagcaagttcaaaacccgggggttgagtcatatacacttcctccttcaaatcaccattgaggaaagcgttattgacatccagctgttgtagtgtccagtgatgtgtcaaagcaagagataggacaactcggatggttactggttttacaacagggctgaacgtttctgtaaaatcgaaaccagcttgttggtgaaaccctttggcaacaagccgtgctttgtgtctattgacagtaccatcactgttgagcttttctttgtacacccatttacacccaatggggtgttctcccaggtggtaaaggaacataggaccaagttttattcttcttaagggcagtcatttcatctgacatagcatgacaccatttatcctctttaagggctgctttaacattggatggctcttgggaagctaagaacatcttaggcttgtgaattccagattttgctcgtgtttgcatgctatgtttgttaataacagtgaccggttctgtgactggtgtagggataggctgtgtctgagatagacaaggtggagacagtgtgggagactcaacagtaggtaaagaggcacgagaaataggttgatgtgtgggagaatctgtttcttgtgtgaacacaggcatagagtgaacagcagatgacacagggagaggaacagatgtaggtactggtgtgtctcgaggactttggagacttgtgttttcaacattggatgggacaaaatcggttggagtgggctgagaacactcagtagggaacaaagactccacacgataagtagatgagacaagaggaataacactattagaaagaacatcaggctggcagggtgcattatgattggattcagaggcaaagggaaactttgtctcatcaaagacgacatcacgagagatgtaaagtctcccatttttgtcaaggcacttataacctttatggttgagactatagcctaaaaatgtgcagggggaagatcgaaaatcaagtttgtgcttgttatagggtcggatgttgggataacacagacatccaaagaccttgagactagagtagtcaggttgaagatgaaaaagaaggtctatgggtgactgttggtggagaataggggtgggaagtctattgtgtaaaaacacagcacatctaaaggcttcatcccaaaaatgcaaaggcatagaagcttgagcaagcaagctcaaaccatgttctacaatttgcctatgtttcctctcaattaaaccattttgctcatgagttgttgggcaaggatgtctatggattatgccagcttgttttaaaggttcagaaaaattcctaaactcacccccccaatcagattgaaagactttaattttcttgcccaattgaagttcagtttcagccttaaaggtttgaaaagtcttaagagcctcaaatttgtttttcagcaaataaatccatgtaaaacgactatatgcatcaacaaagctcatgtaatatcgatagccattatgagaaacaacataggaaggtccccacaagtcagaaacaatcaactgtaaaggttcagaataaactgtttgtgaaaattttggaaagggaagtttgtgaatcttgcctaaacaacaggcagaacacacagatgtagatgactcattacatgacttcaaaacagacttaacaaccttacttgagggatgacctaagcggttgtgccatagctgaaactctgattgggatggctgaaaacatgtcttgcaaccagaagcagaattttgagaccctgagatgacagtaaaggcagatttggaattcgacatttgactctctgtgttgggagatagggatagaactttgaattggcctggatcaaaaatatacaggccattgtggagagtcccagtcaagagaatatccctggaaacctggtccttaacataacaaacatcagcatgaaactcaaagaatacattattgtcaagagcaaatttggaaacacttagtaagttcttagtgatctcgggaacatggaggagattatttaaaatcaaaggtttagctggatctttagacataatttgactgtggccagagtgtttaatcgacagacct

SEQ ID NO: 19678 - DNA, 4491 bp, Cannabis sativa
gtttttatggaaaatcttaaaaatataaaaaaaaattctgtaaacgtaaaaaatatatatatatatatttttttttaaaaaaaatggtgccttgtaattatccctataaaaattcaataaataaaagaattttttacataatacactaaaaattaaaaaaaaatacaaaaatatattagtacggaaaaaaatttcatttttatagataaatttttttatttacaaaaatatgttctcccgtaaaaacaataaagtgttcgatattttttgttgttgttttataactgatttatagttattatgatgttgattttcaattattttttacttattttctcatactatttttttttaatgaaaaagtcgttttttgaaattttaaaacttttaaatcttatttttgaaaaattaaatttgtaacactataaataaaaagttttgagggtaaaattatcaataaaatataaaaataatatttctataaaaaaatccctaatattaaaataaaaaaaaagagtgacgttaacgatatttgaatatgtatataagtattttgtgtgaggcgtaatgatattgaagtcatcctcttcataaggagaaataaagtatcaataagttatgatttatgaccattaaataatgatttagacccaatgtattacaaaataaaacataatgatatctccgatattggtcaaacttttttattgttaggattagataaaaaatttggccacaatcgctaaagaggtttagaaagtggaatttttagggtttaggttaaaaatatttgacaaagaaacaaattcagtgtattattatatttgattttccaaaatagaagatataaattgttatttaataaaataaaaaaaccaccaataacttttataaaagtaaactaattatttttattttataagaagattattttcgaataagttagtaaataatttcatctattgaaatgcaacaaaaattatttctgtataataaaagagtataatttagcagtgaaaaaatttaaaggataaatatgtagtgatcctagtttaggtaataaattttttaaatatttaacagaagttttttatatatattttttttgacgtagtgattagaattacttatgaatttacgatgtagatttccacaaatttttatatatatttttttgacgtagtgattagaattacttatgaatttacgatgtagatttccacgaaaattgagaagaaacaatctatttagtgtaaaattgagaaaagataataaagttaagtaaaaaagtttaagataccttggggtgacctctaatgaagccaagtctcgggtgttttttgggggtgtcaaagcaacagagaaagctgaaatattggacattcttcaaatctctgaaggctcatttcctctaagataccttggggttcatttgaggccaactaaatggaaaagagaggattgtgatgtcatccttaaaaagattaaagctcgtttgctaacttgggaaactcgaaacctttcttgtgcggggcggactcgattgattcaatccgttctcttggggctaaggaattattggatgagcatcttcatccttcctcaaagtattattaaggaggttgagaagttgtgtagggacttcttgtggggatttaaaggagataaaagtaagattcatcttgcctcgtgggacacagtttgtcttcccaatgcttatggtgggctcggctttaaggatgggccaaaatggaataaagccattctaggaaaattcatttgggctcttatggaaaaacatgatattctttggatgaaatgggtgaatacaagttaccttaagggagaagatttttgggactatgagctcaagatggatactagttggtattggagaaagctttgccatttgagaatgaagtttggcaaggataaattgttggctgttgggaggaaaggtaaattctctacttctatgctctataatgatcaaattcagcaggtggtgttcccttacaagcaagctatatggaacaaaatgttacttccaaagcataggtttataatgtggcaggttgtgcatagtaacttgctcacaagagacatgttttacaagtttcacgttgctttagagaacataaattgccggtttgttgtgccaatttggagagtcatgaacacttattttttagttgtgagttatctagtgctgtgctgaatgagattttcaggtggatcgtgtttgaagcttgggctaggcataaagtgggatggatgaattggctttcggtcaagacttcaagcaaaacagttcatcttttacaaatgattcttcctgccacagtttactttgtgtggaaaaataggaacaattgtgtacataataacacttgttatatggtgggatacatagtcaaagagattaaagatattgtaaagtatagattgtatagcatgactaggattaaacatgtattagaaggaaatgctttgtataggcgattgatgagttgagaaaggttgtttggttggagccggttggtgaggcttgttttgtattggttgttcttgattatgattaatgaatttcttctttagttaaaaaaaaaaaaattcaaaaaaaataatctcatgagaaagttttggtaattagataaatgctatttagtgtcattaaatttataaaaaaaattgagaaaaaatatttaaaatgttgctcatagttcgaaaagtaatatttttttttcagcctaaattcaggtacaaaatatctattttttgaattacgacacaagaacattttgaacttttctaagttttgtatcaaactagccaccatcaccatctccacaaaatagttagtttggagttaaattgtaaatttggcaatagtttcagtttattctcaataaactgatatgcttgaatgagtatagtagtaatatggagtccaaaaatgtgggaagaaacctcttgggtatttacaatattaaatccaaaaggtctcaacatcatgagccgatccacgtagaggtaaagggatagttgctccaaaaaaaaaaaaattaaaaaaatatatatgtattttaattaattacaacatatatttgtaattaaatgtaataaatataaatataatattaactttgacatgttaagttattttatacagatcaatgatttaagttgttacaaaaatatgttcatttttaatatttagtttaatttttgttcccctcacaaaaaaaatatatatatatcatctcaattttagctctggatcggtaactgccatacatcttgattttttttttgaataaaaatcataagatctattaattaataaattcaatcaaaacaatagaacacacttcagatgaacagttctccaattgaagcacacgacctgtagagaaacaagagtctcttaccaagcaatgagccaacatatatgcagatcgtttcacaaaacacaaatcaacaaaagataaaaccaaaactaaattttgaatatcttgaacaataagaccaaactgtgaaggcataaaaatactaggggtgcacacgagttgggtttttgggcggtcgggttcgggttttcgggcttccgatcttggaaatgcataaccgaacccgattttcaggtgttctggtgcgtcgggtatcgggtcgggtttagtcgggttgggtgtggtcgggtgcgggtcctattgggctgagcccaaatgcttaatttataggctgaaatgaaatttaatttttaaaaatgccattttttttttttatttttaacattgtttggatttttttttttaataatttggataatgagataaatgtatccattaatattgttagtgtatactgaactgtatactgtatgttcctattacatacaaaaaaaaaagagaaataaataaatagagaagtgtaggaagaaaaaaagaatacacacagccacacagtgccacagtacatcggagaagaagaagttttctgacgagtttggacttggatgttagggacttggatgcgaccgcgctggagaagagaagcagtcaccgtccgtccattgccgcccttggagaagaagaagcttgatggtgactcttggtgtactgactatagtgactactgtatctattcataaggaaagctaaagaattcaaataggtattttttttttgaataattaagtctgaaaactaaaagtaaataatattaagtttttaataaaataaaaaaaataatttttaaatgctgctcgggttacgggttaaaacccaaataaaaaaaaaacaattcactatacccgaacccgaaacccgtgtggggtatttttcgagttgaacccgacccgaccacacgagtttttaggttttcggttttttggttggcgggtcggggcgggtggtcgggtttttcgggtttgcgggtgtaaatgttcaaccctaagaaataccgctttgaatcgcttggacacacaccaag

SEQ ID NO: 19679 - DNA, 2055 bp, Cannabis sativa
  modified_base (1997)..(2001): a, c, t, g, unknown or other
  modified_base (2029)..(2030): a, c, t, g, unknown or other
ttgtcatttaacaaaacacagggtccaatcgataacatttgcaaaacacatggtccaaaataatatttacccaatctttaataaaagcatattcttcaaaaataaaataaaacaaaattacttacaaaagttaaacatttatactcttttattactattcaattcactttcttactttattctctctcttctcaccttaataaaaaatacaaaaataaaaatcaaagttatcaaacattctttttcttcaaaagtaaataaacgaaaattgttaccaaacgtttttttttttatatgtttataatattcaaataatttttttaccgagttctttatgagttgtggtctcattcaattcaaccatgatctcattattactaaaatttaggctcaaaagaatattgagtttaattttttcttacacgtgtaaacacattacagaaaagcatagaaattagaaattgattgctgtaaagatatatctatataggacatgcgattgcttttcttttttgtgtgtgtgtgtgttgaatttatacccaacatcattggtttactacaactattattaaagaaagaactttattgttttcaacaagatcaggtgctctctccaaaatataccagacaatatgcaagtaacttgatgggtataaattgattaattgaagcacaaagtcatgatcgtgtgattccattaaggacatatatacaacatcgatatcgatcaattccttttatctttattgaaaggaatgtttgttatcttgggagaaagttccacatataaagtaactaaaacagtattagtagtggctagggatatattggattcattatgaaataatattatatatatttatattttataacatccccaaataagtttttaaataaatatatattttgtatttatgtaacatgcatgcatgtcattataagtttaatgcatgaaagtgtaacatttgtaaaattattattcaataaaatattcgttagggacattattcgtatttcccatcttagatatttcaaataattatttatatagtaaatttaacattattggtaagcttaaattaagaaaaaaaaaatacttttgtctcactgttgggatgttattttgaatttattgaatatggatttcaaaaaaaaaaaaagatgaatatgttttggagaaaaataagttctagctggtagattagcttagaggactctcactctcatcaggtgctttataatagctaaaagctaagaaaaaaaataactaaaagcaatctcattaatgtaacaaaaatagcttatttttaaattttcagctaaaaaataataaaatagtgctacatcaagtgagctaaatatttctttattttagctcaaatactattattcatgctcatatacagataattttttaggtttttgggcttcttcaattttttattctttttttatttttatctcaacactaattttttttttctttcttaatttttttcgtattttaattaataaaaaagtattcaataaataatattgtaaaagaaaatatataaaaaaaaatgatatatgatataatgtaaaagtgtgtacgaaaatagataaaattaagtttcgatgagttattttaaaaaaatagaatagagaactgagcactcacattagatgctttgaatagataatttttaaaatatttaaagagctaaactaaaaatatgctacatctgatgttctaaattctctctattttaaagtttctttaaaatttactattcatgttctaaatttatagaatactatattcattgttctaaacatattttatcaattatttgagatttaaattttactttttatatggggatatatgtaaatattaatattatatatttgaaatgaataaaatatattaaaatttaaaagaaaaaaaaataaaattttagtgatgtattttaaagaagctggtgttgttggaaatattttacgaggatctagannnnntaccaagtatgtttgattaacaccctannatgaattctaaaacaatgaaattaa

SEQ ID NO: 19680 - DNA, 2689 bp, Cannabis sativa
tgattggttagataatgccatatttagtggtatttactttttatgccatatttatcataaccttaataatttttcccatatttttgaaaatagcccatagaaaatctagtcaataacttttacaatatgatctcaaaaataatatttatcctatttttttttttttttttgataaatagccttcaaaaataacacctccatgcaaatcacaaaaagaggtcgaagcctaaaaaaacttcattaatcaagtggcaaaataatattcttaatacacaaagaataatcagagcaccaaacagtattattgttatcaaaaaaaatgaacaacaccaaatattataagtatttcaagttaaacaaaaacactattttgcagaacaccctaaaattatgaatactcaaatataaataataagtatacaaataaaaacaatgaaaaatataaagagacaaagaattaatggttcaatcagagcttagtatgtttagtctatttttgcaaagtttatcatttgatcctatatagattgaaatactcctttggattacataattggtcagacaagatcaattgatcctatataaaaagcaagtgattatttggattacataattggttagttaagaccgttacaacattaattacatttaattaagatagaaaataaataagagaacagtttcgaccgttcttagttaatatctgaacgtatgtgacttttggaagtcgcatattgatggttcactttcatgagtaacatataatcttgtgggttatctggtataactcacatataaggcctttagactatttaaaatctctcaggataatttataaggtaaaacgcttacgactatgtgagtcgtgtattggggcattgatgtactgattgcatagaactcgtgggttcaagatgtgtgtcgtgtacattagtcattcggacctgacgtccataaagatgttgtctttacgtgggacgcaggggacacttggtccttgcatataatcggtcctactctttactatagtgaacatagtgtgcgactagaccttgtctcggtcgcacttactcctaagtttctgtcatgtgaggttatctctactagagttatttattgacacgtcatcctttttcaattggaaactgagtccattatcaaatatacatgagaaggtacttgtatttctagctcaataattcaccctataacaattacatttactattttaggacaaaacaaaaaatctacaatagaaaactcatgtgaagaatataatatatcattaagaataaggtcaaaataagaatcgagcatagaaaaattattgagcttgaggaccacactttgacaatttgtctagcacccactcaaagccaaacaacttgcattgggagacgggctgccgaagtgcaagagcctctacaacttctgggtctaaacatgctagaactctccatgccgcagaagccaataccacacccatatcgtcttgaaccaccattctctagccaactgtgtccgaccctcagtcaagtgtcgaatcagtattaatcttgcaacacccttaaggcggacgaagctaatgaggaacccgaacctccaccggactcaccaaaccaactccacaatcaaccatcacagttgaaactcccctagcatgtttctattttgataagcatccagattatcccacacccaatcaacaatcaaagtcaaactcaacgtgacattttcatgaataatcttatttatacgaaatcacatcctccaccacaaaactatgaatatcttagtcacaacaaaagggggaagagaagcagcacattgttatagaaaactaaaaaaactagtgaccaaaatactaggattcccaatagagaacaatattaagactccaaactaaactccactaattaggacaagtttgatcaatgctcatcccatgtatgttaaggttgactaaggtaagaatccatctagaaaaggctttccaagtaaaaatttaacttttgggggaatattaatactccaaactaaactccaccaacctgtttccttaccaaaagaagaagcatgagccaaacccaattgacgaattgccaaccaataatcactatcaatagagtaaaacctcgacttatcatgaccccaaataagcttgccttcagaaggatcattcgaccagggaaatgagagaatggctaaagcctcagaaggattaaagctagcccgaataagatcctcattcctctcaccatcatctctccgtaaagctgccacaattgcattatcaccaagaacgtgcggcgagacatacacaataacttctggagtaggaatccacttatccaagtagatagtaaaagctatcctatcacccaatcacgcaaagagctccattctccacaaaatattcctccaaacaaaataactcaatttagaagacgaaactggcccaaagaaagtccttcgatgataaagacctttgatcactgtagcacccaaagagtgaggaaagttatataataatcacctgattaaacagatgaagattttgaaagcccatacccccatttttcttgtgccaacacaaccgatcacacgtacaccattgtatttttttcttcacatctgaaccactccactaaaagcgagcacacatcctatgaatatctttagtgaaagt

SEQ ID NO: 19681 - DNA, 7691 bp, Cannabis sativa
aggacggcctagtactgttcggaatagtattccaagaaaaattgttattattgggtggctgatgatgaagtgaaggtaatgggaattgtggggtgttagtaatattgtttgtgaggtcaagaactattcctttggaagggtcattattaatattagggttaagagttctaaaggttgatgatgatgatgaggaggaggaggagttgaaatgagacatcatagggttgtttatgagcatatgatgagtgtagttggaggtagtagtgtggttagagtaaaggttatttggtgatgatgaatctagtaacatataagaagatgccccatggccagcagatgtggttgaagccatggctgttgcacccactgggagtggatggttgtgtgttccttcatatgttgttataagtatggacatgtcttctaagcacctttgcacctgcgtacatataaagattaattaattaataagatatataaataaataatttagtaataatatgcatataaaaagatctgtgacaattaattcaccaagtcatgaactgtgctttaaataatgatgagaaataataatattgtttcttatgatttgaccaagtttctaagatttagaaaagatttggatcctatccttaatatatataataatctattatagtaatttaaagggactaacatatacatataaatatatgatatgatcaatgctattgctagcccaattaattaaataaaaatggaaattcaattaatttaacacaagaacatggaaagtagtgtttggtttcaagcaaaaaaaaacattatgtaagaaaccatggttaattaattagctctcaaaattaagtaattcatgatcgatcttataattaatggtatataatcatgataatccaaacactttccaatcccattaagtacattattaagtatatatatgtatatgagtgtaaatatatgtatattattacctgttttctgactggacatcctggagctacagtgcatcgatagtaagctctggggcaagggtttcctttagctattttttgaccatattttctccactgacaaccatcattcatctaaacaatataaacatatatatatatatatatatattagttaattaaaagtactattaattctttcacatgcataggaaataatttaatttttaagatcaaaacataatattaatataatatttagaagctaataacaataaaaaaactcactgtggcagcttcacatcttgctcttacagaaaccctagcctttctgttaggtgggttaccattggtgacgtggttagttatcccagcaatttggtgttgattattatgatgattatgatcagtactactactagttctttgaagcaacttgttttgcattgccaataacgtgttgttgttgttgctgttattataacttgtaaaaccaccatgatcgagcatatgatcttcttgatccttcttattattatgttctcccttattctgagtagtagtacttgtagtgctcgattgtagcctcagtgacaaccctaattcatgactgtcttcctcaaccgtcgatgccggcgccggcgatggagacttacgtttatttgaaagtagtactgtagtagtagtagtaccactagttttttgttgagtagtctcatgatgtagagaaaggaaagctaatgtatcctatataaatgtagggaaaattatgtatgagtaatcaaaatatgtataaatataaattggaaatttttttgatgagaggatcagttttgctccaataatataggttatatggagaaattattaactattttattttatgatgtgcaagattttagttatatttacaaaaaataaaatttaaatattttaattgtacatacatattttattttacacaggtgcaacaaactattttaaactttatttttttttcaccatatagtattctaatgcatatattatgattacaatatacaacttcatataaaaaaaaaaacattgaggtataattttataaagaaaaaataagatcacacccctgcaacaaaagcaagagtgatgctccatgtatataccttcaataatttaatatataagggtactaatatatatgcgtacctgctttttaatattattagggttgttttgctgaatagaggcgaatttaatttgaagctcgtaataatctttcatcgtcttttcgaccacttttctcagtacaatgttttcttctttcatgcggttcatttccatttgtagcttcgataactgttataaaagagatcagttacatatatctattcaatataaaatgtggctatataacagaattctaaatttattggttgacttttttaaaaatgcataataaatatactctagtactgtgttagaaaccccgaaatgttttggcaaatttcagatcccaaatcaagattttattacttctatatagaaagaattagatatacagtttaaactctaatttggcatagtgaactattagaaaattttgaaaaagttacaataagtctattgtgtgatattaggatacttcaattaggtgcttgctgcaccaatatataacgaaatttggtgcattgcattagacaatataaatatacatatatataatgaactatatttcgaacaagaagtatttatatatatccatatttacataaaatgtatattgtagcagcctatgaaaaaaaaaagttcaatatatccaaagtgatgaaagttggttgatcatgatcataatcaatatatacccaggaattcaaatcttgaaaagtatagtgctaaaccaacaacaaaaaaaaaaaagttgggagtaaattaatattgcagatgacaaatttaatgcttgagcttttaagaggacctaattacagcattcatctgttaaatattccaaacgctagattaaattcctcaaaaaaaagttatatatagtatacatataaaaaagatcagtgctatatattatataaaacgtacgaaactacgaagtttccttaatttgctttagctcaattaagaactcgctagataattattacacatgcaaaaaagaatcaaatacataaatatatttccctacgaaaatatataaataaattaataaatagcttttctttctctttcttgatctacggtggtgatcggttctatatctttttgtagtcacgaatttgcagtaattaaggtcagttcagaggtttgccttatgagacttaatttgatctaattgtcaatttttatgataattaataacatcctatatatttcatatttgcatccatatattgaaaaccgtacatacataattttatgattacttcttctcagaaggagcataattaaattattatgtacgtaaactacaccagaaatatacaattaattggaagcgtatacgtatatattatcctccttaaataaaaaacaaattaagtatatggacatgtatatatacatatgacgtacgtatataaatatatatatgatttcatgtacatgcaccgtgaaactcatgaggtatatatacagaaaaatatacagaacgcaaaagatcagtgagaaattaacgaggatccaggtagaaactaataataagtatttatgtatttatatatgtacacaatcttatgagactttttgtcaattttacgattttgtatatgtataaaaagcctataaataaattatcaaataatctcaaaatactatagttattatataagaaaatataatttgtcatatttaatgatctcgatatataaatagatttacatgcaagaattatggcatagcagaaagacagggaaagatggaaagttttagtagctatagcaaaggagaattatatatatatatatatatatatattataatattatagattaagtgcacatgatacgatgatgatgataataaattggagttaataataaaattacttattaatttacctcttgtggcttcatattattattctgttgcaaggattcaactactgatgcctcatcttctacttcaccagctgcttctttgctattactatgcactagttgcactgtaattggctcatcatcatcatcatcatcatcttcatcatcttcaccattatcatgtaattttgattcttctctttcttccactaattcttcatcatcaccattttcttgagcttttccttcatgatcatcatcaatatcatcttctctagaatcaattttcagtgataaattataatcaatctccataatattgatctctttgtcttttccttttcccatttgaattagaagagatatcacaaattttatcagaatctctcttctcttttaatttctctttttctttctctctctttatgtacttatagcttagaaacgctacttttgaggcaccaaagtcaattccctcgtctcaacgatgcatataaatttagatacacatctattgtctgactttaaatattgtactaatgcacttaattaaataatttgaaacaataataattattagttatttaaacaatcgaaactatatagtaatttaatcgttacaccaatgactttgggcaactatacattattttttatttacatatagattacatatatttaattttagcgtataagactacatgattactcacctttttttattgtaaatgccaatattatcctttgaagtatatgtttatctaaaaaaaaggttatgtcattttggccttttcataaatgtgtatagttgataattaattattcaatagttattaattaagcctttaatgaacgtaaaatttgtatacagagaccggcttaatctattaataaaaataacttttgtgtagttatatcgtatactctaaaattaaataataaaaatcgttaatatatatataattatttagggtttggaaagtcgttttaggttggataaaataataatatttaacatactactgttaattgtaaaaataaaggacataatatatagctgtcatattatcattgatcaatttctagagataagttgaaattcaggtaataaagcgcgttggacttaattaccacaattagcattgtttagtgcaaaggaaaaaagaagaagaaaaacttaattataacagaaaagacaaaattcaatgattgaactaatttaactctcaaattcttcataataaaataattaattcttttataagtactcgttaatatatatccagttggctctagactgcacagacggcaatatatatatatatatatatatatataaatatatacatgagtaggttaatgtttcatcaataacagaatttgtatgaataataatttagtattagagagcggtcactattaatgtatacatatatgtatattatatccatatattagatctcagtattctggtagtgtaagcaaacatatatataaatatgaacatacatctaagttgacttcctaaatgaaacattagtaatattcattattatatgttatattttcagtgtatcattaatctagatatggttgttaaaaagtgagatgtttatgtcattatatgtatgtatatatatagaaatctttccatatctataatatacatataattttagagaggatgtgtttttctttttcttaatttcaatgctagctcgcgtttgaataaattctctaatagcaaattaataaggatttctaattcaaaatcaatcagtaaaagtctgagatataaatgtattaatgtaattctcatatatatattttgtagaatgctactcttctattatatattccatattaatcttttgtgtggatatgttatagctatgtattttcatcaatatattaaattagaaaaaacaaaaggcagtggtgataaatgatttaaaaagcttgaagagaatctgtatttattagttttgatacatatggatatatatagtgatttttaatccaatattataatggtagtttttggtgttgtagtggtaactatatatatgtatcacgtgatgatattattatatatatatatatagaattatatattattgcatctaagtaattaattactgattagttttttttttttaataaactatggatagaattagaatgtaactatatatgtttaagggatacctattttattgtacataattaattttaattttaatttttttaatacattaagaaaagaaaaaaaatgagcataagcaagaggttcaccttgtcctttcattggatcagccacttggagagtgtcataatgattgagcctattatatttcttatttattattatttgaataatgagatttttatgtcttgaaatttattgaaaaatcattagctaataattatttatcagtggattttgttaaatgtttatttgctttggaaacctatgatacttgacatttttttttatgtttggcagttagtggcttagactcttagttgaaatgattgttatagtatttaaattttactgttagtactttatggtacttttggtaatattttttaattaatttttatttttttttatttagtaaattaaaaatattataaaaaatcatgttctataaaattatattttcatttttttaattttttttaattgagaattaaaattttgaaataaagaaaattactttgacaattttttaaacaacttttagttttcataattaatattttggactccgaccccaacttataccttgggacccatacccaaatcccgactaagacccacactccgaactgaaccctgacttggacctcagactctgaacccctaaccctgtgcccaaacccggacccggatatcctagacccgaacttggaccaggaccctgaccctagtcccggtcctgaacccagatccaagcacccaaaccccgacctagacctcagacctcggacaccaactctgaccccgacccgtacctcaaaccccagaccccaaccccaaactctgacctggacttgaacctcaaacccaatctcgaaccctaactccaacctagacctcgaccctaaccctgacccgagatccaaaaatagagtcgaatctccaaactcgatcccggtcctggacccagacccagacccggacccagatttgacccaacttaaataaaattaataaaatgaaaataaaaataaaatttataggacacatttttattttttgttattaatttttttttttttttaaaaaaaagtgtatggttatagagtatattttttttaagaaaaaaaattaaaaacaattgtattactaaatatccccttaatatatatgctatatatatatttacataataaattttgaatgttttacctattaataaatatttatattttctcactataaataataataactaattaataatagttttgatcttaattggccgaattgaacccaaaatatagttgggcaaaagatcttaataatagttgaaatacaaggtcaatgttatatatttttcaatattgacaatcaaatgaattagatatataacaaacagcaaattgcaaagtaggcaatcaattccaccttaaagccttattattatgcttataaaatatatacataagccatgtctctagctatagctaaattataattaattat

SEQ ID NO: 19682 - DNA, 4466 bp, Cannabis sativa
aaaaaaaaaaaaaaacagtttaagttatattagaaaaacagtttagggtaactagtaggtggtaaccagttactctcattggttaccttaaactatttttcccatattttttttagtcttttctttttctttaatttttcccatgaaataacttttgtgaagaaaaaaaagatcatatttttacaaaaaaaaaaaaatttgtcataaaaactataaaataaaaattcctctaataattaacatttattttgattttaatttcttctatatattttgatgtacagatgggatgttagtgctatgaatgggctccctgagtatattttttttgaaagaaccatgagttcattaattagaaaaattgatgggaatcaccgggggattgccctccccttgatacaaaatcgccaaatcgctagagagtctagcatttttagctacaccatcagccacaacattactactacgcttaataaaggaaaaacaacataaactaaacttcttagccaagtttaaagataagtaaaacacactagctactctccaatcaggaagagaatgtgaagacaaggcctgaactgcaacttttgaatctgaaagaacacaaacttccttccacccttcatcataagccctgttcagagcaaggattatggctgagaattcggcttccaaagcagagtctacccgaagtttctgcgcattgacaaaccagcagcctgttgacacattcacactaatagcagctacaccagcattacccttcacccatgatgcatcagtgagaacataattgcagaaaccagctgagaaattgatgttcaccgcttcacataaatctcccagaccctgcctctccacaccatctggacttccagcaatgctattagacggtgcagacattgcgagcctcagttcgtctgccttcttttcgatttttgccaaagtcatttgtacattaacagcttggcccttgatacaaaaagaatttctctgatgccaaatctcagtcatgatgcagccaaaataactaatcaattccttcctatcagcatcccccagtgtttctattaaggctttgaacatgctaatcacattatcagctgggatctcatccaacttcagagccaaacggcagccaaaccaaactgctttcgaaaaactacacttccagagtatatgacaagcattctcttcctcctcaccgcataagttacacgttttatcctgaagaaaatgcaatcgactctttgtggggattgcctcggtcaaagccctccataagaatactgaaatcctgggatgaatacccgcttcccaaatccatttccaaacttcctcctctggtgcaaatctgtccatagttgcagaaatataggcagcacgcacagagaactttcctgctgggttttgcttccaaaagacttgatccttgtgaggaaaaggaattctaggaatattaatgatacgatttcctaattcctctccaaaaatctggaaaataacctcagaattccagtcatttcccaacgaaacatccttcagcgtttgtgttgtgtagccttttcctctcaaactatccattagagctacaaagtctgagtagtccagccaagggatccatggttggttccaaaaattaattgtagaacctgatgcagcaattgacagcgagcctttgagaataatagatctagtatccagaatgcacttccattggtaggaatcattacttttttgcttaacacaccagaaactatcattgttgcaatactttcccatcaaacaagagacccacggtttgtcctcattcgttgcaagactccaagccaattttgctaaaagcgcttggttcatatcttcgcatttcctcaaacccaaacctgtcggaactctttggttgacaaattttatcccacgctttaaaggccatgtatctgctcttgtcgacatttcccagccaccagaacttcctcatcagagagtctaaatcacgacaagtagacagtgggatttttgaagtggacatagcatagatgggcatcgctgaagtcactgactttataagagttaatcgcccagcttgagacagtagcttaaccttccatccttccaatttcttcatcagattctccttgagtcttaaataatcctcccttttccttcttttaaaaataaaagggtttcccaagtgtctttcttccccacttacttgagcaatattcaaagcttttagcaagctatcttttttactgctgcaaaggttactagagaataggacacttgattttggtttgctacaggtttggccggaccatctctcataagttgatatacaatcgattaacgttcttgcttcattgtcatttgctcgagcaaagaggatcgtgtcgtcggcaaacatgatatgtgcaactggaggggcactatgagcgatctttataccatggactgcgcctctttcttcagctcttcgaatgagtttagataaaacctcctgacacagtagaaatagaaagggggacatggggtctccttgtcgtagacctcgctgtgggattatctttttaagagggctgccattcaatagtactgaataggaaacacttgtgacgcaggacatcaagagcttcctacttctcccgtcaaaaccatttgcctcaagaactctgtcaaggaacttccattccatcttatcatacgctttatgcatatcgagttttaccgccataagccctcccttacctttcttgtgccgaatcttgtgaataatctcctgagtgagtatggatgcctctccaatccacctaccaggaataaaggcagattggaaaggggatatcagatcattcatgagtggtctcaatctattagataaaatttttgcaataaccttataggaaaaattgcacaaacttatcggtctaaattggtccatactcatagggaattccacttttggaatgagacaaatgaaggtattattgagtttaggattcatgactcccatagggaagaattcctggactgaggcgactatatttgctcccacaatatcccaatacttcctaaaaaagcaacctgaaaacccgtctggtcccggggccttgaggggatgaagattaaaaactgcttccttgatttctgtatacgaagggatcttaacaaagttatcatttgcattgttgtcaacccttttaatgaacagctcttcaaaaactccatcaatgcttggtctgcccgaagtgaaaagttccttaaaatggtgattgatgacttctgcaacatgttttctgtccttccaaactttaccacaattatccttaatcgcccaaatattatttcttcgttttcttataactgttgcagcatggaaaaaccttgtgttgcgatcacccaaagacagccaagtctccctcgacttctgtctccacatgctctcgagttttgcccaggagacagccatctttgcatgtatagctaactcttcttccttgtaaacttcaggtaactgctggttctggatccaagccaatctcctctccatctttttaatatcactctcatttgcttctctgtgattcttcttccaagcttgtagagcaactttagcattatgaacattacggagtagagaagttgtagcatcatctcccgaatacagccatgttttttcaatttcctgcttacaagagtcttcccatgaccacgcttcatagaatcgaaatggaatgtatccccttgttgcatataagtgtgaatcaaaaataataggggcgtgatctgagatagcaataggcaaatttctgacccctgctgatgcataatccaatatccaatccggggagcataaagcccgatcaagtctctctctaataagtcccccggagaacctattattttgccaagtaaatttatttcctataaactgcagatcaattcctcccgtgctatccatgaaatttctcagccatttggtgtccataggagacacttttctgccacctactttttcctcttgactaccaatacaatttaaatcacctatcaatacccaagggagttgacaagaagagaattccacctccatacttctccaaaaagtctcttttgcatttagataaggagtaccatagattgcaaacaatttccaataaatttgattttgaaaatcccacaccgtggcctcaaaaaatccctcagaataataattgaccaccaaattaatgttactattccacatcagacatgaaccaccagccaacccattagcccctacacacacaattcttgagaaccccaacttccttgacaactcttccatattattttcacttacttttgtttccatcagaaaaacacagtctaccttgtacctacttacccaagctgaaatagcttggggagtcgggtctcttgcgaggccccgacaattccacgagaggcacttcatggggcttgggggg

SEQ ID NO: 19683 - DNA, 3817 bp, Cannabis sativa
atttatagggctataagcttgggagggaagtatttctcttctggttacaattgatataagtagaaagattgcatagtaaatacagaatatactaattgtgggattcaaacagcttgtcatatctctgtgatctgatcccaaagttatagggatttttttgatgactcataatgcgaaagctgaatttgctaagtgttggcgtgctgcgcgaattgctcgctgccctgcttattggacttcgtccgagcgaatgtatgttgtgccatgttcggcatatctcttgcgcgcatatacataaggttgattcaacgtgtcatcatcgtatgatgccacattagagtgcaaaaattaggataacaatttattaagttaatcatattttcattgtacagtgcttagtatgtatattttgttactggttactttttaatttttagtctacatgttctgtatataacaacatatatatatgtacaaaaggtactcttttataattacaacacttttatgtaacaagtatgtgcgtacaactaatatatatatcatgttatcgaaatgtaattataaacatttttgtttattaatgtatatttttaatttaaataaaataatttatgtttttaaaagaaagtttttttttttgttttgtggaatttttatggttaattatttttaaattttaggcgttataacttttatactaatgtaaataagattttacatattaatgattactttttgtatatttattatatatatattaataaaacaccaaaaaaaaaaaaaatcaaatcaaatcaaatcacattattaaatgataataataataataataataatggcaaagaaacaaaaagtttaggttggataatgtatagtataataaacttgtcggtttgaagaaaattattttgtatgagtaatattaatatgactagtaaaatattcacacacatatggatatgctatctcttttcaactaattatatatttattaaaaataaggtatccgattgaatggattataattaaatgttcaggatacaattaattaaggaggtaagggtcacacaattaattaagatccccaatccaaacatcttcttatagctaagcctaaggtaaatttagctaaattgtgggaattggccggaaagtgaaaaagagaacaatttatatcacaatctatttagcaaaatttacagaattcgggttgtcaccatgtgtctagactgattgggcttccatgttataataccttacaaaattacaaggtttccatatggtaaagctaattattttgtttcttataatacaggtatgtgaggcatcaacattcatctccaacaccattaaaaatttattcttggtttatatttataatttttacatgcaaaatctttactcatgattttcatagctagcgtaatatgcaccaaaaaacagaccattaactgtcccaacggtctcattcaatatagggtcaatttccacgacgcttatctcatcgagtatcattaatgtgattgactttagaattatattaattaattaaacattaacaatctcacaaaaagcaaattgtcgattatttgttgctgaaaataaatatgtgtgtcccacaccgttaatttaaatattaattaataaaacaaaaaaaaaataaacaaattctcaaaagaaaaagttaaaatcatctccattatattctcgctcgatcgatacaagaatttaattacaaaggaaaaagaaaaaggttaattaattgattattatccgaagaagatagtggccagcgggcaagtatgttgacctcttatatccaagatatgatgactaaacttatataattatagctaataactttcttaattattagctatacacatataaatatagagattttgactaccaaaaagaagaaaaaatgatcacatgtgggcggtctcgtgtaattttaccatgggcatgcaccgtcagtttcagatatactgagaagctcttctaagtagtccgctcctaaatcctccaacaccaccacattctcctcaaacgacgtcgtttcgttataaacgacacaattattattagtagtaataatcttgttttgtttgtgaataatctgcttattagtcttcttagaagtttttctcttgagagaatgcctctttttcagagccaacaccggagaacaaccttcttcgtttctatacttcatatccctaagtgactggcacaccttctccgccggaaaattgagaacagccagcgatcctcgcattgcgaatgcagcttggtcgtaagccaaggcggcagcctcagccgtgtcgaaggtcccaagccaaaccctgacgccgtttctcgtcgagtctcttatctccgccgcgtattttccccacggtcgcttcctcactcctcggtaagagatctcttcttgatataatagtacttcctggtctgatgatttcgatgaatttacctcttcgtgatcgagtttgttattggaggccgtagtagtactagtcgtagttgtggttgtgctcgataaatttgattcggccaaaacgccgtagagaagcatttcttctgtgtcgttttcgttgaaaggaaggggaacttggttgtcgttcatcatcaacaagctgtcccatgacatagattcaagattagatgagtataagttgaagctagaataatcacactctgaatttggatatgggacgaacgaggtggaataatatggatccatgtacaaatagtgtactatgtatagttttgaagttgtagataaatatatgtaatgtttttattttatttttttttggataattggttggttgagtggttgtgtttttggtcatatgagataataacttaaatgtcttcgagaatcgagatatatatagtacatactatagagaggtgtaatagctagagaggctaaccccacacatgattttataacactgaaaaatatgataacattttaatataaacggagagagagagttggaaacaaatttgggtcgttaatgggtttttatgggcccaggggaccaaactcatagattgttggcacgtgagtcaaaaaaagagaaagtcgttcgtgggtataggcggccaggtctacatgaaaattgaaattcaaactcgtgacatcagcgtgatgacgtaaaataatttttataaatttaaaaaatcctaatcctataatagagctaaataataacaatttaatgataaaatataggacagtgcctgatccacttggtgttggtggccgtgttcactacttacttcttacttacactgctgttgtgtctcgtctttgtcgcaaaacgtcaccgtctcggccgtctctatgtggacccatttggcaggagagaatagaagattagcaatagcaactagaagaaagaaggggatattaggaatataatgggaatagaagaagctgcaaatttatataataattaataattttattttatgattaaaagaaaaatatttattcatgattcttcctaaggaccaattgtttgtcggtatctttaatacatacatagccctatattgcattctattttatttagttgtaagccaataattttgatgtgaggtatttatcgtttgtgatatataatgtccataagagcatcaacaatggtgcaatttttattattgtttaagtaaactctgctacaatttcttcacaaatctctccaccttaccgttatatctttcgaagtcaataccaatagttgatcttaggtctatggaatgatttatcactttgtatatttttgattgcttatat

SEQ ID NO: 19684 - DNA, 3755 bp, Cannabis sativa
agagagaagctcctatattactagctagctaaaatgaaattaattagacatgattaagatacacacacaacattatttccaaatttatgtatatcaacagataagtaaagattctttcaccaaataatatctatattctctttttactttgttttaataattatatatatgaattgctagctgtaaatgcctggtttgatattacacttatttgcatttataactaggaaaattcaacattttctaagctcaccaatatcaatttaaataacatttttctgtcaatagttaatgaatggttttttattttattatcattatttaatgttattcaatcaaattgacaaactaagccacaaataaaaacaataattattttattccacatctaaggagcgtataaactacgaatggttataattctataaatcaattgaaacaatttaaggtattaatatatttttgtatttattgattaatactcttaaatcgtttgtattctgtcaatgcttgctatatatataaatatatataatagtgagcatatagcatgcatatatatacataccaaaaattgtttccgatatttatcatcaatggctggcgcaatagggattcttcccatcattgtggctattataattttcagtattattccatcagaaatcgaagcaagaactaaattgtacacaactgcagtagtccatgatcaccatgaaaacccaactaatactatttcacctttccaagatgatttctgtaaatcaacggtggagtcaaaaggctactcatgccaacaacatcaagtaattataagtccataatacatatatatatatatatatttatatattgtgttaattaaatcatatagataaggataattttaataatttattcttgatatggtttttgtaggtaaccacagaggatggttacattcttggattgcaaaggataccagttgggagatctgggaagcaggctgataaaccacctgttttgctgcaacatggaattttcagcgtaataaatttttgttttttattttttgtgacaaaaatatatttatgtttagtaccaaaatcatgaaaaactatatgtatacatatgttgttttatatataggatggtgtgacatgggtaaggaattccccagaagagtcattggcgttcatattggctgacaatggatatgatgtgtggttggctaatagtcgaggcacagtttatagccgtggccatcagtcgcttactcctaatgatcctgtacgtactcatcacttctttatttttatttttttttgtgtgccatataaataaatatatacatataatttttatgagtcatttattttccttttacaaacaaattaggattattggaactggtcatgggatgaattggctgcttatgaccttcctgcctttatccaatatgtacacgatcagacaggcgagaatatacactacgttggacattctttggtatcgttctaatttcatcatcactagttaaataaaaataaaaataatgtataattgtaatgctgtaattataattaaatatgtgcgttttttagggaactttgatggcttttgctgccttatctgaagacgacaatgtgtcgagcaagctgagatcagccgctttactcagtccaattgcttatcttaatcaaatccgttcactcctcaccaaagctgcagcttatctctttttaggcgatgtaatactttaccgtatttatcttttatttaaatttactatatctctcctgatcttttcttttattctttctttctgattgtagcaactttattggttgggtctccatgagtttatcccaaaaaggtatgaaaatttattagcttgtttttctatttttcaaaattacatatatattcattgtactctttaaacaaattataaaagttacatatttccaaataagtacattgactagtaataaattcaatatcatttttttttctttgtatatatatcattttttctttcttgttaaacatttgtatatctatatcttgatcaagaatgacaatgattttgttttgaatctctttacactacagccaagaagtttccaaacttttgggaaacatttgtagtaaaccaggcattaattgctcagacatattggctgctttcacaggttaattttccaataacttttcacccgattaaaattcatatctgccttatttataaatttaatatgactatataataattttttttaatgttacagttaaatttaaatttattatatatatccttctttatattttatattatattaaatgtgtctatataatatatagtattttttctaaaatattacaattcaaatctaaacttattatacatatttaaaaaatatatttatattatttattttaaacccaattcacatattatttttttaaaaaaatttctattattgttttctttttaaacaataaaaaaatatttatatttgttaaagaattaatctcattagctattgtagttaccaagaagaaatatctattatttcttttttaaagagaaaaacagtatgatatttaaaaaaaataaaaagtattataaaattaaaattagtacaattaaactaaaattataattaataataaatttttatgttttttattttattttataaatagtacttaaattaaatatttttaatataaaaaatgttgtttattaaataatattaaaaaactaattatacagttaaaaatatatataaaccaataaaaaattattttatacaactaagtacatatgagaaattcatgtgtaactttttatttatatttaataaaataataaaatattatttaaatataataaaataataaaataaaaataaaacaaatctcattaatatttgaactgatatttgttgtgaattttctgcgccagttaaaaacaaatccctaattgaaaaaataatcatcactataattattaattattatttaattaataattatataataatttaaaaacaaatccctaattgaaaaaataataattaattttgtaggaatacttttaactttgttatttatcatatagatagtatatgatcaattgagttgcttaagggggagaacccatgcttcctaaaaaaaatacaaaaatttcacgtcaaggataactactatatgagtatgtatatattaagattaacgtactttttattattaataacaatgtacatatcataaatttatagatacaattatgttttacttataaaatatactgacacacaatttacaatactactatttaatatacctaaaaataatttcaaataataattaataatatgttttttttaattatttattgtattgtttttaaataaagtagaaaacacagcataaaactaagtatacgtgcctcgcacgtaatatctaactagtagatatatatactagtaaacatccagcgcttcgcgacggatatataaaatattttaaattatatataaaaaaaaattgtgtattttaattaataataattacttagtaaaattatattaaaaattttattttactattaaaaaatttgtgacataaatacttaaaatatttttaatttattgctaataaatatcgaaattcaaaaaatagtagcataaatcttcattaatggtttaatttttatcctgatgtgtgtgttaaattctgggtttgaattttattgtatgtgtttttaa

SEQ ID NO: 19685 - DNA, 7327 bp, Cannabis sativa
  modified_base (6148)..(6162): a, c, t, g, unknown or other
  modified_base (6312)..(6314): a, c, t, g, unknown or other
  modified_base (7295)..(7302): a, c, t, g, unknown or other
attgaatgggttagaatagtcccaaatgaggacttaactttgccaatagacaataaatttctactagctctagtcaagaatgtcccatctaaaccttcaaaatccgaaacatgggaaagatcaagaggcttggtaaggtgtttcaaaagcttcccttcggttttcgagctgtgtttatctaaccaaagatgcaaatttgcatcaacaaaccaaacattcaaagcgttcgttacattaaacccgaaagtatgaatctttccatctaaaatctcacctagaaatggagtaatttcaatctcatatgaaggaagattgaatgaaccaattcctgaaattggtctccaaaatatagggttgattccacctgtgtaaattacagtaaaaggccatatagcaccaacaatcatagtaccatcaagactaaccaaaatctccctaaaaggaccatttccaggagtatcactaagcccattctcagcaatgtaatcattaggaagatttgaataccaaaactcatcattttcatgaaatgaaacataaacttcaagcacagctctataagtattctgaggaattttaaactctttcaactgagtatccatagaattcttgatttcaaaccataacccatcattcaatggtgaatttctcgaaatgggcaagatcaaatctgcccaattatgatgcccaggaactaaagtttcaatctttatatcattaacatcatcataaagatcagattttttttcaacaggataaaaatgtatactcaaattcacatgataaataccagtataagtattatccacaacatttccaagaaaaacagtaagtgtttgattagtcatgagaagagaataatacctagtaatatctttctcaacactccaaaaaatcccagaagaagttggctcagctgtacaactcctcaaaagctcaaccccaccaagccaaaccccaaaaatcctatcaaattgtcttcctttacaagtagctttccactcaagaacaattttcccaaaatcattatatgggcaattcaaaggtgggttgtaatcaactaaaagtggaggctttccataagtgaagccaaaatcatgacttaagagcaatttagagcaaggttttgaagtgggcaaatcaatgggtttggttacttcaaagaattgagttggggaagtgtttttttcttcttggaagtgtgagatttgggaattgaggtgagatttgagatgggttattttgtgtatgttggctgaggaaaaatggggttggtgaagaagaagggagatactgatgaggagaaagaagaaggtgaatgaggaagccattaatggagattttttgttgaaggaaatgaaaaagattgaagtggtgagaattgataatagttgtaaagaagttgaatttggtaagggaaatgatgatgcttttaagtaaagaagaattgatgagtttagaagaagttgacataataagattttactataattaaacattattattatgcttattattagtggtgtttaaggtttgactttgagtattgatactatgaataaatttttatgaacgaaaagagagaaacaccaaatttatatatgtaagtcctaaaatatcaatgggatttttgaaaattaattttgaatttaaatttaaattctaattagatattttttgaattgatttataatgataaatatcaattaataagaatttataatttaaattttatataaaaatatcataggaattatacaaaatatttaaacttgttattattagtggtgttttttttttttttgaaacggaaatcttaatattagtggtgtttaaagtttgagtattaatactataaataattttttataaacgaaaagagagaaacaccaaacatatttctaagtcctaaaatatcaataggatttttaaaattaattttgattaaaaaatttattttcttttttttttttcatctttatagttccgttatttataatttataatgataaatatcaattaataagaagttataatttaaattttatataaaaatatctattatcataaatatcataaaaattatacaaaatatttaaattaaaataattacaaaaatacaaaaaattttaattgcaaatagtatttaatgtacaaaattgtttaaaatatgttttttttttaatctatatattaactaaaaaatttatgattttaatacaaattagatattgatttatatatttaattataaataatttttataaattaaaaataatgaaaaagaccctctaacaattgaaatggtaaagaataactttgttgtctattgttaataattaattttttaaattatctaaaatttagtttaagctcaattaaaaaaatatatatttacacttaatcttttttatcattttaataaacaaaggtcattttttataatttctaaaaacaaaaggaccaaattataatttagttaaaataaatgtgatctttttttacaaaagatattatttattttaaaatgagatgattattattaaaatgagaatataatctaaagatgaaaaaaggaaaggaaattcagatgaattatggaactaataatgcaatattatattatttctaaattacattttatgtatgtagcattatgtaaacttgtaaagaattgtatcaaactatgtagcttttacattcaaagaagggttcgattcaaaaccgaaatttgaccagaatcaccattcaacaagaaaacctccaaaggcacatatggagaagaggctatagatgacccgaaccggtatgtcggttggagtattttgctccctttagcacaccgaattgttcggagtcgcggtcccgttctcatctgccaaatctgcacaatatcgccaatgaacttacacatgttttgcaagaaaaacaacattaaatcgaaataacaagaacccacaatttactcgaataaagaacgaaagtagggtcagtcctgaaatttagtggtcgtaaagcccttattctaaaaaaaaatgtagtattttctcatttttttcgcccctgaactaagtgggccctaaccacaggcctagcctgtcaagcctgatgatgagataagctctagatgcatacctcgattattccttttcgaggggcatgaatagccagacagaggcaataatcactcttcacaggttcatcataatagctagaactagaagctacattgttatctttattgactagcatttccatgaataggcaactcgcatcgcgatatccctgcaaaacagcttaagttcgttataaggataatataaggtgcgggctgaactatgatcagtgtcgaaatgttaagggcgaaccttccatagccgcacgaccacaagtgcctgagtgtctaaaagcaaaatacgaccgagcgaatctgttattgcagctaatgtgccactaggtgataaggtgagtttctcgccctttctagggaaatcctttaaagatgtcaatggagaagctgatgcaagacaaacaagaggattagaatttatcagagtttctctactatggccttgaagttatgttcattacgaaaaaggggaccgaaaaaatcaagttgaatatgtagatgactaaagaatataaatagatatgtgcgccttgacatgaaatcatactgcataaacaattataaacaaagtaatcataaagtaactagtctacatgagaaccgaaaagaacacacaaacgacagttcttacctcgagcaaaaggttgaggcttcacatttgattttctaggcgctttttgttcgctgcgccaaatcattttagagaaggaggatatggtagaaaatgttaccggaacgactttagataagatagctccaaccaacgacctacttttatcctccgataacctaattagaacgaagtaactctagtcaattacatatagaagaaaccaaaactcaaaagaagcaactttgaactgtatagaacatactaacctgaaggctgagatgacagcatcgtctccaacggttactgcacagaaataacgctgacttgactgcccaacaataaaagtagctgaattcaaaaccaaaatacttcagaaaattttcgattttgtgaagagcaaagataaatgtttgaaagaacgaaaagggcacgatatttaacatgaaaatatactataattggtgcataaaaatgaagcagctagtgcagccgcacctgtagctccatcagcggtggaggcattatcccgcttatcgctgcatctgcacaacttccatacttgctgacattccatagctggtaagataatcgtccataagaatttccaaactcgtcattatcttgatttcttggttttctatcccaaaaccgagaatttgtatcgtgatgccattgctgcagcatgttctatattccaaacattgaaatcatggtgtaattagtaggattaacttaatagatttatattcaaatatgacacatcaaagtaattaaagcttggtagtaattcaatacctgaatttcggagccatcaaaacgagcaattactccttgcataacaacacaaacctcctctgaggaagtttcttggatcaaatctctctttgttccacggactctcaattttaaaacgcgtccaggatgtataaactgcgtgatcagtagagtataagtctaatactaataaaagagacgagctaattacaattcaaaatactactaaatcaagatttaaaccatggtaactcaatagtgcatgttcatgccaacaaaacagagccaaaattgttcactttgataaatatatatagaaatggtataaacaatcaatcaaacaatactaagaattaggaaaaattctttcaaaccaaaaattaatcacttacatggaaattaatcagttatacagggaataagatatgtcaacttcatttgttcacagaggaaaaaaaaacaccattgtccaattttaggaaacattttcaagggaactaacagtttctctcttatcattttgtttttctcatatgaatagtataacaccaatgtttaataattcaaacagatcagagccaaatctataatgaaattcaggagaaagaaaagggctaactaggatttttactcccccgaacttaactttaacacgtaccatatcatgccattggagctttcgaagccattaaaaatttctccagaattattgaaattgttagattcaacgaattttgtccaattttactaatagaagtctaacgtgcatgaaagttcaagaaacacaatttgatatatgtaaaagcttggagagcaagaattggtagatatcgaagctcgcgacacaattcattaccagagttagtaaaattgaacaaaattgaaaaaaaattctcgaatttaacaatctaaatagttcgagtaaatttttaacaacttttgggagcataatttggtatgataaaaatcttaattagcaaaaaaaaaaaaaaaatagaactttttcaaaactaagacataataaaaaaaacacatttccaatctctacaatgacataaattcacagtaaaattaaagaaactaagatcaaaattctttaaagattgataatttccacacaaacccaataaataattccatataatcaaaataatcaacctgtttatgaatcaagtgaccatcgagagagaaaagcagaaggtacccacaagaagtcccgatcgcaatcacccgaatttcatcgaataccaaccattcgatggcggagatgtactcagcttcaatgggtgataattcaggacggatcttgactttggagtcatctgaatcggaccagccgagagtgacgattagggatcggttagcaagagcaatggcgtgtgtgtcgagagcacataagagattggggttatcgataagccaaccctcttttccggcaccaagttcaccgaggtcttgacaagctatggagcctaaatcggtggtgtgggttcgcttcgccattgttgggtatcggaatgaagcttcactcacgccattctcttcttcccacttttttctctttaatattaaaattttatgttataatataattttttttttacactttattttatttatttattattatnnnnnnnnnnnnnnntattattattattttgtatttttacgaaatttcaaataaaaattcctatggtaaaacaaataacttaaatcacaactaaaattcatataataactcacgtgaaaactcaactcgaaacaacttaaactgtaaatttaaaaaaaaaattannnaataatatataaaataatttttctaaaaaatagtcacaaataatgttttattatattatttattaaaatatatcaaatgagaatcataatcattattttatttattacatataaaaataggggagaatttcactattttcttttcaaaaatttaataaataattgtataagaattaatatcatacgattaattattcttttaagtaaatatgcaatgagattcgatacttaattaagagtgttaacatgtcttttaacatttttcttaattttatatgatagatagttttattttaaatgtaagatagtgatgggtcagaatttttaacatcacactagcatcactcgatacatgaaaaaaaaatataatattgaatacgacacgttgtaatactagtaaaaatgaatgtaattaaatagaattctttaaatccaaaaataatctagtttccaaagataatgctgaggaaataaaattttaaaaacctttaaaatatttaaaattttatacatcgtatttttataaatttttttatttataaaagagtattattattggacacccattttataaatgatgcactacgatatttttttgcttaaaaaactcaatgcattgacaaaaagaaaattgatgcttacaaaggaagcatctcccaaaaaaaatgtagtttgcaaagaaaattttactttgtgtgagcttatttattattaaaaaatatttatacatatattataattacttttactaaatttatttaattttgtgaggggcttttttattattttagtctataattatcaaattaaaaaataataattttttaaaagataatatttttattagtagggctatagccccataataactcaagtgggtctgtcctggttagtgatattctttaactattttttaaaggctaattagtaatttttcctcctgaactttgacatgtacaaaatcgtgccccctgaactttnnnnnnnnttaaaaattcccctcgaactattga

SEQ ID NO: 19686 - DNA, 5307 bp, Cannabis sativa
aaaactgaatcataagagaaccgaacttttctatcttcgaaatcgttgctcggctctttcttctcttcgatttgcttttgtttgggtaaatagtaactcggggtttctttcgatatatatatatatatagacgagagtgagagaggatttaattcaggatcaatttactattttgccctcctgtttaaataataataatatttaaaattaaaaataataaaatatgtattttttagaaattattaagtgaaaaaccaattaatgactttttttttaaaaaaaaaataagtaaaattaattattttttaaaattaattacacgtgtagcactgacatggtagtagtctaaattgtcatatcattattctctttggtacatgtaacaaaacctgatagaagtgccattttatgacatagtttgggtaggagttacaatctctgttagatacaataacacgattcgaaattcacacaaaataaacgagtttggatcatttttgagttaacacggctaattcggttattgaacgtgtatattctattgcttaaatataattaaacattaatttatttatttatttattatcactatattcagaaatataaattttttatagttatcatgaataatataaaataacaactaatcaattactattttatttagaattttttacaaaataaactaaaatttttaaaaatatacaaaaatacatcaatataaaaaaaattcattttaaattttcaaatttaatatttacaataaataataaattatttttttagttatttcatattttattcatagttgtattatagttctcataaagttgttttttttgattgttttttgttgtttcataatttattgagagttatcattatgttgatttcttattattttttagtttttttttactttttgttgagaaaaatagtgtattttgtagttttaaaactttaaaaacgtatgtttataaataaaaacttcatgccatacaaggtggtgacatgacactctaaaatctctctaattagtattatttgttgtcttcttaattttctcatttttttaattttttaatttttattaagtttatagttaaactctaaacctaattatttttttttttgagaaaaataatctttattcaaactaaattagccataaaaatgtcgagtagtgatgtcggagcatcactagcattaatctaacaatctgacaaagaacgagagctgcgagcaataaaatgggcaactctgttcgcagatcgagatacaaaagcacaaccaacattaaaaaaggagtttaataataacttgcactcatgaactagtaaaccaaatagagaaggcatttgtattaaaccattaagagcttggattgaagttagactgtccaactccacaataaaattgctccattgcttaaccgccacccaacttaaagcttctttgatgcacatgatttcagcaagaatcggcagtggagtaccaatcctatatgtggcaaaaccttcaatgatgtggccagcagaatctcgggcaagaacaccaccaccaatagcacccttaacagcaaaaagcgcaccatcgacattgattttaacgaaatcagctgctggtttagcccagtgcacatcgccattgatagcaccagcagggacccaaagaggatcaaatcgacattaacgagcatgtttccattgctgcagcataaacttagcaatataaacggtagcaacggcagagtcagacttggcttgccataatagctcttttctacccttccaaatcgcccaagatgtggtagcagcttcttccactaaaggaacaggttgtgtgtcaaccaaactagaaacccaactagaaaattctactaaacacaggttatgagaagccacatcactgagattccaacaagaaacagcaaaagagcagttaaccaacacatgggagatggattcctcagcaacatcaaaaaacacacattttattcccactagcacatgtttctggtgcagctgagtgcgagtggggaggcaaccaattaacgccttccaaaggaagtgaagaattttaggggaaatcttcaatgtccaaaactttctccaccaatctgaattatgagaagaaacaacatgatgtttttgcgattgcaaaaagtgatacacactcttaatagagtagaaacccaaattctccatagacctaaaccaatgatccatggtagcagaatcactcagaggaatttgaaaaatcagctcctggttacgctcaatgaataagtcttgaacaacctccaagtcccaatctcttcttccaatctgcattaaactatcaatagtgaagttgtcaaggccaggtaaatctgtcatgacaaaaggaaaagtgtcatgtggaagccaaggatctcccacaatactaactgaagtgctagctcctatactaacacgagccccagccgaaatcaactccttagtctcatgaatgctttgccaaataaagcttggattgttaccaagatcggcagacaggaagctaccatgggggaaatacctagctttatacacccgactaacaagagagttgtcattcgtcaatagtcgccaatcttgtttaccaagtaaagcgagattataatcattgagtttccgaaagccaagcccaccattttccttactaacacagagacaattccaactcatccaacttacccctcaagaattcttagaattagaatgccactagtacttagccatcatcttttccaagtcatcacaagtttcaagaaaaaaggaaaacagtagttaactttttgaccataagcttcctcaaacagtctaagtaagggaatgacattcaaagcttccctcttattagcccgacaataaatataactatcatcaacaaacaacacgtgggagatagtagggacaccattagccactttgcagcctttaatatcaccattaagcttaaattgctttattagagaagagaaaccttcaacatagagtgaatctaattatttttagttgaagcttagtcctataatatatttaaatttatgacataaatatttaagtttaatttacggttgtaaataaatacttaagtttattttttttgcagtaataatacttaaattatatttttagaactctgtaaatacttgtccgttaaatgttaagtcattatgcacttgtccaaaaacattaacctgctcaaatgaagacaatagcggcagaacttctcatatagttcgttttgttgtacaaaaatttgacacaaaaagtgattttgtgatatttttacattattttttattattgtacttcaatgcataattgtaaatgcaaaatttaatgttatctaatgctcttagtaatttattaagaaaatataaaataataataatgcaacagtaaatataaaattaataataaaatattaaaagagaaatgctaaagggtaccattgttgtctagtatctttttacatgtcaatattgctattagtgtaattaagtatcggatctcatatagtttaataataatttttatggagtatcgctaaccaatcgcaagacgacacgtttagaaagttttagacactaatggtgtccaatgctcatattaaaaatagcataatggtaaatatagaaatatagcatttattgtaatgtaaatttagaagtgccctatttttcataattttgaattttgatcttgatttatcaaactaaaaaacaaaaaaaagagtagaaaaattaatgtgtattaattgagtatacaatatatactttgctattgggtattagtggtgcccatcactttttatatgtgtttttaagttatatgacatctgatacttaattacactaataatagtatgacactgaataaggtgctaagacaccagtgttgctttttagtaactctcaatatatactcatacgtcacattcatacccgaaaacccactcactcagaaaatctacccaacccaaaacttgaaaatcccttcaaaagtaaaaagggttcaaaaaattataaggcgtgtctggattacacacggggccaagtatgctataaaattgcgacacctgaaaaattaggtcaaacccaaacccacttgaaaaatctttttttttaatatataccagaccctctccccttttaaaaacaaaaaaaaaaattatattatataaaaaaagtaaaattacgtgtacttttataaaaaaatgaatttttcaaataaaaaaaaaaggcctaaccgagcctctaaaccggtctcaacctaccccgacccatcccaactcgctcccgatccacctgaacacgacacctgaaaagccggtccctcacacaggcgttttggcacctataaaaattattaaaatggagtgtatttataaaattttgggtgcaaataaaactattctaatggaaaacattaagaagaatttttttaatgatttttgaatggctagctaatcttaaaagataaataataaaataatattagttgttaattatattattaaataaaatagaaattaattagttagttgttattttttatatttttgaataaagtgtgtaataaaatttaaataatagaatatacacgtgtaaaatatatgaaataaacccctctctctttctctctctcgtctatatataaaagcgaagaaagaaagaaacccaaacaaagcaagcggaagagaagagaagagaagagaatcagagatcagcagcaatttctccatttttcgcttcaaggtaaaaaggttcacttcttcttttttctttcaatttctccaattttagtttgattgagatgcatgttctgattgtttttttgttttgagttgatgcatttatttcaaatcaatagcctagccctaataacctacgttgttttgatccgataattgaaaaatatatattgtaatactttaatttgtgggaataatcaatatatatagcatctatatatcctatttagtattaattttggtgttttagggctctgattatataattacacaccatcggtttgtttttgtttgattgaaattaatatgatttctctaatctatatctggtcgatcctaattagtaattagtttgaatgttttaggaattttgtttgtttaattgaaaataatattctatttttaggcttaattaatttgttagtctaatctgataatctaatggcagagatggcagaggtggttgatgaaattagagatggtaaatgtttgttagcggcagacacagacaaaaaagaaacagat

SEQ ID NO: 19687 - DNA, 2651 bp, Cannabis sativa
taaataataattatttaattcgtggtccaataatatgccgttatgtgtttttgagttaacacttaagataaggtgttttactaccattttttttattagggtcatatgtgtaacagttgcaaatgtaaaggggatttcaccgcaaatatctctttatgaaaagtggataatattttgttaatctatagtattttagtttgatcttggaattgattgatgatgacttatacaggtgtatggttcatgcattgtcacttggaagtacacactagttggggcttgaagatggcttgggttgtcatggatggaaagaagcctaatcagaagttggctccaccaccttctgatcttcccaagtgttgattatgtattaaattttcttttaaacataagtgagttctattttttgttgtagtcaattcatgacctaaaattggtcacaattagatggctataaaattctttaatgagaaagagaaatatataaaacaaaaaaagattgattgaccattctactgttcaacattcatatctcataatacagcctactcaatactcatgctagtcaaatgcacataaaacccgggtcttactctttctctaaaatcagttcactcaatcaataacttgataaaaattgtactatggctgataatgataatgataatggtgtagtacttcaccagaaaccatcacttactggcttaatgaagattaaaattgagtagtgatctgagaaaagaaggctttgaaatccttagttggtgtcccaactccctcagcctttgatgccagatcaaatgccttatttttcgactcctcaaactgcagagcctgattaaaaggaaagagcgttatgattagggggtgaacacattaaatccggtaatcaaataataaaagttacttagaaatgctcgattgtaacactgcataaatattacctgaatgcagacttgtgcaacatcggccctaggaacagatttggtttctgtcttcagaagttcgtcatcttttcccacgagcagttccctcacaccgccttctttgtctaacaagccacccgccctgaatcagtacaaaaaatcactaaacaatattcataacatatgtatgtatggacagaacagaataaaaaaagaagcgatcgaggatgacctacctaataattgtgtagggaacaccggagtcagccaaatactgctcggctttcctcttccaaatctaaaagatggtaagattgtgcaatgttgtttcggaattagttaacagtacagaaaaaaatcatgaaagaaagattggtgggacttaaaagagataataccaaccaatatatttccattgcctaatttgttcaagggatgattaaggtctgttccacccatagacccaactaacacaatttgctttactccagcagccttggctgtttcaccaatgaaaatttcaaaacagatattactagccataataaacagagagccaaatgaaagcaaaataagaagaaattcataccagcatctatctgattcttctgcccaatccaatcaacctaaaatgcatacatataacataacaatatcaaatgagaggttatcttgaacatatagattgtataaattatacattgcttaaaatcaaatataactttcaactttgaagatttcatagataagttctaatttctcatcctacaattatatcagatactttttaatgtagaatttcttataatgttttggtggtgggacgagttagggattttcttttcagatatcaaaactctattgtttagtttttcgggacatctctttctcatgttcacacatggattggctcagcatgctctcacaatagacaataagtttcaggacataatgcttctttattgatcatcaccgtatacggttacacaagtcaaagaatgaaggaagaaaaaagaaatatacctgttcgggataagcaccctcatcgaaaaagaactcaggccttccacctttagttggatcaaacccggctttcatctttggcacagcactagttagaattataagagcatcaattccttggactgcaggaacaatgctggattcgtctcttacatcgccgacataaagatcgtctgctcctccaatgctttccttgctctcttgtgttctaactagacctctagccacatacaagcttgactccttcaacttcttgtaaacaatttgccctgcccatgttcaaccaatgtaacattttctcatttttttagctgttagtaaagatagtcatagcagtaacttcagtaagtaaacatgatttgttagaacttaaggctatgtttaaagagcattgctattaggcaccagtggtgtctatcacctttcataggtgacgctagcacatttcataggtgacgcttcacgattagttagtgatattgcctaaaaattatttttttgagttatatggagtcaaatacttaattacacgaccataaaacgactagatttatactgtgagaccatgaaagtagccaagagtaaattgaatgtgattattttacattattagtttgccaacaatactcaaaaggatacatacaatttcatcaataaaatgataataattcaaaattaatgttattacttctcaatttcact

SEQ ID NO: 19688 - DNA, 3209 bp, Cannabis sativa
aaaaaaaaaaaaaatcaaagaacaacaacatgaggagtctaggtcgtcttaagggactgtactggctctttctcgaatgtttaaaaaaaaggcaataatttccttggtaagcaaaaaacagtaattacttgtgatatatatttaactatactgttgcgataaaatacatcacattaatgtcaagatcaagtaaacttaatcccaccttgctccaataactcaatcaatcaagaagaaagaaacacaaaatataacataaatgaatgtattgtattgaatatatatctcaactcggatattacaacttggatatccaagaatctaggaacacaaagtaactcaaacaatcaacttcttaactttctagtgctccacattaactgaaaacttagacactgggacacacttatatacattttgaactaattgacttgtaactaacaaaactatcatcagttttgagcttggcaagtgatcgatcataacaccacaaaatcctccacaatcttgagcttgtgccactgggatgtatcaacaaggtgttgattaatgaatttgttaaagactgaggtctcatccatgacccttatgtttagtaacactaaccaatatctgaatttggcttgtcaaaaaaaaaaaaataaataaataaataaaaaaatattaggagcggaattattagtggggcgcaccttcttcctctaataactactataaaaagggtcacccatgaccattaaagatatgtcattaaatgagtatttttcatgtccaatgataggacttgttaagatactttatcacattcagttttgctccacatgaaatgtgataaattttcttctttatttaaactcgatattaataatctctatttttataaataatcaaatattataaatttggtttggagtattaatattaatgttatttatttacatatttttaactcaaattttatattatcatttgatgaaatatatattaaagtctatctttaaattacacacataaaaatgattgaaaaaggaaattatgtgagaatattttgtagaaattatataaaattaatacacgtaaaaataaacaattcttaagtctatattacactcttatagattattgtaaacatttctagagaaccaaacacaggaaaccctaaaatacattatcaaaaaaataaaattgaactatttaaacattactgagttccaaatagctagagcctccaccgctccattaatttcttacatcttggcaaataagaagattaaatttattaataaaatatagaaaaaaaaatatatgtaatgtatccaattcactacaagaaaattggcctatcccaatatgaggtatagttcctttaaatgaaaagatttcttatcattcctgaaaagttgtggactcatggatgcagctcgtggaaggctttcctgctcttccgagaaaggtgtctaggaaagcaagccctcctccggaaaggagttctggatggttagatgctcttcctagaaggtacttctggatagtcgactttagctagctctttcctatccatgaaggaccttcagcaagtgcctggaccgtgactctggaagccctcatacttgctctaggatgcactcctacttacgctaacatggaaacctcgctcaaaggagagttggttaagttatttatcgcctaattaacttaacaactttgattcttgcaaccaccgactttaggatcttgatcctatataaggcctataaattttaccaacacttatcatttgaagataatgatcagattgagattgagagttagagagagaaaatatttagaggtacagagaaaggagagagattgggttttggttttttgagaagaataatctatagacgaagaaggttcttgggtaagagtgtgagagttaaaacattttgagagtcgatcacgactgtattgtacctatactttctcaatcagtaaaaatgatttggtggtaagccataaactagagtagccatagatcacatcaatctatcaaacttgaataaatatatatcttggtgttgatttttttattttttgccttatttgttttattgtttcccttactctgttcatctttgttttctccaattattatttgtgatttgtaaatcttttcattgttaatagtttgatttttttaacgtttagttgatttggttctgcacctttaattgtaactttccaacaaatagatagtaatcaatcaagaacacagaattaagattttttttgcaagtgttcttgaagaaactttaatgtcatcaatggtgagattccaattggagaaatttgattgaataggagattttgcactatggagaaaaaatttgaaagaaatcctagtgcgccaaaaggtatccaaggttcttggagatgagaagcttttggccgagaagaaaccagagaaaagagtagaaatggaggagatggcacactaaagaatcatcatttatctatccaacagtgttcatagaaaaatcatcgcagagaagacgattaaaaaggtttggaacaagttggaagaactatacttaaagctatcaattgctagctagattaatttgctagaaaggttatacaggtttaaaatgatttcttccctttctttagatgataatattgattgatttaatgacattattgtgggattagctaacataagtcacaaggttgatgaagaaagacagactatcattttgttaagataaccccatttgtgtatcaagaagtcaatgcagccatcaattatggtagagacgtaattgcattggatgatgttcttttcgcactaaagttgaaagatttcgaactacaattggagaaagaatccaagaaagaagaagtgcacttggcaataggaagatcgcccacaaaaggaagttctaagagtaaaaaccatcactctcaatcaagatcgaattccagagagaagaaaaaaaggaagtgttacttctatggaaggtctggacacttgagaagattttgcaagaagtacaaggagcaacaaggcttcaataaacctcacaatggaggtaggaaagacagctgacatcatcaccatgggaaggattctgctgcaaccacggaggataatgatactgctccacagatgaagagttgttctctatctcagagtcctcaatgaaaagggagtggattcttgactc

SEQ ID NO: 19689 - DNA, 5402 bp, Cannabis sativa
cctctctatagtttaggttattggatagaactttttttttttttgtaagggaatgttaacaaagttattatttaataaaaaatgaatatatatttttttcaatataccacttatttgattaacataaataaatcatttaatagagtcaataaactataatctatgcttcattttatcagcacaaataaaaactaaattagggtttggtggagcattggttttgaaatcataggtgcaagcatgttcttctggcaagcgatggtggttgcagtaggcatggccgcaacgacatgaaaaacccgtcaatccaatcttcttgttgcaatgtttgcatctattgttactgattttgaaattcttattaacaactttattatcagacacacaaacacttcccgtagtacttacacctccatcgttatcatcatcgtgtttagcagtaatactaaaatcaatatgtattttcgattcatgtgtaagaaagttgatgtagcacttagaacacatgtttttagtctcggcacttccataaaatccacacccctttgcacaaagtattggaagagtaaggtcggccatagtaattagaatgtaattatgcgaaccaaataagtaataggatgggtgacctcctacgaagtttttgtgttgccacttaaaaaatatgcaaaccaaataaatagtactaggatgagtgatctcttacgaagttcttgtgttgctacttaaaaatatgccaaccaaatgaatagtaccagaatgagtgatctcttacgaaattttcgtgttttcacttaaaaatatgcaagccaaataatcttaacagggattatttgtatttaatctttaaagagattattaagtgttgatgaagagagtattaaaagtatgaaattttatgatcacaatgtttctcacactattatttgtttaatttttttcctctaatgttagatgtatttatagagagaggttagtaacaatagaattagaatattgatcttaaaatactaaattcgttaatgatatgacataatatcggtaaagatatctatattcgaatttggattgaagttatttgttataaatgataataaaataaaaataaaaagtaaaagtaaattaaaattatttaatttgaataaatcttaaaactcaaaaagttatacgaatacgatatcaaataatatatataaaaaaattgatatgtaactttttgagttaaaagatttaatagaattaaataattttaatttatattttattttaaagtttaaagatttaaaaatgatatcaaaattaataaaaggaaaatatctgagtttgatctttctaattaaaaaaacaaattagtgattttttttttttcacttaacaaaataatttgaattttgatatattttagtttatcaatacaatttggagaaagtgaaggaaagaaatttctagaaggacctgtacaatgtgaaatattattaattaaattgaaaggatataatgaaattttgtaattgaatttgtatattattcaaataattattaacaattatttaaaagaaaaaaaaaatatttgtacttatgctccttacaaattcttcaagtttttttttttttgataaaaaactatttggaaacaaatgccttttaaaattttacttttacagggtttgttttctaattttaatcctacttcttttcttaactaatatcattatattaccactattatataaatcatatgtttctctcattaatatttactttatttattattcatcatatttcgcggtcaataatatttttttttatttgttaatataattatattataatatataaaattcaaaacatcaataaaataatttttcatggaattatacaaattaattaaaacaaaattttggaaggggaagagatttggaaaatcaaagagcacgtttcaattttaattgagccaaaaaacgacgtcgtactataagcagtgagcttcttcttccttcccgcgcacgcagtaagacgaaaaatggaagatccgagaaaatccgccatgaatttcttctccgatcaagaactctgctacgccgatatcctacctccttctcaggtgactaacttaacatctcaaatcttcatcttcatcatcaccgtgactgttttctccttcttcttcttcgtctccgcaggtcttgccgagaatcgaagttgcggttctcaattttctcagaatcttaacttctcctgctccggcaatctcaggccttccactggtattaaatttctgttctactaatctcttcaattttcaaggccatcaaacaacacagaaattaagttagctttcatatgtatagatttgtagaaattcgagcaatggccgagtgaatcaaggaatttcaactgaagttccattgattttcctttctcgatctctctgcaataggtctctaatgcgatccaccgctaccaaagcctttatcagaggtttttactttctttctcttttcaatgatttagtatttttgcttttcttataaaagaaattgtttctgtaataataacagtgtggaaggtaatggaaatgtgctataaaattttagcacaagagaagcgagtaacgcagagggagctcttctataagttgatctgcgattctcctgattacttctcgtctcagctggagactaacagaaccattcaaggtacgtatgtatttttactcaaaacttttgactgattttcatttgaattttcttgcgaaatgtgtaaaagaaaattctgtgttggcgtagatgttgtggcattgctgaggtgtagccggtacagtcttggaatcatggcatcgagcagaggacttgttgcaggccgtctgttgttgcaggtatttcaacctgttccttttcatttttcttggtttattcctgtgacgaaatgtagtgggattaggattcaatgaattgatttgttgcagtgttcatattatatatcctttggttcattatgtaggataagcacttttgtttttaactaatattgttttaaaattttgagctatttatgactaattattatttttgtcaacaaaatttttacatgtattgaattatgtcttaacttttaaggcagttaaaaatttctttgaactattaagattgttaaattcaatgagttttgttcaattttactaacaaagtgtgacgtgaaagaagattaaggtttatgatttggtaccaatcaaaattcgagagacatcatttattatatgttcaatcactacgttaataaaaattttattaacagaattggagggaagtctttgaattcaataatctcaatagtttaggaaaaattgttaatagtgtaaaaaaattttagagacataatttagtatatgtcaaagttcgtaggaaaaaatttgaagctgaaaattaataatgtcaaaccgtactagaatttatattgaattgatgagttgtagttctcaaagtattactattatcaaatcgtttttcgaattagatggagtgataaaaatttgatagttgtaatagttgagaaaattttaatagtagttatagttttgggacaaaagttaagatagtagtcatatttatttacttttagttcataacatagttttctggagagaactgtgttgtggtaactcgatggttttttctctgttttatttttgtaggagcctaaccaagaggaggtggactgttctgtgtgtggatcttctgggcatgctatttctggtgacttgaatcttttggatcagctaataatgaaaacagatgcacgctacataatagtagtggaaaaggtactatatatttgaatgtattcaggcattgctagctaccccaattcccatgtaccttgccatctgactactcggccattttatttatttagcatgcaatattccagcgtctagcagaggatcgatttttcaatcaaattccaagcattctaatcacagctaaaggctatccagatattgccacaaggtgaacttcacaggtcacccaagaacagagtttaattgcttattacattttgttttcaaccaaacaatgtctaatatgggcacactttgaacattgattactgacataggtttctccttcaccgaatgagccgggttttccatgatttaccaattctggcattggttgactggtatagacaaaatcattttactagtcaatgaaacagtattttgctagtttgaattgaacctaacatcacagaatgaaaaaacaaaaaataggaacccagctggattggctattttatgcacattcaagtatggaagtttcggcatgggattggaggcttaccgatacggtaactattttcttgccttaaattgtcatttacttgtacaaacataccaatgcaaatgtaaaaatgggggcagcttgcaatgtaaaatggttgggactgcgaggcgatgatatagagctcatacttgaagaatctttagttccattgaaaccgaaagatctgcaaatcgctaaaagcttgatgtcatcagatatcttgcaggtgatttacctagcaactcaaactttcaaccaaatggagactcaatgacaataatattttgatatccaaaataaataagatgaacaaatgccttgcaggaagaatacaaagaagagctagcacaaatggttcagcgtgggcagagagctgaaattgaagctctgtattgtaacgggtatgattttctagtgaagttcattgcgaaaaaaattgtacaagccagttatatctaggaacaaaacccaaaaataatgcttataagaaaattaaaaaaaccccatcattctaataaatgcaaatagttttaacatttgttactataagaacaatgcccaagccaactacatttaaacagtattcattgaagaatgcctttctaagcacaatcgtctacaataatcacatccctccaacgagaagggatttatacttttcgtaatatatattgaaattgctaattttgcactatctactaattactacaacagatcaagcaacacaaaattgtatgtaggaagatttgaatatgaattggactgatactgcactgcaatgtacagatccagctacagacatctcaaaatcttagataaaataaataatggcacctcaaaatttctaccaaaattgttttagttcctccttgatgcgagtctcactcttttgccttcaatcgcaaacttcttacttccactcagctgcacaaaccaacaagatgatattataagaaacatgtaatgcatcttcagaatttcaaatcagaaccttgccattctcccagaaacagaaaataataccttctgttttaagtaagaaagagcttcttttttagaagagaagtctgaaaaaac

SEQ ID NO: 19690 - DNA, 3392 bp, Cannabis sativa
attattacgtgaatattgacttgacacttaaccattatttggtaggatatagaaagggagggagaggagtttgcacacttaatcatttttttattcaaaatcattccaaaaatttctgtagtgatgaagggatacttttttctaaaacagtaattgtagttgattgaaatggtataatttttttgaaaacgaaattgtataatttttaagtacatatttttgatgcacctatcattacaattctacacttaaaaaaatagcttgtattgacaaaaaaagcattagtgagcttattttcaacttaacataataggttaataaataagacaaggattgattttatattttcaactctaatagtatatactacccaatcctatcacttctaaactttatattttcgagtttattgtgtaggttatttcaatatttcattttcatgtttagtcaaaacttaattatatttttgaaaatgtggcacaagtaacctaatgtagcacaagcacttctcaattgggagttacttgtgaagtcgatctcgatcaacttttgcaatgccacatcgttaatttgtgtcgtcctctgaatgagacaaaagtactcatatatttagtaccataaaatatatatttttttttattactattatcgagcattgctatcatacaccagtattatttaatattactataaaatgatgcttttacaagtgattaatgatttttttaaattaaataacgctagcagtgatataacacgtttaggtagtgtttagaacaacaatgacccattctatattcacaccgagattagatataaaatttatttttatattaagaatagaagtagcatttattgacacaaactaattggtgagaaaaccaagcatattttcaactttaataggaccccctctcactaccaactttatgaataggaaaaagattgattttcttttcttctaaacctttggattctaatgaactagtattttcaatactaagagggacctttttcctaccatggtgggttagtacaatttcttttcctttttcattaattaaatatttgatggcttattattattattagttagtgtgtctcttctaagaaagaagcaaaaatgaaagattaagctattcgaaccaatcttggtgggaaagaaagaaaagaaaaagataagttggtgatttcaacaatcattgttatactcatcatatatataaatatttatctatataattttttttaaaaaaaaaatgctgtctttacaattgaatctcataataatcatgttacaaaagcctataatctctctcaataatacaaaactagaatctctaaatctgaaataagaaaaaagaatcaatattggtgggaaagaaaaaaaaagtagtgatcaacaatggctgttatactcatcctaatcatagcttatacaaaaaaaaaaagattttctaagataaattataaaattatgtccaacactacttagtatcaatctaataagaatgtacatattaatggtgtgactaatagcaattcaatttctaatttgcaagaatggtacacataaaaaaatgctatttttataatttaacttgaatcaactcattattatgttacaacatcttaaaaaccaattctttttccttttcattccttcccatcataagagatgaaagtacaatttaatattgagtctcacatattttaatttaataaattttataaaaaactgctaattattcaatgtgtcacattattatagtgctagacactataaatatctaataataatgctctaaatggtatttgaaattaattataaaagacgacaccaacgaacgatatcaaatatactatcgtaaaaaaatgagaaatgctagaagataatcatggtgtctaacacccttaggagagatattatcgataatgtaatttaatatcggtctcacttattttaatttaaaaaaaaaaaaaaaagataaagctcaatttggtcggtttaaaccaaccaaactgtagattaaaatcgtcgggtatttttacatttatataatagtcgatcggttctcgaatcgaattattataaccataccatgaaaaccgaaccgaaccgaaaactgaattctgaatgaattttattttttttttgtgtgtaaaaaaccgaccaaaccgattattacacacccttaataccctataaaaatcgttaaccatccacaacaaatctaataaagctacttaatttctaatttcccataagaacacacataaacatacataaaaatgctatctttaaaattttgaattgaatcaactcataattacattacaaataatacaaaactataaaaatctctctacaacataaaataaataaataaagaaaaacaaatctttttgttcttttttcttcattattccaaataaataggtagtacaacactactactcctagatgatcctctactagcatgaccaccaaaagaaaaaaaagaccttcgaattgatctaccttcaacaataggactattactattactattactattactactactaacctctaatctttgtctttgtaactgaagagcttcttgaatggccagaaacattttccgatcaccggaggaatccatggagaaagatcttctaatgggttgaatcattgaaaattcttcatggtgatctttttctctactcattactatacactcatctcccatactctgttttttccgatttcgatttcgattttgataattatgattattgacattgttgttgttgttgttgttgttggggttggagatttcgatgacgagatagtcctcttcatcttctccggcgccggcgagattgccggtgggatctacaggtgaagaagttggagctgcaaagattggatttttacccgcgaaacgattttccggcgaaatacttctccggcaaagtgggcaattagcattgttttgaagccaaacatcgatacaatcgatatgaaagatgtgattacagttaggaatgattcttagcttctcttcatcgttaaattcgcttaaacaaactgcgcaatgatcggagatttgtttttcttgttcttcattttcgccggaaagttgtatttttttgaagtgaaaaacagggattgatctgataacagattcgtctaatccacgagtttcgattcctggtgagtaaaccatgagtaattcttcgtgggttctgtctcttgagagagaaaaacgtctgaggatgtcgatttgatgccatgttaaacagcatttgataacgaaaatgtagtaactgattaataagaaagctgtggctaagattccgatcacggcaattgctatgatcggaaaacttgtatctgaagaagaaga

SEQ ID NO: 19691 - DNA, 5484 bp, Cannabis sativa
  modified_base (36)..(57): a, c, t, g, unknown or other
aatgtaaggtttcctaaaatttatatgtgtttattnnnnnnnnnnnnnnnnnnnnnnaggatgttaatgaaacatacatggtagtaaatcgatcctgctaaaatatttccaacaggttctatgaacctggacatcaatcgggtcctcctcagcctcctcgccaccatgtgttctggtggaaaacgacgacggggaacccccgtgtttatccttccttcccgtacgaagccattgtgagccaatcatcttgttttggcgctgagttgtggctctcatgaacactccatatggcttgacgatcatctcttcttgcatctcgaaaatctttgggcacagcttatcggcatgtccgttcaatccacatatgaagcaaaaagttggagcatgcttatatttgaaattaacccaaaaccatttggaactatttattcgtcggattttcattcgtcgtttcagaggttgttcaagatcgaccataacccgaaccttgaaatattcccgccacacaccagagaaattattctcatcagactccacaaactttctgatataatcacctatcttctgtagcgttcgctccgttcggaatccatgttgaagatcatggacttgaacccaaaaatcaagccgattcaacgcgagagctcttggattatacccagctttaagtctttcaaagatcagctgtttatgttcaagggtccatggacttccgctaatgaccctcttgatatcgatttcatgataaaattgaaacaaaaatttgttttgttccaattccttcacatgtaaacccttgccaggcttccaaagaaacgccatcatatgttgcatggcttgaacatcgataattccggcgtccaaaaaccggccaactagacaccaccgaacatcctcctcttcctcttcttctacctccaatgacagcccaccaaactcttcaatatccaacgtaatatcatcctccatatcatctactacatgagatgaacttccagaagccatcacgtcttcaaaaaccaaacacagaaactaaaaaaagaaccacaaacaaaccaaccaacggacaaaagacaaagacacaatcacaccatgtcacatgacaggactcactcttttttcatatagaactctttttttcttttttcatattattaaacaatgtgttttttttaaaaccatataaaacaaacaaaaattcttcattatgagcttttagtatcaatagttacaaataactattttaatctaataaaataacttataaacaactattttctatcaataaatattaaataacatctaatatgcaactgtatttgcttttttttttttgtaaactactacttatgttttctaaaattgtgtttatagttttaaataactatttttatatatcaaaataactattttctgacaatcaacagtaaatgagatttaattcaatagtagttgttcatttataaatcaacaacatatatacaactatttttagataaaaaaaacagttgattatatttgtatgcatccgtatttttcagttgtaatataattttatttatttattcagatcaaccaattttctatatgattaataatttatctgatttccaaaaattaaaaattatttatatccatgatgaaaactttttaaaacaacttaattaggaaataaaccattaaaaattttagtacattgtatttgttctctgattcgtttctgggtaagcttcaaagtttatatgatcttcttgtattcaaattctctgaccaatacgattcgaatttttaattttaggttgttttttgtattttttcttatcaatggaggtagaaatctccgttttctttttttcttttttttttttttttgttttaccttttgaatttagatttgtcgggattagattattttttggttgagatctacatttcgttggagctaaattttttgggttgagaatgaaaatcgtggagatggagatggcacatggtgttcattgtaccacatccaatatttttaggcctatccaaatacgatctaattatatattgaatgttaaattttaccatccgatccgatccaattaatttcagctgggtaacgaagaaggtggagcagtccacattttggttgttgagtttgtatttttgaaaataaaaagttttgatttctatttttgtttattttttctttgtaaggtaaaaatataaattggtaccttaagttgtctattatagaaaaaaaaattgggcttttttcagttttaacaaaaagaaagtaacaatattacaaaaatacttttagctggcgaaataaacaaatataaagctcaaataaaaaaaaaattacaccaataccacttacacacaccttcaactcaggatctatacttcctgagcaaccatcgcacaaccacacagcaacccagcgcaaccaaaacgaaaattcaaccaaaaagagaaccaccattgattctgacaacttcacctgagaagacgaccagaataaatcaaaataggggatatttcgaattcatgaaaaaaaaaattgtagaaaaactactacgaaactaaaattcaaccgaaaatctagtttaatttgcataaaactaatgttctgactttttcagatccatgagaggcagatctcaaaaagttgaactggagttcccaaagaatccaactcgagtacaatccaaaaaaaaattacaccaatactatagtataatatttatcctggtatagtttcgttgtttttcaaatttctaatggtgaattgttttatgttaaatcataaatagacatgtagatagagttacgtacgtgaaaacactattatgatttttaatgtttcataacagttgcattacagttgcataaatattttgctaacagttattttgtctgattgaaaccttcgtctgatgcaaccttcggccaactacccagaaactttcgtctgatgcaaccttcggcctcgttgaaaccttcgtctgatgcaaccactacgcaaccacgcaacaaccaccctgcaaccatcgtctgattgtgtaagtgatagtgcaagagatattttggtaattaaaatcacataaaatgtataaatgttgtccacaccttatgaaggtatttttctaaataaagtgtcaatttatattttctatgtaatattaattaaaagttttattaaatattttaattaaaaaattaatttattttaaagatataattaatttaagcctaaaaataaaaaatttaccaattaataacatgttatagcacatcataaaaaaatataactatcatagtcacaattttattgtaaccattaaatactaattaacatgtaggtagaaaaaatgtgtgcactacaaaaatatttgcatttagcattttagagaagtagaaggaaatcctgttagtaagataaggaatattatttgaagcaaatctttaatcaaaagagccatagtttacaaaactcataactacatcttatatcactatgattaagctaaggtcagaattgccaattcccattttgttactcaggaataactaaataaattaataacagtaacatttataaactatgtaattaacttgagataaatcaaatgtgcataataaacctatatataaatatagtgtgaagtcgatcgatcgaatgtcattctttatatgatttcttacatctatagataaaatattgaaaaagccatgaaagttccaaattcaatagcaaacagtttttttttttttttttttaagtgtagcgtaatggtattttacaatcatatattagcttaataacttaaaagtcttaagttcaaaccatgaactctcctttttttctcattcttcactcaccactaaactaaccttagtagcttcaaactgcttaaacaatgcggacttccattaattgcagatcatataaaaacaagtttgccatcggttcaaatacagttttgactaaaaaataaataatatttatatttttcttattttaaggaaataaataaaattatcttacaaataatttattaattatttttaatcatccaacaatgtgactcgtggttatatgtttaaaacctccaccatatgtattacatatatttatttagcatgaatttttcagaatatgcacaagacttcctcccttggtcgttgggcttgtaacagtaaaagaaagaaagaaagaaagaaaggatgagtacgtaggttaaaaagataattagcagtagatgacactctgtgaagctcggatctcaaactgtgacaagaccatctttagatttagttagaccaaaaggaaaagtcttaggaggaggggccatatacttcacacactcgtgcttctcatgtatcttaataaaatatatatatttaataaagtatgggaatatagtcttttaataagattacaacaaaaactgacatgagtcatatgggggtggatggagggacgaagtgtttaatatttggttcgcaagcacaaaaatttctaagagaatgaaactgcaaaaagaggaataataagagagaataaaaatataaatttaataatatataactaaataaaaaaaaaaaaaagatgaccggaaaagagagcacacttcaaaaaagagaaaaccaaagatgaaaaagggttagaaatttgtgtttcttaaagtctcttttggaaatttatttttaagtatgtcttaatgaatccaagaaaaacaagcatcctaagtaaaactagtaattaaataaattgtttctttggttctttggtttttgtctccctccattaattcaaagtgcaaagatcttctcttttcttaccgttgagttttctagtcactggtcttaataataatgatatacaaagtaataacccatggtcataaattgaatgaacaagttaaataattcatctgattattattcttaaagtttaatcatgttgctaaaggaaattaaattatatacctattttaatttactaattttattaatttttactttcattttgatattttttaagagatacatacatacataatgttcttctcataccccttactttattgtaaattatatgatagatttaagtagaaagtaaaaatatattggacaatttattagatacatacatatattataaatatacttttgattaatatatatataaagagatgtaatttttaatttatctcctaaaacaatttaagccggctagggccacccaatttagagacctaacatttaaaaattattttaaaaatatacatatttttttagtaatttttttatatactatatttaaaaaaaatgacccaaaattttattgctacttatggcctaattaatttcaagatcagcattaaaataaggaataattatataagatactattttttataaaaaaaaattatattttaacgtttaaagaatatttttttttacatttttaagattttccataaaaac

SEQ ID NO: 19692 - DNA, 3426 bp, Cannabis sativa
aacaaacatctactgcttagccaatttattgagttgagatatacactaccgtcgcccaagcaagcctataaagttgatgaatactctaatctattccctatactaacaaaagttgcataacgtctaacatttatgcttcgaccaagtcatatacatcatgaatgccagtattgccccaaagaaaacaaagcttacctcggttggtagacctcttctcctcaacaactacttgacgcccattaatagtaactggtgatgcctgcaacaccaatcagtacatcaatataagcatggttagcgtctggaaatatgagatgtataattctgatggtagggagacatggttgtcacaatgaaaaataaataaaaatgtgacttaaatgtagagaattcataacccatcattgtgttaaaatagctagaaatacctctatagcactttggacagcagtagcatcctcaaattccacaaagccgaaacaaaatccctggtgattaaaaggaaaagaaattcagatcaactttctgagtaaactgttaagagcaaacaaagtaatatgtattaaaagttgtgaacataccttttggcttctaacctgcacaccattattcttaataggtccgaatttcacaaattcattctcaagtagagaaggtgttgcatttaatggcagacctttaatgtaaattgaatgactctccgctgttccaaaaaatcaaggtatgtgaagcaacaaattggtctcaaaattgttttaagtttaccagatctaacagaacagaaactacacaccttcagcctcttgattgttactgttatcatggttaactgtgacgaaagtaactgactctgaaacaggaggtggaggtggtggagcagctgacacgggttgttctttgttcttttgtgcagtcctcaaaggaggtgtaggagatgaaaatggcactgcagtctccttcataaccttaacctgaaaaggcagcgaaaaactttatttaaagccaattctaaccaatatacttaattggggtagagggcagaaagaaacacggctataataattgcttttgtccaaatctgaatgatttctgtgagcattaagaaacaaaactgcagccattttagtggttttataaaatcagatattggaaggaaaagatgttacatggaaactactcacgatcgaggcataagacttctttggcagatcttcaattttgggattggtttcaggcatcttcaaatcatctggaatttcatcaaccacctcagccactggtgattcctcttcttcttcttcaacaacttctccatttgtaggattagacacttctgtgccgttagcataatcagacactggaatctccagctcaggtgtgtggttctcattcaccgaagataaatctgcaagaaagattgtggtcaatttgcagaaattcataatttagttcaaaaaagaactgaagttctaattaccatgttcagcggtaggcagaatctcaacctcattaaccaaatctccgttcccattttgaggctcaacatcatctacatatctgaacacatcattcaaaacaaagtatcctgtgtcttgtggtgccaagaagaaactctgagtaaatttccgactaaaattttcttttccagtcagatatccagttacaagaacaagcacaccgccattgtacgactcttgtgaatccactgttttgatatcagcaataagatttccataatcaattgaaagaattttctcattgattgcctgcccacaaatgattcatcaccaatcaaacaccaatgtaattaattcaaataaggtctgttgagtaactatgtaaaataattaccaaaaaaaatccaaaaataattgaaacaacaacaatgcagaggatataaaattaactgccactaaacaaatgtatgtatattgatctaaataaacacaaaattatattaggacgggattgcctcaaagtcaggaaccaaatcaattttagaccaataaactataagaaggcacaaatccaagcaatggaaaatcaaaatgtagatcagataatttgcaaccaggcataactgaagttctaaaagcataaatgtacgaaataaagtcataaggactcacttgcatggtagttgtaatgctcataataccattctcttcaacacggccaagcttactaccatcctgataaaacctatggacaagctcgggcgatttaagcaagatgaggtagtattgatgagcaaaggcattaccaacctataccaaaccaaaagctcaattagatgtaagtaacaatatagaactatgaaaatacaattaaaatgtatttcaaatgacatacaacatcagcactcggtggtggtgcacttcctgccggggcttcctgcaacatagacgccattctttccctgtctgatccccaaaaagaattatcaaaaaccataacatcatgtgagaatgtctacaattcatttaaattttcacgaacatactttctccaattcaaatattccatctaacacacagttcaatcctaatttcttctaaccattaacaatacccactaaaaacttaacaagagtattaactaaaaatcacgcaagaactaataatcactagttcttgaatacgaattatcacttcctccgtaataattttcttgcaaacacataaacacacatacaaaaaagtagggtttcagtttcaaacgattctacgatcacagcaaacacagaataaccctaagtttagaacttcgtgtattcaaattaataatcaagatagtaatatatacatacacatacatatatatatatatataaactagaattacaatcacgttttacacctaaaaacgcacttaagaaaacgtttctcgctatttcttcctcaaattttcccgataaacatacaggtgaggagcaatgactccgaagacattgctcaaaattacaagcattgacaactcaaaatcacagatgaaaagcaacagtacagtggcagagtgagagtgagaaatagatacctgaaggaaagcgaagatggatcggcgataatgaggtgagagaagggatatgatcggaggtgctcagtaacttctctcacctccgtttagcgatggaggtggttagggttttgctagggttgcagattcctgaagaggcgagagagtgtttggcaaggaaaaggagggagaacaaaaaaaacacaagagacaataattaaagggtttttcgctatttatagggtaacacgaaatttcattccatcatatttttttttttatttctgaattttataaaagaaaaaatcgtagttctataatttttttttaatttaaattagttttattattattattattaatttaaaatttagagaaaatactagtggaaaattctacaatacacctcct

SEQ ID NO: 19693 - DNA, 2088 bp, Cannabis sativa
tctctctcaatgacaaaagcaagcacacaagaaaaagaaatgattcaagtgcattggagatatcaatacttccctggaaaaaccagttgatctctcaaagaatgaacaaagagaagtttcacacaatgtttgattttcttagacttccttcatatcccaatgaatttggaaaggcataagacttagtcaaaaactactatgtttagcaaaatgacaggcaggcacccattattgctttaactaccttttttattccaaaaataaagacactatgaaaaacaaaattgctgagatgggtttgttcaaatcaatttatcacaattgtcattactcgcttaatattatttatgtgatctccaatgaatatattgtgagttacaacaactaacatccagccttacccgaaaaaaagaaaagaaaaaaagagccaaattcacaaatttctgagccaatacttgtcccacaccaattaaaacataacacattcattaaaattgcaacctaaataattaaccgaatatttatatttttccacactgtacgtgttcatttttttaatttatttttgtagttatttctaattaattaagaaagcacttttcgtggagcatttactaaattattatcagaatcaaattaaaaataaattaatgtagaaaatgtctgagaataaaaaaaatatatatacaaaatatagtacttgtatcatgttgtttactcaactaaattgaaaatgaaattgtttattaagattttcaaaaactaataaaatataataaagctaacaaaaataatattttatgaagaatgaaattagagtttttacgcggttagaaacgaacctagtccacgagttaatattatggctataagactagaaaagccttatgattttgttattccaaaatttgtccacttgacgtgactcctccacatggcaaaaagcacaaaatacgttgaagacaggtcagcactaacctgccaggattagtgccgagcagcctcttaacctttgagattctatgatgcacagtacacacaagaaaaaagggatatatgaacctgccagcaagatcctggccggacctatagttcatcggccaagagtgacagctcctaagaactaggaagggctggctggccaaaggtgaagaagcacaccaacaattgtatttttctcacaagccttccaactcgccttcagcatgcctacgacttcggaacagtgcaaactgtccacaaagatagggactctccgtcaacaaataacaaccctaatccttatagattaattattatttgctttgtatttcaaatatacgttgtaactttcctattttacagggttatctctctgtacagcttgtaaaccctaatactatataaatggtcatagcctacgtgaaaaagacacgtgcaactaagcccagaagcactatagcaacaagtcccctctcttttctcatacctagtgttataccgaaaattcagctgccatctcagtggaagacacgtgtcacgataaggggaatatggatcgatacaatttctttatatggaatagctcattaattacgtgagtaatagagtatatttataacccgtagactataaggtcttaggcgagaaactaatatacaaactggtactaagcatattggcgagaaaccatatgacgctgaatgcgaattacgaggcatcaaggacaatacacattggaaaacaaaagcgatatatatcaattacgaaagtccttagtgtacaaactaagcgttacagatggatcgactcaagactaagtaagcgaggtgcctgcctcgttatgggaagaccacatataacttcatcctgttagcatcagcgaggctcacaaccctagcaagtcagaagctaacattcaaatgagttccgaagaattcattatacataagaatcgcgatcgacatcagacatgcatcgtcgacctcggaaggaaaaatggccactgctcgctattgagatcattggaaccaagcttctgtcgagacaactctagaaacaataattaaagacgtgatttaaaacacgatcattttgaccaaataaaag

SEQ ID NO: 19694 - DNA, 2998 bp, Cannabis sativa
gtagaattttgaattgcatgtgatggctgttggatctagtaactaaaagtgttatatgatttgggttgtacttagtttggtggaagaacccccaaaaattgatatgttcttaacttggactggctgggttttcggtgttttcgatgaatttgctgatttatctccctttactgctaattgaactgttaaaataggcaaagctttttctttttcttcacatgtataaagcttgttcagtggtttttgtatgttatcataggttaagtgttctcttagcattcttttctgattcggctcaagtaagtgtgattgtgttattgttttgtgtatgttgagcttgaattttattgatattcaagacttcaatcattctactagttgtttttaccttaattaagcgtgattgtgtatgtgtgtctgtgtatcttatgtgcagagcttattgatcttcaagctttctactagatagctttagctcaatttagagtaattaagttatttaagtaagatagagaaattagcttatggtggtgtttatttgttatggttgaagtgatgagcttttatttgtgatttattgtattacagaaatcccaaattttgtcgttctaattatatttttcttacttgaagttaatggagttcctagttttgttctctcttttattaggttatcctttaagtggtctcagattagaattacaagcattccctttttgctcacttgataggacaatcttttactgctaccatacgggtacaatggttgttaaaccaatatagaaatcatttagtaggacacaggtatttaaagttgggggaataatttatgttccatttatttataatcaacatttaatgcttacccactgaagatgaaatgctacgtttaatatttgtttttgcgtgcaagaatgtgcttataactctagaaaatggttctttttttgtttggataatcttgtggttatgaactttatatattgttctgtatggaatttgcagcttactgtgttgttgccaaagaagctgtaagcaagcatatctcaattgcatttttggaacgaatgaaagcagactttaaaacgaggtatgggggtggtaaagcatctacagccattgccaaaagtcttaacaaggaattcgggtatgtatcattaatctcgacaggtactttggatatgcaagtactttgtatgtttcaaactaatggttttgaaaaattgcagacccataatgaaagagcacatgaagtatataattgatcatgccgaagagatagaaaagttgttgaaagtgaaggcccaagtttcagaagttaaaagcataatgttagagaatattgataaggtaatcaactgtgaaaaaaaacaggcagcagctagaggatatattactgtgcctatgacgtttatactgatcgtttgtctgactttaattttatacttctgttcttctaaattatcttttttaaccataaccatatatgttcaacttggttgcaactagaaatttgtgcttcttactttattcttgttaacttctattttcgggaaaggggatgtatggagtttaggtgtttgttcatttgatatgggtggtaaatcagtaaaccacactaaaatagaaaatttcgctttgtttatcctcttccgagttaggagcaagagcaagtcttctttagctagctttagtttaaagattgcattaggcatccaaaatcccgatgttcagatgctccctcttgctttggtattcaaattggagtagtaccacgaaaaacaaaacatcattttcgtacccaacattgcatggtttatggtatttcaaatgcataaaaattttaaatttcattatttttgactccatccataacatcatattttgcagactattgatagaggggaaaaccttactattcttgttgacaagactgaggatctacgctctcaggcaagttgtcgaaagaacaactcactaagaattgttgaatttctcttttaataagttgctaaacagctttactctttgtaacattcaggcccaacagtacaaaagtaaagggacacaaatcagaagaaagatgtggtatcagaacatgaaaataaagcttgttgttcttggagtcctgttacttctggtactcgtaatttggctttccatttgtcatggtttcaactgcacaaattagcaggtaaaattttagactaaagaggagtttattcaaaatatacaggtcatgagcttgaatttcttagcttgtgttgaagaggggagagagagagagagagagaaaaagaaaaagagagatctatttcattctggtattttcttaaaatgaaactgtacaagtgtttgagttcaatttaatatagcagcaatttattttttctaaaaatattttctattgttgaacgattaggtgagatttcttttttggtatatatatatttacgttttattggagattaaaactgagaccaatactgcaaaagtaatgagatatgaatttattcctgaaaaaataatgcttcaagaaaaaagagggggcttattcataattatacaggaactgggcttgaagctgtaaggattaggactcttccattctggttttggttacaatgaaaatgtgtatcatcaaatcaattctattgtttcaagtcaaaatatgccattttcaaaaaaaggaaaataagagaaggatggtatgttcaaaattgatatggataaacggcatttacagttttgtatacatttcaagttttttccttttaaaaagaaaaaaagaaaatggaagactctccttcaatcttaacaacatagccataaaggaatgggaaaacccaagtggcgttccagaatcattctatctttgatagtgaaaagttaagctatcaaaacatcataaggtctttcacgggtaactctggcctccgccataaccagcaccgttggacttgacactcgcattcacctgcttcttcgaacaatttgt

SEQ ID NO: 19695 - DNA, 2924 bp, Cannabis sativa
ggagagtttgccctaggggtccaactcaacattttcgaaaacgggggaatcgccatcggcctatgcacgtcccataagatcgcggacgctttgtcttgcatcatgttcgtcaaaacatgggcggccattgctcgttgtgacgaccagacacatgacacgataacacaacccgaattcatttcggccacactcttcccacccaaggatatgggatcttataatcaaaatattggcataacaagaacagacatcatagctaagaggtttgtgttcgacgctagggcaataaaagctctcaaaacgaaactaattagcgacgagatcaaagccccctcgcgtgttgaggccttatcatctttcatatggagtcgttttgtggccgcaacatcccccaattcggagaaacttcacattgttattcaccccgtgaatctacggccgaaattcgatcctcctctcgaagatcatcattttggaaacttttataggtctgcctttacggttgttccttcgtccagtgttggagaagattattgtggtcgtgagttggtgaagcgtataagagaggaaataaagaagattgataaggagtttgtggagaaactaaaagagggtaatgaagaacattttcatatgattaaggataattgtagtagcttcgtcaggggagaagttgttacgtttgcctttactagtttgtgtaggtttcaggtttatgaagttgattttggatggggtaaccctacatgggttgggtgtccagccctaaattttcataacgtcactgctttctttgacaccaaaacgggggatggaattgaggcctatattagtttgaaacaagatgatatggctaagttggaggctgattatgagtttcaaacatttgtttctccaatattagtatagtaaatatattgggtactattttttataactagctatagttatttaattaggagtgtttacctaagaaaatagttggcaggatattattattatataatctagaatatgttaatttgccagctaaaagacaaaaaaaaaaaaaaaaagtttgtaaaacttattaagctttgtagtactgttgtatattttattaattatgactgtccaaatatatattgcgcaatgtgtttttttttttttttttttctgtaattgagtaaagttttatttctcaaaaaccactatatatagacaatgtacaaattggttgagcatatatactgaacttatcaaaaaccacagactattttttaaactagttttctctcgatcgaaaacctatcacaaattgttttgttaattctacttattacaattactttgaattgtatacatcttcctctcccataacaatatttcggcctcccaaatgtagtaaactatagaatttagagtagcaatatgaacttcactaggtaatttggtgtgtctacacttctatccatttcaaactgattaatattgctacattgtttatgtgtgcactgtgatatataatatgaatagactatttctctcatcaattggttttgagataaaatttcattcattttatcccaaattctaaaatataagagccacttgtgatccgttgtaagtttcaagtgccaccgatttaaaaaaagccatttgtgatccgttgtgagttaaaattctgccgcgcggtgcaaaaaaatacttctgtggtctcccctttaaccctccattcgggacttttcggcttatgtgtgttaatttctagtgttgggatcttttacctgttcaaacatctataatttttctgacatgtttcgagtagagatctcctttaatttatatatttatatattgatattgaagtatttattgatattaattaataatttcatgttataaatatatatagatttataaataatataattattaattaatatatatatagacggtaacgttttttttttttttaaaaaaaaaagcttaaataaaattattaattaatataattaataataataaaatgataaaaaaatatgaaaaataaataaatatttataaacttaataaaaaataaaaaaaaaatagaaaattaagaagagaagaattaataaaactatttgaagtgattttagggtgtcacgtcaccgcctcatatacttcttctttatatatctatacattaattgattgatgattgatattttgatggttaaatattttaaattatagtaatatataatgatatatggatacattagtttagatttacatatttaattatttttttataaaagataataaaaaacagaaatttttaaaatacaataaatatattatagatataaaaatttatataatgaatacgtatagatatattaaatatatagattaatatttttaaagttataataaaaaaagagagagagagaattaaggagagaataatagtattaaaaaattagaaaacaaatatggcattaatcaactaattaaaaaaattaaaaaattgagagaattaagaagaaaaaagaaagacgactttaaagcgaccgttacgtcaccgtctcatacttttcctttatatatatatagacagatagaaaaataattattagttaaatttttttttttttctgttttcaaatatataatacctttattgaagtcatctctaatgagaaaatttaaatttagtgttaaatcaacaccaaaaactactatttaacactaattttttttttcaatttcaatcacaacactaaaaattacacaaaattgtatattatttattattctattattttattaatataataataatatttcaatagtaagttatttctcttaaaaatattatttaattattaaaaatttaaaaagaaaaaatagtgtggtctacagaaaacctactaaatttggtgggacactgtagacaa

SEQ ID NO: 19696 - DNA, 3269 bp, Cannabis sativa
  modified_base (2395)..(2402): a, c, t, g, unknown or other
  modified_base (2555)..(2561): a, c, t, g, unknown or other
  modified_base (2772)..(2785): a, c, t, g, unknown or other
  modified_base (2929)..(2929): a, c, t, g, unknown or other
  modified_base (3191)..(3197): a, c, t, g, unknown or other
tatttatttatttaatttatttacaatctaaatatatatatttagctttataatatttatttttatatatatttattttttaaagctgactatatgtatatatatggatttatgtaaatatttaggaaaaaaataattgtttaatttaaaattaattgttattgtataaatttaatgtgtaaaaaattgatgtgttttaaaaattataatttgttataaaattagttgttattttgaaagaattattgtgtaaaaaatatttaaagaaaagttttttgattaggtaaaagtttatttatttaatttggtattgtaaaaattaattagttgttttaagtaagtttagttatagttataaattgttattacgtaaaataaaaatttagttaaatatttaattattttttatgccataagtttaaggttttattagtttaatttaattatttaattaattattaattgataattttttgtaggtgtttatttgttgtgataccgtcataacaattttgggacgctatattaaccatggtaagctacttaaacttttttattaaagtgtgtaacattattaattttaattatgtttaggcattagttgtgatcttgttcgagtacgttaattggtagttttattagatttggtaggttattaaaattaattgtgttgttaacatacttagtgaagtttaagtattattggtaatatacatatttgtgtatttttagtttatacatattcatatataagttgataatggttataaaaattaaaattttatctacttttactttaatttgatgagtttataaatagaaacttttaatttattattttaaatatattataggtattgggttctttgtgttgattgaagagtgcaaaattgttgctatctttattggagaaatgtataatcactaaaattttaaaattctttatttattggagtttgaatatgttacatattcatccgtagtgaaataagttctgcgattaattatcctggttcgcacaaaatctttcactgcagtcgtacagcacgtgatggagaagttcctaccaaccaaaggtcagatggtcatattgtagtactagcccttgtagcatgttatgtacgaaagactaggaggataaacgttatgcccttacccacatgtttgcctataaatatcctcattttttatgaacaaagggtgaacaatttgatactagctgaacctctgctaaaattcctactatctttcttcttcatcaagagaaacaaaaggagtgcaaagttagggtttatattgtaaatacttgtattacttaaacactcacctacaaggcaaataaaatagactcgtggactaagaattattaacgcccgaaccacattaaaattacccgtctattaattatcatttttttttcctttcttatgttctattgtataagtttttgaaaatctctgtaaacaccttaacttaagagggatacaaatattttattaccatagttaatggttgttctgcaaaaacttggattaatcttgtcaaattaaagtttgatgctcaagttgttattccacagttcataaaatttgtccaaaactagttctatagcaccattaaagattttaggtcagattataataaggaattacaatttaatgaccatttcagtgagcttagaattatgcattatcacttttaagtcgaaaggccttaacaaaattctattgttgatagaaaagaccatcacttgcttaatttagctagagcacttttattttaatcctacgttcctttgatttattagggagaatgtgtagctagtgctgcctatttgatcaataggacacctgcacctaatctataggacaaatctcatttttctattcttcaatgtaaactacctgcatatgagcatttaaaggcctttgggtgtctagcatatgcatctagtttaagtcaaaatagatcaaaattctctcctaggtctacacctttaatttttcttggataccctactagaatgaaagcctacaatgtccttggcctgaacgctaataaagtattcaattctagggatgtatattttcatgaacacatattcccttttgttaatactaattgtattcctgcaacctatgagacttttttctctgagattcctcatgctccaacacctcaactattggattttgtgccctaaataaaactcagttcaatataatcagatttactaattaataaaagatcaaaaatcgttttatgttgcatggctcacatgatttatttcatgattatgtttaatgtataaattctattatgtcaagaacatatataaagatatatatatatttgttcatgattataatatcgtcagtacagtggaatataatcnnnnnnnnatgttcaaaagtttaattctcatgatgtgtcaattcagtagatttagactgacatgataatcggtgatacggtatacttacaccttggataagtgttatgtcctttccaaggcattcacaaagtttataagtatcagatgtatagagtatacnnnnnnngggaccgatattgatcttggataagatatcataaacgtaccgttatatctttctaagtcaattggttgatcttaggtctatgaatcttaatcatgatatggttaggttcaacttatttgaattatttatgttcttcaagttgttcgtggatgctaaccaattgttctgacagatatttacatcttggggacatggtagttcaattgagtgnnnnnnnnnnnnnnagatatggaatctatagcttttatgagtatttagaagtaaaacgataatttccttcgagcttcgctgaatagagataaatgattgatgcctcattttagtaattattatagtttattgaagtatcatttataggtggctaagtnttttaaggataatatacattgaaatgtagaacggtaaatttgtccctatttagggtagattatcaatataggatctttgactattaagattgtaattatggataatcataacatatctatattgtggtgcatatagagtgttctatatagcttagagtgttattcaattccaaatctataatggcacaaggcggaatgaacaagttagagaatttacttggtgaattctagatctggttattgaaagctcagttatataggnnnnnnntcccctcactagttgagatgataccaattgcagactaagttaattgatttttaattaatcaattttaattct

SEQ ID NO: 19697 - DNA, 4045 bp, Cannabis sativa
  modified_base (4009)..(4018): a, c, t, g, unknown or other
actagtatatactatttatgcatataaatgtatagatattacgtgtgtataggaaaattcagatattttaaggatgagtttgaaaaatatcttcaaaatgaaaatgtcgacttttatttatatattatccactcatgaaaattaatttgtacctaaaatttgatatatattagattatgatggtaatgtgactgagacagatcccatataaaattaaaaaaagcctataaaacgattcctttaatttcttcttcttctttattaattttctttttcttcaagatatatatatcccatatatgaaattaaaatttataaacatcaaaatcagctgagaagctttagagaaaagaaaaaaaaaaaaaggaggaattggtactttaataaagcaaactgaataatgtttattgttagattggttatcaaaaatatatatagtaaaggaataaataaaggattccaaacatgaccaatgatgaacatatagaataataattgaataattaaaagtattggaaattatatgttaaataaaagtaaaataaaaagacaaaaaaggattagtagtgccccatatattcggactattatatagctttgaacaactttatttatttctgttgataactttatatatatccaataaataaattgatgatcttctacgtggtcaagctacacttgccttcgtcactttatattaatttctttctttctttttaaaagattaaataataataataataataataataataataatatatcttgaagttgccagctgcatataatgcatagtgatacagataggatatttttttttcctttaaaataatgactcttattattatctaaattaaatgtcactacatgaaaattatcttcaagctaccaaattataccaaagtttattggtcgtaaataaatagcattttgctaccaaaatatagtagcaaattctaaactaataaaaccaaatatttttactaccaaaatatatttagtaggcaaaattttattaactactcattataataattttgtttagctatatatatataccaatttaactactaatttttttctctatagcaaaatatcttttattttaactacaaatgttatttggctagagtcttatttgatttttatggttgaatgctaattgagattgcagtctacttcataaggttgttgtagctatttgtgcagcaacaatttattttatttggttgaatcagaatacttatatctttgagtaaaagattttttttagtttcttatgtgtgaataatttaattagagttatggtaaagcaagattattacttgttaatagaagaaatttttctagagagaccaacaaatctttgattttatttgtaacatgtaagtaagtttgttttttattttttttgggatcgatgctaatttttataacatttgctctgttttgattaataaaattttgctcctttaattttttttttaaaacaaactattgtgtgtaatattttaacgtatcattactacactatgtcttacaggtatgcatttttcaatgaaataaataaaagagattatctcacaaatacacaaaaaataataaaaaaataaaaaaaaataaaattttacggaattttaaatatttttatgattttatttatagaaaatacaatctttttatgttgtactcttgttaatttatcgttgatttttttattatctgtatgttatttagatgttattttcatgttaattttatgtaattttcttgttattttcatattgtttctataaaaaaccgtaaaaatgtaaaaaatatacctttttttttataaaaaatagtaccttatgtaattatttttaaataaaataataacaactgttcttttaccaggaagggttagtactaattcgaaattaaaaaaaaaatgataccataatttttgacaacataacaacaaataaatataagataataccagtcctattattattggggtttttacaattgaaatttttaatttttttcttttttattatggggtagaatttttttcaaaaatactgtgtacgttttatactgtgtattgtgttaagttttcactgggtaagtttaatacttttataaaaagagtatttttgtaaaagaatctgtgtagcagtaaaattataaacttttgaccaaaatccagtatttttgtaaaaaaaacccttattatggccgtggaggatgtacaaacgagcccaacgcccaattaaagacgaaattgggctagtatgggcctgggcttggtaggcggtccacaacacacattctggcgcgaatcccaagatttctgtaccaatcttcttcttcttcgatctcagtctccataattcaacagtcattttttttttgaccttatcttaatatctacgcttaattcatctttatatccatttttgtattattatttttttctttctttctttctgaaatctaagttgtcgattttccattcccattcagtatgaggagccaagatcagcaccaacagcaccatcatcaccaatctagggttttctacgagctcagttctatgatctttcacatcctcaaatccccccctttatccaatcccttcaccaacggaagaatcggaacgacgtcgtcttctccttcatcgtcatcatcatcatcatcgcgggtggcttcgacatcctcatcgagacaagcatcgacgttttcgcaagtctctagcccaacagctttcgcttctctgtttctagggatttcgttggctctgatgctattcggatctgtgacatttgtgattggcttctttttgatgcctctggttatgggtttggtcttgctattctacgccgttgaggttcttttcaatttgtccgaattgggtcgctccattctttgccctgcttcctcttaccgcgatgtccctggtcagtttctccttcaatttctttcaattactcataaacatttagattttgatttgttctgacaatcctttcaatgtgtagattggaatttttcttgaagggaagtgatctttgtcgttgttaaggttagatcatgcgtttatggaagacgatcatacagtttattaacaccattgtgttaaatttgatatgtttatttaattgttatgtattttctgttctcaactatggattatgtaaaaacttgaattgggtttctctaatttttgtttgtagattatgaaagtctcttactttcgtagtcttaatagtagagaaagagaaactccgaacagtgattagtgtcaacttgttgagcttaattataatatgttcaataaattcattttggcattattatcaaatcaacctttccatatatggattttggtcaagttattattagataaggattatcacaagtagctagctagaagaagaataggacgtggtcatttatttttgagactttcaattgtgatagttgttttacacaaaaagaaatgcttttagtgatagtgacaccaacccaattgtgtataccgtgataatccatatgccataggctcactattcgtcaatggtgaccaagaaagggtttaactttttcgtcaatttttgatatttgtagttttgtattatacttgctgtctcatatctcaatcgttcttctccaataatggaattgggtgaatgattaagaggacgtgtataatttttgaagaatagaatgacatgtcgtttagcttggttttatttaagttgaagaagattttagaagattttggtctttttgatacgttcatcgaatttgtcgtttaatgaaaatgatatggcattatcctttctctaaaaaatgatatggcattatctatgtcggttttaacttctcaaatttattgtcgtttgtcctgtgtgaacggcaccctatcccgatgtacaataaacaaaaatggtaaatagtctcataattacctaaagttttatatttgtaagtggtataaactcaatgtttatttttnnnnnnnnnngtactcaatgtttgtaaaactgtaatt

SEQ ID NO: 19698 - DNA, 5260 bp, Cannabis sativa
gttggcgcggtatagtcacaactgggtatttcgagtagaaccgggtttggggctgaaaaacaattctgggataaatgattggaattttattatgtgtgatgaatctaaaaattatttgagtttgtttgtgtatggaatgattttcattcccttgattgtgtatgtgtaagctttttggccctaggggcaacttggttattttgacctttgaattatcttcaataaaagaaaagaactttaaggaaaataagattgtattttctactttctttcccctcaaatccaaaccccccctctctctcaaactcatatatttcaattcttgattgtgtgtgaagaattgcttgtgaattgtgaggaattgaagcttgactcttgctttgtttaaggtagttctcttgctcactttatttgaaattgttgctgtatttattgtttattgaagcatgaagaaagtgttgagttgttcttgatgcatgtggttagagcttcagttgatcttaaagaggttgggtgtaaattgtttggctttgtatttggttgtgtttgttgagctctagatatgattttagggtggtttccatgaataaatttgcgagttacttaatgtttaattgctggaaagttatgtttgaagctatcttgagagttctagttcttgaatgtgagtttttgttgggtaatgttaaagaatggagcatgaaattgtgtttgagtaattattgttgtaatctgaattttgggggtcattattgttggatttttaatgcttgaaatggtgtttcaaactgtctatagaatggttaaaaatctatttgatggttttaagttttggttaagatttgggttgatttggatgtgattttggggctgaaattcgaagttgtagctcgtttttctgggtttggaacccaggggccgcggcccagctttttgggcgtcgcggcctgcccttttgtttctcggcagattcgaatgcatacttcgaatagtcctaactttgtgatctagacttcgatttgggagttctacatactgttggaaagcttgttttgagctttttgtgaatatttgtattttgaatgccaagtatatattttataaatgtggaatcagggattaaccctatatgtgtaaatttcagaatttgtgactaggattaccggcacttggtcaggagcacccagggatttggaatctctacgtttgtgagacatcaggtaagacagtagttagaacgtagagtatgcgcagtggtgcttgtactggaattgatatatgtgagcaattagtaactgggattagggttattaccctagcatgagcggtttaacaacctatgattattaccctagtgatatatgatgtgtatatgctacgccatgttaattatgtgagtaggttaagatttagggttatgtgttcacggcataaccaggttggactcgataacttgaaccgagatgaaccattctaaggccttattgtaattagacgtgtgagctaacacgtgagtctatgccacatagacataaataagtgtgtgagcgtaatacgcaggtctgtgtcatacagacaaatatgaaaaggcgttattacttgtgatgagttaattataattattgatatattatattgtcttgctgggcttggctcacgggttctctactgtgcaggaaagtgtaaataagtttctgatcaaccatgagtatgggagctggacggtgtatgtacatgttcgggccacactagaccaagcgagttggggtctaccagtgatgatttttgaaactctattttgctgcttaggtcggctattggaatcaaacttgtaatattttgtaaattgtttttgggatcccgagacatgtaacttttgtttgtttgtaacgttaaaattgttaagagtttactttcattccatttgcatttaaagtttaatttctgtgcttattttattagtaatcccgtctaggggattaggtttcttaatcatcttgggtagcgttcctaataattagggtgttacaacggagcattgcgaagccatggctaagcaatggaatgactcgcagtatgagctctctcgggttaaaaaggaagctgaagagcaacaaaaggactgttaagatcaattttgaaggtgcctcaagaagatccaagaactcgaggaggaaaaaaagactatccaagctaaagctgaaagaaagcttgaagaggctaaagttgacaccaaaaataatgtcaggaagatttcctggttgtctatctatcaagcttggttagccaatccaaagatggatttcaactttctgggcaaaggggtagaagacatgctagcatactgcgtgaagaccaaaaaagaggaggctaaagatgtagaaaaagaagaagaaggagaagaagaagaagagccaactaagtctcctactatgtaggcttagtctttttattatgtttttttttatttatttacaaaagtggccctttggccgagacaataattgcccctagtggcattattccttgtaaagaattttgcattgttacatggccaactatgcttgttatgcatttatctttacttttaatgcctcgtatcttatttttgaatttaatatatctgttcattgcatcttgtttcaccattttaaacatttatatcttattcaacttattgatactcttggaaatatttccattgtttctattttttaccttgaatgtgcttaagtagttattagtctactatgtatgtgcacgaacagttataatctgcgtgtagttctgattctggagctgtattcatctactttattttatacgagtagttttagtctgccttgttatccacgtgtaatttataatctatcaaacattgtatgaatagttttaatctactgtatataacatcattatatattttttttagagtaaacttaaaaatactttgaataattcacttcaagaactattttgtatattttttgattgatcatataaatagttaggtcttatattcatattttggcttatgtattatttttcaagtcattcttgtgcctcgtttataatacatgtctgaataatgcgagtcattaagtattcaacttcgcatgtatctttatgttgtattatgagttgatctcatttacaactgctactttttgacttttttcctctgtagggaaaggtttttaattccatgactttatattgtcagtagacaattttaatcaattatccttttctttatgaaaaaaaattgaaatgggtttactatatatttctagatgaattccagttaatatacacaaagatatgcccctcaagtaattttaaagagaactttgtaattacttgaacaaactttaactttattaataatataaatgtacataatatagagataaatacaccatttatgtttttaattttactggtaataaggtcgcaaaattccaatggttctttattagcgagcgttgagctgagctaatttataaaccccagttccaattactgcttcaataacgtagggtccttcccagtttgggttaaactttccagcagatggatatcgtgtgtttacaaatactcatcttaacaccaaatctaaaacattaaagagtcttttcttaactcttttgttaaattatcttatgattcgatgtttgtagactgcattagttatttgcaactcattatgtctttcttcaagtaagtccaaggataggttcagaagctcttggttgtctacttgattatagaactcacgtctatgggtcgtaatattagcttccattggtagtattgcctttgagccaaatgctagcgtgaatggagtgtgttccgtcactgttttctctattgttttgtgatcccaaagtacctgtggcagttcatctacccatcttccttttacatcatccaacttcttcttaatagcatcttttaaggttttgtaaatagcttctacttgtccgtttggttgtggtcttgatactgacgagaagcttttgataattgtattccttccacagaattcagtaaacaactcaccgtcaaactgagtcctgttatcagatactattttgattggtattccaaatctacaaataatgtttttgacaacaaaattaaggactttttttgaatgttatggaaactagaggttcagcctctgtcaattttgtaaagaagtcaactgctactacaacatactttgcttctccttgccctgtgggtaatgccccaatcaggtagattccccatattaaaaatgggtatggggaggtatatgtgaaaacctctggcacttgtcgcatctgttgacaaattcatgtgtgtctttgttgattgtcggataatctttttcgataaaattttccaacctgcatgatctccacaaaacccctcatggatttctttgattatttcagtagcttctgcgggtaacacacatcataagggaggcatagagtaacctctcctatacagtttgccctcgactagagcataatgaggtattgaacagaagagtttgtgtgcctcagttttttctgtagcaagttccccgttaagtagatatttgaatattggtgtcttccatgttggcgaggcgtctgtcatcttaacttcttccttttcacatatacttgggtcgttcaaaacttcgatcagtaccagatttaacttatcaagttcattttacgaggccaattttgccagtgcatcgacatttgagttatgttgtcttggaattttttcaaccttaaaataatgaaacttgtccaatttctttcaaatcttctctaagtatttagccatttttaattctttcgcctggttttcacctagaacttgattcacaatgaattgtgagccactatagcatataaaattctgaacttttaaggctttggctatcctcaagccagccaacaaagcttcatattctgctttgttgtttgaagtatcaaattggaatcttaatgcatagtggaatttgtagttatcaggcgacatcattatcgctcctgccccagagccattcacattcaaggctccatccacatataatttccaagtttctatatcgtgcttgacgagtggatcttcttttgagattatcccttcaattagggaatcagccaaagcttggcctttggttgatgttcttcggtggtaggttacatcaaattgtcccaactcgattgacaattttatcaatcttcttaatgttggatatattttacca

SEQ ID NO: 19699 - DNA, 3874 bp, Cannabis sativa
  modified_base (2093)..(2093): a, c, t, g, unknown or other
  modified_base (2153)..(2161): a, c, t, g, unknown or other
atatatttaactaaaaacttctcctaaaatagataagaatttacgagaagtgcccttttagagactaccgaattttcttacattattttattttaatttaatttttaatttttaatttattttcgtctaaaccggttagggttttggtttgtacatatccagtagtactcagtacagtagcgatcactatcggtgtgtgggtctctctcctcactcctctttctccatctctctctctctctctctctcaattcaaattttgggttactgggtttttgagctcaaacttcatgatcacggtttatcactctgatcatcttatacaacatactcactacacttagaccaacgatctttttttgatctctcttcctcattgatattttattcactacttactggactaatgggcaccatggatgttactgaaaaggttcggattctatttttttttttttattttcatttttttgacatttgagcttgagttcactttcatggtggattttaatattttgcttttttgatgatgatgatgatgataatgataatgatgatgaaacaggaatcattggctgatcaaacgaatgagtataagaaatgctgctctgattgtaggaccacaaggactcccctctggagaagtggcccagctggacccaaggtctgtccccccatcctctcctagcctcaaaccctcaaatgggtttatttattttttagtttttgaaacaattttctacccaatttctctattatacaggaatttgatctgggtttttttatcttcttttattgtaatcatcacatcttctttgtttaagatgatttcaaatgggtttttcttgcttagctttgttctttgctctatcaacttattataagtgttttttttgttcaaaactctatctctttctcaatactcaaaacccttttggccttattcttttgcatattttgtattaatttttgtgtgtgttttttgttttcagtcactatgtaacgcatgtgggatcaggtacaggaagaaaatggcatctatgttgggattgaaaaaaggaacagaaaggaaaaaggagagaagccatagtactaataatcaacccagttcttcttctggtggaacaaccattactacaataacaacaacaacaagctctgtttcaaacactactaataataatgttaatggtgatcaaaacgacaagggtatgactcaaacgacattaaaagttcgtttaattgctttgggaaaagaagtgttgactcacaggttgtcttcttcttcttcttcttcttcaccatcagtagtgaagaaacagaggtgtcgtagtaagagaaaaaagttgggtgaagaagaacaagctgcttttttgttaatggctttgtcttgtggctctgtttttgcctaaaaatagtgctctatctaatggtggtgatggggtataaaaagtaaagaggaacactaaaaaatacatgtttgtttaatttgttgtgtgttcttttagaaaaggttcactatattatataaatatatattatacacccttatgttaatgttgttttggggtgcttatctaaatgatatgatagtgtttttttgggagtaaagttaatgaaaaagaaggggtcaaccaaatagtgtttttgtttttgagacttagagaaggtgacatacattccttattaatgtttttggtactatattaattgtaatggtatatatatatatacatattattattagaacactacaatgaatgattggtatatatgtgtaccaatctcaattgggttgtgctacatttattaattgatgacgacgtataattatagtttgatagttttgactatggaaaaataaaatatttagtttgaatttgttggtcgtcttcgacatctttatgtctttacttttttagctcctaaaatgggggtgggtggggtaagattggccgtcaaaataaattggtatgagcaagatatgataggagacttttttttagtgaaaataattataaaattagagctttataataagaataatttcttatgaggtctaggataatttgaggggtatgatttggtagatntcaaagtctggggagcatggtttaatacataaacaatcattgaaacagtaaaattgaatnnnnnnnnncaaaagtctttaaatctaacaatcccaataattcaaggagaatttttaacggcaaaaaaagttcagaggcatgatttgatacatgtgaaagttcaggaaaaaaaaaatcctaattagtctttttttggaacattgttataaaacatcagtagcacaacttactggtagtaatttatgattggttaataatattctataaaaattattatattaaattatacgagttttaatattgatacctaattgtatggggaagtagccactattagtcccaatttaacatttttgatattttgaatgtcttttactttatatttttattatgaattaatgatgtcttaaagatcacattattgatatttttatttgaaggaaaatagaaatatgcacggacatggctcttatagagtataatcatctaaaaaacaaaagaaaagaaaaatctcttaatacctatctcaactaaaggtccaataaatgtaaagaaagtccaaggttattttaaagaggaaaaaggtcttaggcaagtagattcaatatcctttttgctatttgtgctaatcatgtaatatttcactcctctacttattcatgcttcaaagtaaggattttcattttcaccatttatacaaataattgggtctattaatttatattttgatgatgatcttgttattttctgtaaggatcatccacagattgctcaacttcttcaacatgctttttttgagttttgcaaaacctcagggttgtctgccaacaagcagaaatttcaaatttatttttgaggagctagacaagagactaaaaggagcattcacgagtcattgtgggttatgagaaaggaagctttcctttgaaatacttgtggggtccgtttaagacctataagatggagaacatcagattgtgggcctataatctctaaggtttagcatcgcttacataattaggctagtcgacactttttctttgcttgcaatgctcaacttattcattctatgctgcttggtattcgtttttattgaaagaatatttttctccttcctcaaagtgttataaaagagattgacaaattctgtaggaattttttgtggggtaccaaggatagctgcaagctacactttacctcttgggagaaactgtgtcttccaaaataatatggagggattagttttttagacgggtcaaaatagaataaaggaatgatcatttaatacatttgggatattgcttctaaacctgatgctctttgggtcaaatggttgcaaagtatctacttgaaaggaaaaacctttttggcatcactcgacttgaggagatcctaattggcattggaagaaactccatgtgatatatttcctccaaatgtatagatctccaaaagatgtttgttttatagaaagagatgtcatccgaaaggtcgttcacggaagtccaacttgtctttctccaaaaaggagttctagataactagttgttctctcttggaaaggagttctggatggctagctgttctctcgtggaaacgagttccagatggttaactgttccctcctggaagagaggtctggatagttgactgcagctatcactattcctatccaggaagtctcttcactatacgcttcggtctgtcttaaaaaaaagcgtacgtctcattcggaagcactttaacttgaactgacacagagatatttctatgaggagttt

SEQ ID NO: 19700 - DNA, 6340 bp, Cannabis sativa
ggtgctaggcaccagtggtgccctttagcatttctcttttttattaacctcaaataaacaaaacaatttaagtccatttattgcctatttcaaaaagaaaattgttaaagatattatcgctatctaatatcatactattatactactattggtgtaattaaatatcaaattttatataaatttaaaaaaatattactaattaatcgtaaaataccatttataaaaaattactagacaccaagtatgttctttcagaaacaacaatgttatatcagttcagattcatattttgattacatagagagagaaagtaattcttgtttcttactttcaaagttggccaaatttttaaccaactttagattcgttacaagtaaaagcctgtcttggatatttaccttacctttatttattttggttttggtttaatccaagaaacatattcacattcacaactacacatgtaggcacaacctcttgtcagacatgccacactattcctaaacttaacctattattatgtctcattcaagtacaaacgctagggatctcaattgaagaataagatttaaggtataggcaaaatatatagaaatattggattttattgttcatttatttgtatatatacactaaagaaaatttccaaaatacataggtttatatagaataacaattctttttaaagtataaatatatattatataatttttcttttcatagcaagcacataatctgtgcacattatgattaattaattgaataaaatatgagaaattctatttacaccaccacaaaataataaaattttaatatttaaaaaaattaaacttaagataatttttaaaaaattagttttatttttttttaaaataaattgtcacattattttagagtgtaaataaaactcctatggggtaaaactttattatcacattcagatcctagtattttcattccttggacattattcttcaaaattcactttatcccttgtagagaataaatactaaagtgtcgaaatataacgaataacatagtatattgatcagaatctcatgaaaatctatagttgaagaaattcactaccatgagaatattctctttagcaatttcctttcaaaaaaaaaaaaaaaaatcccagcacagagaggataacagagcacttgaatatgataactggttatatttacaagaactaggcatttcagcacaagtaattaaaatggactctaccagtctaaatgtagctcaaagatgagatcattacatacataaaaagtatgtgtagatgataataataataataataataataatgataataaagatatatagcagccccaacatcaactaaagaaacaagaaaaaagaaaaagaaaaaaaaaacccaacttttcagcagcagcaaatactgggttggattctttccagtcccttattataccctacttcaaaacagcaaaaaagaaaaaagaaaaacattagacagcttaaactctagaaaataaagtttgaagaacctggtttctccaaagtattaagatgagcctcccacttaattaccctgcagttacccaaattactgaagcagtaaaagtcttgtgatattgttctggtttcagaggtaccagagggagacatcctgctttggcagtgagtccacagcaaattcaactggtgccatgttaaatggagaagaaaatcttaagtctgcaatattatcattgggattattgtcgaatggagaatcgaacgccttgcactgatcaaactgaacctctgcggatgggaaaaccacttgttgtgatgagatattatttgcttgctcagacatgtttcctcccataacaccctggctgaagaagctatcatccatctgaaattggtatttttgttgtggttgagtatggttctccatgttggtgggaacagaatggttcccaggattcaaacctttgttcctctgctgtgcatttgtgtcataaagtgacataaggtcagagatcatcttctgcccatcttccggaatatcaaggccagtgaaaggagaagattggtttatttgttgaggagccagtggtggcttaggttgggaaaatggtaaggagaagacagctggtttatcattgttaatctgaaagcttggcattccaaaagtttgctgagaaggttgagaagaattgggacggtatgcacaattcatctggtgattgtttctggaggtcctatcgagaaagccaagacggtaatcatgatatggacactgagagtactcacaggtgaatatcttctgatccatcatcatctgtgactcatcacccacttgcttcctcttttgaacaaaatcagggttggtttcaatgatttctcccttaattcgagaagccacttgaggcataagaatcctatcccttgaaggaacaatagtccctatgttgaagcgaccaatatcacggggcttgcattcctccacttcaaaattaggttcatcatccacaccatcaacatcataatcactggtctcactgattacaagagacccattcccagtagctgacataggtggacatttatcaggatacagctttcgggccaaagcttcctcctggtttataatggccaaccaagttgcactctccttagcagtcattttgtcctgcaagcatttggattgacgaacaagcttgcgaatctttgcaatgtcaggagacatgtgcttgatcacagctgtgaggacactgaccttccaagccttttttaagtcatgaggtttcttataaggtggaggcccctgatccttaggcatacccaattgaggccaccactcctcactaccagtaggccaccatggtggggcaatacccttttccaatgggaaacgcctttggggtggatcacagtgctgcatcaaagcagacaagagcgagccaagagtagtgtcttgaagctcctgcagggtatgaggagtcgacgccatggtactgcagtcctcattctgaccagggatggagtgttctgcctggtacctagcaattgcagctggaccattccgatcaaatctaaccttttctttccaccaagcacggagattgtcagaagcaccagtcacaggctttcccttctcaggaataataccatacacaaaaccttgagctttacaaacctccatcatttttagcatgtacttcaagatcccatcttgtgctctagacatcttcttcctccgtgcttgctcctgggattgacgctgctttgcattgtcaactccttgcttccccttgctttgctctttcagccgcctcaataacatcctgtcccgccacatcctcctctcaagctcatccacgtccatctcttcatcgctataatcctcttccacagttgcctctggttcgcactcttgaacctcctctccatcccgagaagggcatgaaataaagtcaaaattaccacagaatcccatctcttcaaaaattcccatttcgcacagaccctcaagaaggaaagaccaaacttatgcaaaccagttattcaacaaatcacaaatctaaacagttccccctctatatatatacacacgtatcttctcacaatcgaaattgtaatgatatcccttatttttacagtttccttgctcaaaatactcagctctgaatcactgcttgaatctgatctactgtaatctgtatgaatagaataacacaaaaacaacacatcaggctcattcaatagataataataacttatcttacagcatgaaactaagaaacaatttacacagatacaaaaattaaaaaaacagaaaaatgaacaacataaacttggaaaagacaaacgtgtggactcatcttttatcaacaacaaaaccattagatttaccagagcagagcaaagaagccaattacaaacataaatcacaactggaagataaaaattctgccatgtaaaaccacagcactacttcaaaaccaaagaccttacacagaataagatgatacaaatttcaactaaattattccatcctaaaagacaatttttaaagagaaaaaatatttattctcttaaataggtataaataactcctggcattttaccggaaaaaaaaaattgtaacgggaagatgtttaatgaatcaaatctagtaagtcgcatacactcaccaaagagtcttaaatttggcaattaagattttttttttaatagaaaattaataaggaaaaaaaggcaaggtaagatgaacagcccttaggcaattaattatgattaaaaggaaagataaaagaacaaataaataaaaaaaaaagatattacatgtattgcttcggacagcaattgactagataattacaatgaaaaaaacaaaacaatctctgaaggccttaagaaatcactaaaaacaaaacgaaaaactgctgatcccagatccagcactccaaaaacgtaagcttaaaagaaaaaagctaaggattgatattgataacagccaaaagtttaaaccttcgagtttacacaaagctttggttatacacaaatctgtaataccaacaaactaagcaaaaaattgactttttttttatcactatattatatatgtacgtatgtatacatatacacacatatttgtcatcaactttcaccacccaattatatattatacataacataatccagtaaaaacttcggtaagagcacacaaactctgtttagccaagatacagatcaggggaaaagaaaaatagaaacaatccatagaagatcaatcacaccacaagatttgaattgaaaaagaaaaagaaaaagaaaaaaacaggaaaagcacgatccatttctgttattgaaacacaaactaaaaccatttaagcaactgaaaaacaaagttcaataaaattaaaaaaagaaaaaaaaaacaaataaattaaacaaaaatgaaacactttaactcataccacagattctcaagatgaaaacactcaaaatggtttcaataaaaaccaaaattacagtacctgacgatgatgatctttgggattaattaggagcctagtgcaagctctccaatatctctttttcacttattttttttcaccactgtccttctttttgaaggaaaaaatggacacacagagagagagaagagaatcaaaacttttagatagagaaaaagaagaaaaagaaaagagaagaagaaggtgaagaagaagaagaagaagaagagaagaagaagggggaggcagtcccagcaacttttcctctctctcctttgttttttacaattatatatttttttgtgtgttgtacagtttttattttattctcttatattggtgttcttgggaagaaccatggtgaggttagattctaaccgtggttaactagagtgtttgttaccttttcggatatggaggactttatggtgatggtcttgggattctctcatgtcttctaacgaaatagtactgcgctcttttttaaccctcatcaaaattttcaacacgttgccatattattgcacattgaaatttgacccaccctcttttttactttaacaatttctcaatatagcaagtttaacaatttctttcattttcattttgttcatggtagaagtaactattttgtgaaagtttatgttatgtttagtttttaagtgcaatttaatatcggattaaatatattttatttttaattttattaaaatttaagtgtgtgagccaataatagtatataatgcactaagaccatgttagcatttttatgtaatgtatataattcataatatattttatgtttaattttatttaaattaaactatgcgggatttggaatttacactaataatagtatataatattttaggacgttgttagtgtttttccttttacatattaggatactactattatgttctattttgtatttaattttagttaaattaaagtatacgagatttggtatttacactaataatagtatgtaatgttcttggatgttgttagtatttttctttttgcatattaggatattaggactacgtttcattttgtatttaatttttattaaattaaagtatgcgggatttggtatttatattaataatagtatgtaatgttctaggacgttgttagtatttttctttttacatattagaatactacgattacattccattttgtaattaattttatttgaattaaagtatgcaagatttgttatttacattaataatagtatgtaatgttttaggacgctgttagtattttctttttacatattaggattagggatgcacatttcccccacggggatggagccccgcagggacccgcccctaatgggg

SEQ ID NO: 19701 - DNA, 3725 bp, Cannabis sativa
  modified_base (33)..(43): a, c, t, g, unknown or other
  modified_base (1648)..(1656): a, c, t, g, unknown or other
  modified_base (1750)..(1754): a, c, t, g, unknown or other
tgtataagagccatgagtccgtgggtgtaaggnnnnnnnnnnngcttgaagcagggacgttacatttagacatgtactaattatgctttttgaaattttcaaatttttaaaaattctcctcaaattattaggattattagattcgaaacttctgtccaagttcgttcaattttaataacgtgatatttttttatgtatcaaattctaccacctaaactttgatatgtacaccatatcatatcttccgaactttgatattacaaaatcgtgtcctctaaacttttattcacgtcaggtatttgttagtaaaattggacgaaaaattcttaaattcaaaaatcacaataattcgagaaaaaatttaatgacttaaaaagttcagtaggcaaaattcttaattagctaaaaataaataaaagtaaagtaaaaactcaaatatgaaaattaatgtttcccttctactaaagaaaagtaaggaaaataatattaaaaacccttaattagtaaaaacaaatataacttattaagtgtatggtatgaattcactacttaccttattttcaatccattttaagtatagtgtaaattagatttaaatatatttttatacctatattaaatttacttgtttgtatatttttggctcacattattcttgaaatttaacatggataaattacttttattgagtccaataccaattttaatcactaaattcatgaaaatgtcatttaaaagaattgtacatttattaatattaattcaataatctcctctgaaaaaaaaaaactaataactatgcaatacaaaattgacaaattttctccaaacaaatatattaatggttcatttgttatttttatatagtttctctaattcaaatgaacttttaactaacacaagtgataagaaattatatttttctttaaacaaataaatacatatattgcatttgcatctaaaaaaaagataaataaatatattgaacttaatgtattaataaccaaaatgtaattaaccatacacgtttttgagtattttaaaaaattattattatcagcattattttatggtaatgttttcaaacttaaaagaaaataaaattctatggattttatttattatttattttggttgaaaaactatgaacaatgattggttgaaatgtgtggaagtatgggaagttgtgtggtcctcaaaacttgatgataaaatctccatttcaaccaaaagatttggatttcatcaaaaataaataaataaataaataaccaaaagatttggaaaataaaaaaaaaaaatgttctcattatgctcaatagtgattacagccatatattctctttcaagaaagtggtactagtagtatgtggtctccccattggatacaaacaaattaaattaaatcacaaaattatttactaaaaaataaaataaagaaaatagaaatttaactctcaaaatgttatatattttcttcaaataataatcatttattattattattttaataaatatagttttaaatttttagtagaatttttatttgtttcggcatcaataaaagttctttaatctaattattttttatgatcgtgtatgttatagttatttaggattacctgtaaattttcaaaaaaatttaaannnnnnnnnatgtcaaaaataaaatttatatattttggtagcatacgtggtataagtaactgtataaactttatttttagcactgtaaattatttaaaatttnnnnnaaatttacaagtgatcctaaataactataacgtatgcagatgtcgaaacagataaaaaatttaccagagaaaacaaccctataagggtctagtgttttttaatgaaagttactaaatttttttatttggtgaattatttgttgattccactagcttgtggttgcatcactatttttgttttattatgaaaaaaaaaaaagtatatagaaaagtgtgacaaaaaagcaagtaaatttatgagtgggtctgttaagtatattttataattctgtttaaataatttaatagtacaacttgttaactttaaaattatataatgattagcttaatattcatttaaattagtttaatataaacctacttatagtatctttttctaggggcactaccaaagtatcattatttgttttccttaatttaaaataaataaaatattatgtggtagttgtaaaaagtttctctatctttagcttctgtaaaaaaaaatataattaatttgaatgaaaacaaagcttaatcttaaattaaataaataaataaaagaatgaaaacaaggcaaacttgaaaaaaaaacatcaataaggatcggttatataaatgctagaagcatatttaaattatatatttttttacacattatttaatttagtcgtaaataattttaagtgcagacaatattacttttaattagttttatgatttaatttagtttggctaattagaatattttttttaaaaaaaaaattatatgtactaaatcatattttttttttaatttttttaggttgttaatatttctttgaattattaaaatcgttagatttaaaattttgttgtctaattttaattatgtaagtttaatgtggatgaaagtttaggaatactatacggacatgttaaaaaatttgggggcactttttagcatattaaagttcgggaggtacaatttagcacatagtaaaattgaacagaatttgacaaaaatttttaaatttaacagtctcaataattcaagaaaaaattttaacggtctaatataaactgacataatttagtacatattaaatttaaagagtaaaattcataattatcccattaattatttaatattgtatgtaaaatatatataatttaagtataatattatatttattattcaaataaaataaaagtctttggatctctttggtcaatgtgatactaaaaaaatatattaatatgatatttttctatataataaaagaaaaatatctgtaagttgaaaactacacaatggattataatttatttatttttttattattttatttatgataaataactttataatattgtgagaagttcgaagcaagtagtagtaaaaaaaatattttttttattaaaaaataatatttattttaggagtatctaataaaaaaagttaattattttttatttttttttatttattttggaagtattttaaggacattgacaaattgattgcatcgatgaagactttggatgctttgttataattatcaacaatttcattgttgtgtagataaggatcctcttattgaaggaaccccaaaaataaataattaaaatcataatttaatttatatatatgtaaaaatatttatgtttacaatcactatacatacctttacgttaataatcattaaaatgtttgcaattattatttttattattttgtagaaaaaaaataattaagttgtgccacatagtgtcaactcaatctcattctacaacagatatgcatgtgcatatataatcttaaataattgagtttcacaataaagaattgttaaaatatattattgtacgtggctcgtccggtacgcactgtattaaggttatattgtattaaataataaataatactatgtttagataaagtaatgtattgtattaattattacgatcaaaatttttaatacaatatatgttgtattatttaatacataa

SEQ ID NO: 19702 - DNA, 3162 bp, Cannabis sativa
tatatatatatattaacaaacacatgcacatacatataaatttaacccaacccacaagccatgcacttactaaaaccagaggattttgagagagacaaatgcagaagatgttgcttaacgcatttgctatagtctctatagggacccctcgtaactggtggtcatcgaatgaacccaccaccaccaccctctgcacgtgactccttgcccaaccttgagtatggttcaagccaattttatttgcttattaactctgcatatagtacaatatttgctatcatatcactaatcgtttttatatatatgcatattaatatttaactcaaaaataaattaacaaaaaaactcatcacattatatcgatgtttgtattttgtgaatatttttggacactagtgtgtacaaatgctgtgacagcagcagtactatctatgatatataattatgtaagaaaaagtggtaacgaaatttaattcaaagaagtggactggtcgggctataatcaattcgtatagggctaagctcagatttctatatcgaacattttattaaatatacgatcgaggactctttttatccatcggaaataagtgaattgtttaaataaactgatgtgtataaacttgtaataatctcagctttttccatatgtgaggcagcaaaaccctgtccaaatttcacgctgaaatatttatttatgtttatatgtatatctgtattcgaattatgttattttggctcgaacaataatccaaaaatgttaggctacctattgatgttacgactcatgatcatttatataagatcccacttttcatcgcacgtgactggatattccattcgatcgataagggtttgaccaacccgaagaccgtatgatacaaatagtgtgtgtgtgtgtttgtattcatatatatataattatgtcaaatttggagcttttttaatattattttctcaacttgaaaatagaaaggaggtggaactccttttacgttgtactgaatgactagtcaaatttggagcctaaaaataaaatataagtgatttgagtaaagtgttaaatggaaataaaatgaaatgacgaaaatgcccctgtgtacgtaatatttgtcgtcggtgtaagtaactgtttcgccgtgcaagcaaggagtgatgggttgctttatgcttcctagtaatgggacaataagaaaaatcgactttacgtgcatggtaagtgatatgaagttccttttaattttactaaccaaacctctaagcatggtaataatgtacgtggggtcacccattaattaagtcatcacaaccaatctaatcatgccacgtggattgacgatatacacatatagctacttacagcttttactcctttgtgtagcacaagaattttcttgctatatatgtgatacattttgttttcttttgctatgcaagtgataaggttatcaagatgtggagtgggtggagcacataaattgaagggactataattttatttttccaccctgtaattgatatttgaagaggatttttttttttcttttctacttcatctatatttaattatataatttttaagagatgagagttaacataagcaaacaaataagaatagttgcaaaattgaaggaaaatgtctagagccgccgcatgcatggaactcatatatatcccatatttttttaattttgatgttgaaagatatataaatatatatatatatatatatatattatcgattacaaatgtcgagtgattggtttgacttaatgtggatataattaagagatgtatatataaatatataagactataaatttttgttcatatatggaccaaaagaggggaggaaaaaatagtataagagggcaaaactaagtaaagaggtggggatttcatgtttaattttattttgattccaaaaattggcattattaagctatgtagagattcttactttgataaactttcacattaagatcaatatgtgggtaccactatactccaacgaaaagtgaaaaatactgaaaaacagctataagagttgtacttttcctttgtaatgttgatacttgagaaggtacttattacatattggaaaatacttttctagcccaacgggttgagctagctagcatctatatgcatgtgtaaataataagctcattaattaaattgattaatttacaattattttatttttctgtccacaaaaatcttaccacttcaatttgcctagttcaggttggagaattaagtaattttaattttaaggctccaacctgaattaaatttttgaatatgaaaacccctaatatgtccactcatatataatagagtatatctattagcatcctaatagtttttcatattatttattatttaaaatatatgtgcatggaattcgattttaaaatacaccaatcatattatactgatttttataatacttgataacattaggtctcctttctttttgaaaaaaggtttattgatggtcaccctcatatatatatcatctaattatacatgatttaattgttatagtaatattacttgtgcttgattcaaattattagtttgtacattaatgaaatattagttatatagtgattgatgggatacaattatctaaaatgatgaaaataattaattgagggaggtgactaactctatctaacttataaatatggatcgatcacaataagagaggagcgtattaatagactaatagtaacccttaaattaaggcaaatgacacaccaatattatgacaatatgcatgccaccgtcctaaccactgttgtctgattgttcacgtttttattctcttcaatcctaagtacatttctaattaagaaaactatataccaatatttttcaatttatatatatatatatcaactctttcctcaatttaattattattattatatatattattcccaaacccctattttttttttattaaaatacatcaactttcacgttacatatatcttcttgacccgaaagaacaacattaaataatgcaggcaatattcacggcttcggaaaaagatacataactgaaattccaatgatggacttaaccaaaataatattaataatagtgcaataaatgtgcgtggttaattgatttaattattattattattt

SEQ ID NO: 19703 - DNA, 4099 bp, Cannabis sativa
aaaatttttgaacacttagaaaaaaaaaagtattgaattattagtattttagaaaaaaaataatcattattgtgaaaaaaataaaaagttgtcacatttcattcctatctcaactcttcatattcccaatcatcataatataactgcacacaaccaaacacaataatgttgctttcctaggtttatgattttcttcatcactttccaagcaacgttaaacccaaattataaaatgaaacctgcgtactaaatggcccctaaaggtttgaatctaggaacagtttgtaaacttagcaacgtagtacttcctcctttgttattgggtactttctcttgattagagatatattcagcatgtaaatttcatggagatttgtatgggatggaaagattcataaaagcttcaaaagaaatagttacacaaacctgttgggtgctcccaccaaactgaatttgtctctgattttgttcacctttcccaccataaacctgcacagagaccagcccattgaaccttaatgtctaaggctaggccctgtttggaacttgaattttttgatggtaatgaaaaaaaatccaaggtactccactttctcatttttagattcaaaaaaaaaaatgagagaatgttttcataaaaaaacctgaggattcaatttaatgtaaatttccaatcaaacactaaaatatattagaaacaagaaaaattggaaaacaaaacatttttccctttcctttttcccacaaaaattttccttatcaaaattcaagtactaaacaaggcctaaatatgcaacttcttgcatgctaagaacatatgtaacaattaaacatacaagattggcaaaactttgaaacacctggatcatgcaaccaattaaaacaataatacattggtagaattgccctattatatgcataaacatacatatatatttatatacatataattatgtatatatataaacataattaacctaaaaatcacttaaggcggcaccagttataaacttgttctttaaaagcattaaacatgtacctaaaaattgatttcacccgaaacttacaaatctgcttaccttgatagttgctccagattcattcctaatccttgatatgttagagccgcaccttccaatcaaaccaccaaccagggtttctgatattaccatctcgaaagttacataatcagctgcaagattggttggcctaaagatgatgtggttataagaaaaaaagattatcaaaacttgatattgccgcgaacgtggcatttggagtcttttcattgagaaaaaaacaaaataaataacctgatgatgggtccatgtaaggtggatgcggtcggactgtagtataattataagctggactgatagatatgacttgtctaggagggttttccctaacagacaaggaaataagtcctggtaagagatactggaaaactacatgcgtaacagcttgtataccatacaaaactaaataaataccttagttgacagcctatctcctctaaagccttcaaaactgcagaaacatcacctgatatctgaattttaagagaagacatagtatcaattcattgtatagataaaagggatattggcgggaaaaccacccgaactttatatttttcaacacttaaccacataaactcattttttatggcaaactctactaaactcgcattccgttttgctctttacacttccgtccaaaagcacttctactgatcatgtgtatagttgtgtacacgtgtcaaattatgattggtccacacaatttaattattttaaatattataaaattaattattttaaaaataatttaaaaattaaaaaaaaaaaatctttcctttttctttttcttctcttctggaaccctcaacaactcctcttcctcttcttcttccattcttcttcttcttcttcttcttctaccattaccaccaccaaaagtccgcctgtgctccaccccaaaaaatctaaaacgtctactagttgaagattgctctgccaaaagcccaaacactccacccaaaaaagcctctatctctaagaaaacaaaactcaaatcagcatcgttacctccgtccacaacatcggcgtcgtcactccatcaggctctcttcctcacctttgtttctgtcacctttgtcttggtctctctctcactccatctcaatctctctcaaactctctttcattggattttatttgttttgtattttataggtgtttaaatggatttgaaaattgtcatagtggtagtggttattgcaacagctacggtggtggtagtgtgattgtggtggagtggtctcggtggtgtggtggtggtggtggtgttaatggtagtgattatggtgtgatgatagcggtgacagtcataatagttgtgattgttaatggaggtggtgtgatggtggtggtgttaatggaggtagaatgatggtggtggcgttaggtagtgtgatggtggtggtgtggtgaggaagaattagggtaagtaattagggtatttcagatgaagaagaaagggtattttagatgaagaagaaaagaaaagaaaaagaaagaagaaaaaaaattctaatttttttttatttttctattttattttttttagattttaaaataatttttattatatttaaaattaaaattatgtagaccattaaaactcacttatcggaggcttttggaggaaagtgtaaagagcaaaatggaatgtaaatttaggaggttttaccttcaaaaaactaatttatgtgtttaaatattaaaaaatataaagtttgggtagttttaccgttaatatccctaaataaaaataccatctacatgttaaattaacaatgttgcaaattagttattagttctcattattcccaatttcatattacaaaatccatcaccatctcactttatccaaatttcatccaaacaatacttaataattcatcatcacatcaggccgagggtaaagttctcactctagatttataagaccacatataaaaccagtacataatgaatacataaattaaagtagactactcacttgtacaactcgatcagattcatgagcagaagcacacaaaggcaactgattctgagccagaacggtaatagaagcaccagatgagttccttaatttctcgatattctgaccagacatcccaattatagagcctgcttgcgacccagcaatcaaaagcctgattgtattcgcagccacatgtccagccccaactttggatgcctctggagtgctatcatcctcctgttatacgcacatatgttaacataactaatatgtagctggctagtgtaagaaaatttaattcttattctctttcctaaaggcttatccaatattgcaattagcaagatttgaattgtacaaattcaccttcagaatcaaactcgcaatttgctgtagagcattctcagcatctgaaaccgagttgtcactatcctttgaatttacaataaccactctttcttcatgtcgctgcaaaatataaagcaattgctacactaaaataacttctcttttacactcattttatcaaagattgcattgaaaccctagttaatgatgctaaaacataccgctacagcgtcggcgattttgatagtggctttgctctcctcccgaatcttctgtattctgcaaccctctttaccaatgaccttgccaatctgcctcgacggaacaacgattctgaacagcacgtcctggcccttgacccgccgcttggatgccgactcatctccatcgcccaccggtgacatcacacccggagaatattcctcccggcggcgctttccggcagctgaatgaccggtctcggatccataaacaggcgcaacgagggtacccaaggggtttaacggaagttcacctggttcagccatttgttagttttcgcggtgtttgtggtcattaaaaggtctcaagccagcaaagcaaaaacccaaaacgattggtgctatttttttcgtgttcgtgtattttttttttttttttgaaaataaaggaagctttattaataaacttctttcatgattacatcacgaatatcaggagt

SEQ ID NO: 19704 - DNA, 2528 bp, Cannabis sativa
cccccccccccttggggcgggtccccatctctaataggtgctgatgtttctcttcttcttggccacaaatcaagcaggctccattccaaagcatgccttgtttcttcaacttgtggattgttttcaatcctttccaagaagttatccatgtgatatatctatgtttaagaatactatacctcttccattaaatgcttgcataccatgtaaagtcctccttacttgaaaacatctccttgctgctcatttttgccctattctaaaatgttgccaaaaaaaattaaaattataagagaaatactaaaaagcactactagtgtctaacatgatccttagtgttatacttttattggactaaccaattgtaggataccacctatagaaggtgctagacatgtccaaaaacaattctcaaataataagcctatcacctagtaagcttttagttattttgtatatttgtacggatcgatcgatatgtggggaaattaattaaaatattattacattaaatacgcaaagcttcaggtttcattcttgaacagtagagtagagaaggaataaaaaaaataattataaaaactcatatgacttgcaattggatgagagctttatattttttggaaaagcaatttaaaagaatataatgtaaaaattagttcttacttattactggttgatttgtggttcaattgtcattaataaaaatctctaattaaaattaaatacttgatcagctattactgttatgaatgtcaaagtgacatatatagaagaacttgtagcacctgtatcttcatatacatcatgactctggtacacatgtgtgagccccagacaaagaggttattcaaactcattaatgtgccactcatttgtattttttgaacaatctaattgacccctaattgttatcataaataaattagtcatgcctgtaccacaaaacaatttattcttacttgaccatctttcactattattgaattatggtatatgtgacagctgaagttgaggtaattagaaaaggctaaatttttaactcaattgatggatcattgttattggaagctacttttccaggtgcttccatatgaatcctacagataaggcataaccaactagttcaaacaaaataataaaccaaattaattaaaaaaaaaaaacagccatcatccttgaattgaagaaaaacaataatatgttactcataatttaatattttattatttactataattattaatttttgtgactattatcattatgcaactttttattgatattaaaaataacgaaaatattaaagtgatgaatttcaacatcaaatattcaacatttaaaagtctcattaatcttaagcaatatgattgaacaatatttttataatgttttgaccacacatctgaacctggcccaaatcgaattctagacccagacacatgaccctcggcgtgaccccagcacaaatctctataacttcgattcgcacccgcacctcgaccacgaattggtctgaaacctgaattaagacccacactcctaatccggaccccaaacccttgcttcgacctcaaattccaaaccacaacgtgaacctaaacctgatcctaatcccgtccccaatcatgatccttggacctttggatcccaaacccaacattgacactaattaatcccgatcccaaaccttggatcctggtcacaaccctcaccccgataaaccaagaacctaaacattagaccatgagtggacccaaacctacagccacacttcggccctaagcctgaacttgaacctcaccaaacctcaatcgtgacaacacaagtcttcatctaactccaaagtgttttttgctaaaccatgagcaacttggttagccttcctccttacatgagaaacaatagttttagagaaaaaagataaaagacaaggaacatcgaggattaaatttgagaaacaagataaatcctttgatgtggagttcaaagcatcagagactcacaatgcatctgtttcaatttttgtaatctacaattgcatctgcaatacctaattaaagctatggaaaagggctttaacttctattttattagagcaaaaagaaccttgtactggcttcgggagagtagcgatcacatgaccagtatgatctcgagcaatcacaccaacacccagtatttttgatgcagagtttagggcagcatctatattaagtttaagcccttgttattttgaagtttccaagatgtttcttctattatgttactggtgacagttcttgttgtatgtacaggagcagaaataatcacaacatgtccttgttgggtgcgtatagaaactgagtgaaacttttccatgtaattcatagcataaccataaatacaggcaccatttgttaaatttccaccatgaaaaaccttgtttctttccatccaaattgcccaaatgacacaaatgatatgtttaaaatcagtttgggaatgtaatgtggaaagatagattaggtaatcaccattatacatgt

SEQ ID NO: 19705 - DNA, 6239 bp, Cannabis sativa
aaaaaaaaatgatccctatatactgtgtggctatcgttactcagctaagaggcctttattttcgggccaagtgggcctgaaattgggatgtaccaatgggcccagcccacttggcagcctctgatattttcctgcaactgcataaaagtattgtcatcgtggcagcgagtcgaaaggaacggactcactgagtcgtctcaaaagaaaaaaatcgtttggccatggaatccttgattaacccctgttctgcaccaataaccacgtcttcttcatctgcttcttcttcgactttcccaattttctttcccaggaagactcccttctcatctagacctgctcaattctctctcgcctccaaaagtaattttctttttcctcatttctgatccgtagaattttattgaatttgaatttgaagatgatgaaatttatctttctgtaatggaaattaatcgttaaattgggtggttttaggtgacgataatgaagtcgatcccgaatttgcgtctaaatatatctccaaaggtgtcccaattatcagtaatcccaatctttccttatctctattctcaaaggtatgattcctcgttttagtttacagaatattattattattatttggtaattgcttgccgagaaattaatcgaaacagcagaaaatatgaagaaaaaaacaatctttgtcaaattgagataatttttttagtttgattggattaatgtatggaattttctgtacaaaaattatggatttttcaggatgcagcaatgggattggtgctaagtgctgcaacaggaagagggtggagaactggttctggtatggaaggtccccctgttcctgatgagactcagagagaatcaagcacagaaaacatctctacttttccatggtctctcttcaccaaatctccacggcgtagaatgcttgtggctttcacttgtaacatttgcggccaaaggaccacaagggcaatcaatccccatgcatacactgatggaactgtttttgttcaggtgagtaatcatgatttgtttgtagcattgttttgaagatatgattatggtcttggaaaagtgaatattatgtattatttgtttgatgatgtagttacttattaggggcatgttgagtaggcaatcttttgtagtttcttgcttctcaaaacattaaaaaagagaacacaaaattgataatgatgctggtaatttacatggggtttatttcttttggttttatagtgttgtggatgcagtgcttttcacaagcttgtggataatttgaacctgtttcatgagatgaattgctatgtgaacccgagttttagttacaagggtaatggttgggaagatatgaatttcaaatacatggagattgaagacgatgaggaggatgacactttccccattcagtaagatggggttattgctattggggttttctacttggttattattctgtattggtacattgcaacttttagctcagtttctcatgtatagggtccagtataagggttttccttttgaaatccagtaatagatattcaatattgtgtattaatacgaagaacatattacagagcaatgtctagtcactaactagtgatagaatatatacatttatatctccagacttaaatgccattgctctaacattgttcaaaacatatgtatacataaataatatatataatgcagttggaggtcattgaagtggccaactctctcttcttcttaatcaatttcattagccagagaattatgaccaacaaagaatccatgatctaattactaatcttctatgccactattatctgatttgatatttgaggaacaggtttgatcatagtactttgaatgaaggcaatcatctgtacagaaaaagatatgtacaaattaatgagagaaaaagaacaacactgcaaattacttctgattaaagtaaagaactcatatcttaccaagctaaggccaatgcacataatgctgaaaccagggaaatgaaatggtgctctttcggataagaataaagctggatagagagagagacaaaaagttaatctttacttcatctctatcttattataaatagggttgcacaaaatatcggccaaactatttaactcgattaatccaactcattttttattgtagggttatgttaagagtacgtcatgatttattgggctgaaaagtaataggacacataattatagggttggttatgagttagacacattttaactctatataactcaatccaacctattttttgagagacgtttaaaatttgaaacaattttcatacataaaatatattttccattcacaaaatatatacaaatataaattttatatttttataaataaattatattgtggtaaccttaaaaagtgaattaacttaaacacattactaacacgaagtttataattacctgactacttataccaacaaatttaatatgagaatcaatcactattattaatttttttttaaaccctatatttttatacacatagatatacgtattgtttttcggtgtatacactaagctaaataattttatcatgtttgtaatataaatattaaagcctaaaatatttatctcaacttaatgaatccaacccaactcacccaattataacttatccaaatttgaaaagtttatagcttatccaaaccgtaattattaggttagctcattaaaatatcctaaccctaattatgtctaacataaaagaatgagatttcctttcctttcgttacctgtcaaaggactaaaaatcaatggagaaatgatattggcaaaagagcttatccctgaaatgcatccttgagcctttccctgataccaaattcaaccaaaaaatgtgtataaaacatgattggaaaacattaaccctttacttattactatgaaataatgttattattatacctgttctccagggccaacttgtttggatgcaatgctgcgtacctggtttaaccaagtgattttcatgaaagttgttggttagtactattgatcaactcaatatacacaatgacacaaatatatagtttttattactgaatgatataaaaagtgatagatgactttactgttgggtttgcaacaacagaaaaaactgataacactgagatgacataagggacctgcacacatatgaacaaggctcacaaacactctcatataagaaaaacaataagattttttttttgttttaattgggtttaagagagattacccatgctgaccatgctaagctgtaaataattgtctgaatcaaaataaaaaagaaggttaaacacactaattcagaatgtgaacaaaagccaagaaaaatgttttaccaatgggaaaatacatacatttatacaccccattaagagtcctatagaaagcaacttttcctctccaataattggtgtaatcatgggcataaaaagtagctgcacaagaatacagaatgatattaatcagagtaatgatttggctaaaatgctacgtgtcggtatcattattggtgcctaacactctcctacgtgtcggtatcactattagtgcaattaaatatcgggtctcatatagtttaatgtaataatttttagcgagtatcgctagtcaattgtaaagtgacacgtctagaatgtactaagcaccactaatacctaataacaatgctcaaaattaagtacataatattgtttacaaggcatacctgagaaatggctcctgcaaccccatttaataggattatatcagcatactgatttgtgctgtactgaaaacgagcctttaagaaatactgtatggccaaacaaaaaaattattccattattattatgacaattttcgataatttcttttttaatataataacttcaacataattcttaatacaaattaatatagaaaatataattagttctatcataacatctttagaacagattattattaagttttattttgacagaaaatcgattcctatttgtactgttttgaaaaatacaaaattaattttgttatttaaaaataataataattttattactaaaaaattatatcattgggatagcaaaatataataataaaataacaaataaacataaaaaataaatataagtttacaacatttattgtgaagttaacaatcttatatatattgtgtgaaattgggtacactattaaaacagattttttattttattttttatcaaaattatattttagcaatgtattactaatttcgaattactctaataataataaaaataatttgtacgtaccaatattgaagatagaattccaccatcagcaagactaaggaagaagaaaacgattactgcttgggaaaatgtcttactgaaacaatgcacaagaaaaatcacacttaattaagagaatcaatatgtaaacataaactaattaagcttaaatactattttacctattccttagcaagcacaatagatcttcaatacttggaaggttcttaaaaacccgagttcttatcgatgatttaatattcttttcggtatcatgttgatcttttaaaataggctgcaacaaaccttcctcattaggcaaactttccttgaggaaaattctcatgtatattgttgcaaacatagatgctgctgcagctacctgtaataataactcctcattcaattgttataatgaaaaaaccctaaacatgagtaaacgatattttaaatactgtattttgtaaaaattactgataaagaaacattatgatattctgagtatgattttggtgaaagtatttttttatactaactactcgactttcgagtcctagaatttcctattccctaattcttataattgttggggttcaattttattctattctaatctaaaaaaaatttgatcaaaattattagatttaaccatcattatgttttttttttgtacaaaatatatggtttaaattgttatttaacaattgttggtaacttttgcaagttatgagtgcatttttgtaatactttttaatcaaatttttgtttttttaattagaaggataaaaatagttttagaaaacatggtctataaaatgtttttacttttaaattttaaaaatgagaatcaaattttgaagaaaaaaaaattactctgaaaaaaattttaaacagattttttttttttaattataattatgtatttttatgttctttcattaatattttagactccgatctcgccgtagacttgaaactcgaacccgaaccccgcacatcgaccccatcccaaacctgaagcccaaccccaaaattggaccctagaccttgacctaaatatgaacccgacctgagaccccagccccgagctcgaacaaaaaatgcggactccacctggacctcagcatcgaacccgaactccagaaccgactaaactaaaagctgaaatttagagaacacttttgttttttattttttaaataaaaaaacaaaaattattaaaaaaacacaaatttgtttttcaaacacagtgtttactaaacgtcacctggatacttacttaaaaaaaaaaagtaaaaaaaaacatactaaggcattgtttgttaggtgggaaaaaggaaaggaaaagaacctgaaaagttaaagaagtggagagaaaacgagctgctaatgttccacaaacataagtagctgaagtcacaccagatagaattccaaatgctgtcgttcttctttcctccgaaacattatctgcctaaaataataataataattaacttcaattttaatcttatttgttatagtaattaattaataatataaatatgattagaaattaattaattaataataagtaccacatatgcaagagccaaacacactgtgctgccatcacaaaccatggcagttagagttctgatcgcatagtatgcataaaagaaataagtggatcggctatacgccaaaatcactgcatgtccaaaaaatatatgtacaaaccatgttagaactaataattaaattcagtccatatataatcaacaacactcatattactttatatagagaattaatgttagaatgcttcatactcctttttaagtttaattaaatatcaggtcttatataatttataatataataatttttaagaggtattgttaaccaattatatggtgacacgtctagaaagtgttagacacaataacaatattcttaattatatctatatatattt

SEQ ID NO: 19706 - DNA, 8562 bp, Cannabis sativa
attaatataaaagtttttatttgacacgatttttgagaaaattctttgattagcaaagattgcactgtaattttaaaagcactgtagcgtgccttagcatgagggcattacagacttaatacatgaagaatggttttcctttgtttataatgaatataataggaaactacattaattctataattgcaatgtaaagaatataaaactaaagtgtgttacctctattctctgactcaatctcacaattatagggattgtcttcatgtcttggaaacaacgagattgatctctcgaattgccaacttacacgcttcgttcgacataagcatgtctgcatcttggtcggacatcctctcgaccatcatgcttgaacatccgagtgttacagatgttaagtaaccattaatgggctactaggaatactttcctccgcccaggtttcggaagtgtgagacacgtatcatccattctcattgtcacgttaaggagcaaaaaagaaaaaaaggataacattgcccccaagtctatgtgggaccttcctggtcgcacgtggacttaactcagcctggagtcttgtctgaataggtgacgtgtgtcttcgacgatagatactgatccgatgtgactctgactaggggtctctttgatatttgaccatttaatgcttattgatagctatacctcgaattacggttcaatatctaagcacacttgacagttgtactccctacaatgagtgcttaacgcctacttttgggggaacccaaaaatttgaattttgaaatgattaattaatttttcagattgcttataaaggactaggaacttttgttgatccttttagccattttaactcttaaaaaccagagcaaaggattttcagctaagttttctcccaagttcttcgaggatgttagggcgcctcaaattacattgagggtttttgagtgaagagttgctctaatgtggcatcttcaactcgagatgactctaaggattcgtttagtaagccgtgttcagtcgtattgtattatattatattaaaatgatttatattttatattttgagtaaattgtagcaaaatccccccaaaagttttagattactagcaactaaccgcaaaacctaaattttggtggccaaactacaataccattagcaatttacactttttatccaaatttaactattaaatgtcatgttggattgatccacgaaaataaataattaaacattattataaaattattttaaatttttatttggttgacctcgaactctttgtgaggtgaaatcttacaccaactaacatggacaaaaagaaaactaaaaaataaaatgatttttttttatctgaagtcgacttttggaaaaatcaattgctcggtcatatttctgttaaaacttacaagaaggtaagaataatggtattttaaaatattcttaaataaattaacttagaaaagttaaaaaaaaaattgggccgaagacgaaggatctgggccaataaaaagcccaagaaagttgagaccttcgtgtctgagctgagctgcgaggaccatatgagactgagagagtgaatggcttgaccaagggaacttctcagctccctcattctctctcaagccggtagtctcttcttcctcactccaatcttttcttttttaattaattaaaaagtaaattaatttccttaggtatttgaaaatttgaccgttgggctgatctaaatacctctctctctccctctcgaaaaaatagccgttttcttcttctgggatctcttcatctcgaagagtgaaagtatctccttcttcagtatctctctcgaaaagtctggttcttcttctgggatctctctctcgaagagtgaaagtattttcttctgggatctctccttcttcagtatctctctcgaaaagtctggttcttcttctgggatctctccctcgaaaagtaaagtaagtgtctctggattttgtgattattatcgtgtctctgttttaataaaaactagttagatttgatgattttaagagatattcaattaaatacaaattaagcaaaaacacagcaatattaacttaaattagtgatcaatttacaaatctatttaaatgtttatgtgtatccatccatgtgtatatatattttccaaggaactttttaaatgtaatgtactgagattagagttaatttcccataggaatgatgtgaattagtttggttttcttggtttgaaaaatacagaaaaaaaaaatcaatttttatatatgcataatgcattacatactgtaatttgaagggtttaaaaaaaattaaatgaaatgaaagatcaaagaattcatttttgtaattgttgagaaaagtacaagactcaaaaccagcaagaaccatatcaaatactgtacaataaaacttagtaagaatcataataagcaattctacattaaggcaaacaggacataatagtaccattctactaatctttgacagacctgaattggtgagccacctttttgacatgtttactgaatatatatatatatatatatatggtgcatttttggttgcagaacaagaaagaagcatcagatatgggtgatgtttacttggatcactataccattcttgggttaccaactggcaaggaaggtgctaagctcacagtggatgagattagaaaggcatataaaacaatggccctgttgttgcaccctgataaaaatcaacatgattcgaaagccactgctaaattcctgaggctccagtcttcatatgatatactcatggatgacaagaccagacaactgtttgatgagcagctaagcagacattttgaacttgatgccaagagacggaggatggattctgatttagctagagttagtgattttcatgtcatgacttgttgtgtttttcaattttattggtaaccttaatattaatggtgtaattctctttgttttgattctgtaattcttagtataaggaagaagaagaagaagaagaagcaaaagcaagagaagaagcaagaagagcaagtactgaagcaataatagcaaaggctagagaagacttaagagcaatagctgaagcaaaggctagagagagagcaagactagcaagtactgaagcaataatagcaaaggctagagaagacttaagagcattaagagcaatagctgaagcaaatgctagagaggaagcaagagcaagagctgaagcaaaggctagacaagaattaagagcaatagctgaagcaaaggctagagaggaagcaagactagcaacaaaagcaagagaagaagctatagcagcagcgaaagtcagagaagaagcaataatagcaaaggctagagaagaattaagagcaatagctgaagcaaaggcggctagagaggaagcaagactagcaacgaaagcaagagaagaagctagagcagcactaatagcagctgaaaaagcaaaagaagcaaaaaaagcagccgaagccaaatcacacagttctttttctgcttattattatccgagttctgaagtttctcttctccaggatcagcttcttgagcttgtgcatctcctttttcctcctagacacccttaattcttaaaggtatagaactgagtaatagttatagtttgctcaagttcttttgcttcttccaccttgtatctatctttgtagtgcatataatggcaattaacataacaattgaaatagcaaacttttagtacttctaaaactatatgatgagtaaaagttttagaatataggtatttgataaaagctctgctcaatattctcagagtcagagattgcaatttatagaatgttcaattgtacataatacagagagctgttagctcttgacagctgtcatacacagaatacaagggggaatattctaacaaccaaatcctaatcattacaaaatgatttgtagatttacatgggaccacacaattaagcacatggttgaatgtatgcttgtctacacactggtgtagattacaccagtacaccagcatatgcagagaatggaatttttctattccttgacacctcctctcaaacggaagggagaggttctcactccaagtttgccaacaaggaaagaaaatcttgaaagtgataaacctttggtaaagcagtctgcaatttgatcatgagatggtatatacctgacttcaagctccttactgagtaccttgtctctaacatagtgcacatctatttcaatgtgtttggtacgggcatggaagacaggattcgaagccaatgcactggcacttaggttatcacaccaggtaattgatggagtaatcagaggaaactgaagttctttgagaagggactcaatccaagatatttcggatgcgacatgtgcaagtgcacgatactcagactcggtgcttgatcttgagacaacagcttgtttcttcgaggaccaagacacgagtgtttctcccagatatacgcagtaacctgccactgattttcagtcatcggggcagcttgcccagtcggcatccgagaatccatgaatgctcagtttgctactacaactgatatgaagaccttgagttttggtaccctgcaagtatctcagtacgcgtttaactccactccaatgcacagtagtaggcgtttgtagaaattgacttagcttattgactgcataagctatgtccggccttgtatgacaaagatactgcaaagctccgacagtactcctatacagagttggattctgcattggttcaccatttcgaatggacattggctttccagctgggattggtgtaggacaaggctttacatttttcatatctgttctgttcataatgtcttcaatatatttggtttgtgtcaagtaaagtccactctcatctcggtgaacttctatcccaaggaaaaaatacagtggcccgagatctttgagggtgaagtttggttgtgaattcctgaacagctttagtgtcattcccagtaacaataatatcgtcgacatagataagcactagcaaaatgaccttagccgatttgtagtagaatagagatgtgtctgcttttgagttgctaaagttccagtcaagcaaagtttgcttcaatttgtcgaaccaagctcgaggagcttgtttcaagccatagagggacttgtttaatttgcagatataatgctctttaccaggttcctcaaacccctgcggttgcaccatgaatacatcctcctctaaatcaccattcaaaaatgcgttgttaatgtccagttgtctaatgtcccatcctcttgagacaacaattgtgagaataatcctcactgttgatgctttaattactggactgaaggtttcaccaaagtcaatacccggcctttggtgaaagcctttggcaactaagcgcgcttttagtctttgaaccgtaccatcaggattcaattttattcgataaatccatttgtttccaatgagattctgatgtggtgaaggcggtacaaggatccaagtctttttgtttttgagagcaacaacctcagtgtccatagctcttgaccagccagggtgcttcaaagcttcagtgatgttggatggttctttgagtgaattggttttggtatggctcaacaggacacgaggtttaaatattccagccttagctctcgtgatcatggggtgcataatgggagcattaacaacctgttcatgaggaggagaagtttctgttggggcagtgtcatgatcagcacaatcagtggaaacaaagtcaagaatttcatcactatgaggagagtaatgcaccccttcatgatctgaaccaacagaagctatggtatcaggtgaagaacaagattgaggggacataggagatacctgaggtgagagcgaaccaggggcagattccacttcaggaggtgctgtagaatggtgttcatgcactgaaccagcagacacaggtgcggtaggaatagttgtccaagttgaactgtgaatgatgaccggttgaggtgttgtgtgagtatttagaaatcctgagtggaaaggaaattccaattcattgaacacgacattcctagaaatatagacacggcctgtggaactaaggcatttatagcctttgtatgactcattgtaaccaagattgacacatttcaaggaatggaattggaatttgtgggattggcaaggtcgaatacaggggaagcatgctacaccaaaagtcttaaggaattggtaatcgggctttctcccattgatgacttcatagggagatttattagctagcaagggtgtaggtaacctgtttataagataaacagcggtagtgaaggcatcactccaatatttcaatggcatgctagcttgggccaagagagtgagtctcatttccacaatgtggtgatgctttctctcgaccctgccattttgagcagacgtatgaggacagggatgaatgaattcgatcccttgatcttgaacaaaagcagaaaatggctgatattcaccgccactgtcagattttaggcactttattttcttgttgaatttgttttcgacaagtgccttgaattgaataaaggcattcagtgcatccgatttaaattttaaagggtatagccaagtgtatcgtgtgtgatcatcaaggaaatgaatgtaaaacctgtgattaatattggatgctatgggggttggccctcaaagatctgtgtgtatgagatcaagcacagatttggctcgatttggagatgttttataaggaagagagtgagctttgtcaaactgacacgcatcacagaagcttttcatttcacttttggaaagttttacattgtgtgattgcaacacttgatttaaaacaggaaatgatggatggcctaaccttctatgccaaatatcaattttagaaacaaaagacctactgacttgggactgattacccttactttttgacacattggtaacactagacataaggcacaacttggtttgaacatctgttggctttgattgaaagaaatttgaaaaacatagctgatcttgaggttgatttagctggtacaatccatctctaagcaccccttgaagtagaaccctccttgtttgcttgtccttcaccaaccaataaccaggataaaactcgattaacacatcattatcagtggttaattttgatacactaatcaggtttttagcaatttcggggacatgtaaaacatctttcaacattaaaacactgccagaattagtgtgcaagtagccattaccaacatgagaaattttgagcttattaccgtttcccacaatgacagattccttaccaccataatcttgtttctgactgagattgttggcatcggaagtgatgtggttgctggcaccactgtcagcaaaccaagcatcactgtcaaggatttctggtgtggctacgaaagcattgtgattattgtttcactgtttgttttgactggaagcattggctggatctgaccccatgaagttttcgtcgaaacggttgtaacaaacagcagcggagtggccatatttgccacaaacttggcaagttggtctcggaccatttgatctcccacgacctctggatctgccaggggtgccacggtttccagagaatctgcctcctccaccatattgttgattctggttttgataggcacctcgacctctgtctcctggagagtggttatttggagaagattttgctgcaatattggcttgaggagttgcagcagtggttttggtgttgccagataaggtttgaagcctttctatcttgctgtcgaagctcaatagaatgtcctaaagttcctgccatgtggtgcgagatcgagcctcgatttgaacaactatggagagatacttagcatcgagacccaacaagacattggtgatgagatgagcttcaggataggggtcaccggccaaggctaaagtgtcagcccaatttttcttttgtctcaggtattcactcattcttgtagacccttttctcactgtttgaatcagtgttcttgtgtcatccatcttggattttgaatatgcaccatacaaactttccaaagcacgccataagtcagctgccgaagctgaacccattacctctatggctattccttctgtcatggagctgtagagccatcccatgagaagttgatcgtttatgatccaattctcaaactcacgattgacctgatattcggttcttgtttctccttcttctgtagttatttcaactgggatgagttcgggtggacatacttggttttcattgaggtgaccgtgtagtctgtggccacgaacaatggtggagaccattgttttccaaagggtgtaattgtttctgtcgagttttagggaaaagggttggcttagagtagtgatgaggggttgagtgtaggctgcaggttgagatcccatgatagcagggacattgttggtgttggttggagcaggagccgtggtactgctgcctgtgttttctggtgtggccatggcgttagccttagatggctctgataccaagtaaaagttttagaatataggta

SEQ ID NO: 19707 - DNA, 8205 bp, Cannabis sativa
ccctgccacactcatcatcatattatactataacaataattatctatatatacattgtactctacactacactactttttttttttttctgctttattatttataaatatattttattatttcagcactagtacaattacaataaaattttatttgtagcgtgcaattaataataatccattgttcagtttggtacttttaattttgagtaaataaacattattattaccttatctaagtcaatatcaaaaacacaggtcaatagaaatcattgcatattaataagaggcctaggatcatcaaattctgttaaagagtcattattgtgagggccttttttttttctagctttcttgacggtgaagtcaacgagctgtgtatataccctttatctactttttttttttggttggttcaccaatttttaaatcttaatttttttaaccaatttttaattcttaattatatgaggtttttatttttttgatttgtgaatttacaaaacaaaaatatttggggtgacaatgacggctgatagtagtgtcatattaagagtagtatataatcaagatattatgataatgaaaactgaaggaagatgtggccaaagaaatttgggtattaggcaggccggcggacaagataatcctgtgaaatcgaaatgtgttatattttattattagttaatctcatgcaaaattgtcatatttttcaaccatattcatataattaattaatatattaatcgtgacaatgaaatgaaagataaagaagcaaaaaaaagcatattagaaaaatgagaagaaaaggaaattattgaaattattaaaaaggttttaaccgtgcttgttagaaattaatcaatcgatcaatcatgtcaaagtaaaaaatattgtagaaaggtacaccccatgatgcctgtaatatatatacattatttatatatatatataaacacagattcgatctgtttctctctcataattcttacaaaatgatactctcttttcacattattgccccttttttttatgagagaaaaaaaggggttattaaacaaaaggtttgagcagaaagaaaaatatatactttgttaaaagtaataaaaattcataccgtaaagatgagaacttgagattttttttcttttttttttttttgggagagggattcagaaagggcacagaggaaaagacagaaagtgctacgtcagagtaagccgtagggttcctttgagttgtggttttgtgggtattgtttttggacgggttgaggattacagagaggtatatctctttcctcacccacatatttctctctctctctctctctctctctctctcaaaattgtaagagctaaagcctttatttttattttctttggtcatattttgagctttattagattttcttggtcttatcaagcatggtttttgaaccatgagcgataaaataaatcactagagggtctggttctgctcccaactgcttgctatatacctctctctctctctctatttctctctctctccttctctttgtttcttttgagctttgaaaaatcaaaacttgtctcttgggctgcagccaaacaaagaagaaactatcaaggtgtgattgtatatatatttatatatataagccagtttaacttctttagcttgagactactactactacaactactactcttttcagacaactaaaaaaaaattgttgccttcttttgggttttcatttgttttctctctccggttatacctttgttttttagcttttaatttatcttttttgtttggtttttgtctttaacaattagatcctaacagtactaacctttaaattttcattctcatcagggaaaaccaaaaaaccaagatctagctatgtgtatgtatatgctcctcctttccatgtaatataatataagttcaaaattaatttattgcatgtgtcaaaaacaaaaacaaagaatatagatcatataagatgatgctattccaacaacaagaagaaagagttgtagcagtaatggatgagaacaatatgtctaatttgacctcagcagcatctggtgatcaaacaagtgttagttcttcaggtaacagagctgaaattggtaccaataatggcttttcacaccaatattttgcctcaccaccacctcatcaatctcaaccaccgcccaaaaagaagagaaaccttccaggaaacccaggtcagagaaaatcataagattacattattactatttttttattttaattttatataaattttgattatatatatatgtgtgtgtatttgtagaccctgatgcagaagtgattgccttgtctcccaagactcttatggcaacaaatagattcatatgtgagatctgcaacaaagggtttcaaagagaccaaaatcttcaacttcacagaagaggacacaatttgccatggaagcttaagcaaaggacaagcaaagaggtgaagaagaaggtttatgtgtgcccagaagcgagttgtgtccaccatgagccgtcgagggctcttggcgacttgactggtattaagaagcatttttgtagaaaacatggtgagaagaagtggaaatgtgacaagtgctcaaagcgttatgctgttcaatccgattggaaagctcattcaaagacctgtggcaccagggagtacagatgtgactgtggaacccttttctcaaggtaattaattaaattaattaaccacactaattatcattatcatttatacagagttaattaatttaaaagatagactagaagttgcttggttttatatattaagaccacaattaaatttaatctattattatttttctttacacacaataataggcagcaacctagagagagaagagtatgcaaagaaagcttagtaaggaaaatgttacagcccacctggtcatcaatacaacccctatatagatataatctgtcctttgttgctttctggacaaaagaaaaaaaaatgaatatatccagaaagagtagcaatactgcaaaagaagagagagagagtcaacctactgctgaattgtcctagacctttgtgacttttttcttttttgttttattttattttaaatttttgtctcattaatttattttcaggagagacagtttcatcacccatagagccttttgtgacgctttagcagaggagagtgcaagagctataaatggaggaccagtactaccaggatcagtcggaacaaacccacttggctcttcttcttcagcaatcttatctcatctaaatctccaaacccaattgttaaataaccataatcatcatcataatcttcatcaccaagacttagtccattccttctccctcaaaaaagagcaacaaaatttcactactactgcaaccacagctgctactcccagtggtaataataacaatctcataaggcaagatcacaaccttccaccatggctagcttgtagcccaacccaaatagatctcacaaattcctcatcttcaatcttctcaccaagatcattagaccaagaaaatttaaacctcctcaattccccaaaccctaaccctagcagcctcgtcccaaatcttccacctcatcactaccaaccgcagccctcggctcacatgtctgccacggcattgcttcagaaagcagctcaaattggcgcaaccatgagcaacaacaacaacaacaacaacaacagtactaataataagaataataatgatacggtggctgctggctcagctacctcgccggtaatgatgatgaggacccaccaagattctggagccaataactttgggctcaacctgtcatcacgtgatcatcaagatcagacggttctaacaacaggtcatgggtttgggaataataataatgataaaagtagtggtagtaacagtactattactaccactagtctacttcaggagtatatgatgagttcattgtcttctactactactggaactactactactggtggtatcagtacctctagcactagtagtaccacacctgggtttcgtgatcatcatcatcataatcatcatcatcataatcacgaccctttcaatggtgtcattctcaatagtgatccaaaaaaagatggccaagatccttctcatctcggaaaaaccaactccaccgcggccgcggaaagcgggggtggtgtcggtggtaatgggaatcataatggggaaggtttgacacgagatttcttgggtttaagaccactttctcatactgagatgttgaacatggctgctctgggaaacaccatcaacatgtcccataatcctcaccaccaccaccaacaacaacaacaaaataatcaaccccagaaaccatggtaatatatatattatatatagtaaggtttcaggtttgttcctcaatgtggaacctgagctcatctctttatatactctctctctctctctcctttttgtttattttctaaaggaacataataactttgattttcataattttggtatatttatctataatttttgtcgtcaatatattttatattagatatatattcccgaagggaaaggaataattacgtacctgtagtttttttaaatttgttaacgtttctgcttttataattagcgaactccttttctctaattttaaattaatttcattaaaatatagatgtatatgcaatttattaaacctctcacaagataattaggtcatttaattagctttcttgttagaattacattacatgcatgaatatatttataaatatttatatatgatttaataattagtggacgcgctgtgattaagaaaacagaatatatattatatacatgatgtgtgtacatgtatatatctgtacacatacatatatatacatacatactaattattgaaaataatcaagggaaaactatatttaacaacgtatatatatatatatatgctcatatatatatatatcagcaagcctttcaaaatatacaaatactttggtttttattaaggttaactctatttctgactatactagtctacgtactcgtctcttttggtcaataattaaattgcttttattttctaattaataataaaaacttgttaatagatgtaggttaatatatgtatactagctaattcttccgtgaccctaacaaaaaaaattcaattaatttgcatacatatccctttttttttttatcgatttgaacttaattaattaatatattcatgtcagagacagagagcagtaaaacttacatttgcgtacggcgcactaattttagttttttttattttttttttattttcctaagttattagtttattacgcagtatactaatattataacatagtttactgctaagtgaattataaaaagaataaatatgatttattcctccccaaattatcaccatttgttgaattttgttcctgaatttctattgcaaaaattctccataaattataaaaattatatagcactaatgtaacactaatttagcacattttaagagtataaacaaaaaattaaatgtataaataacagtttaactatgaatgttaataaattagatttcgaataacttaaagctatcaaataggttattagactactattatacctataacttatatacacataaataaattgtttcaactttcaaaattatgagcaatgtaactagtggggcatattgcaacaatatatattttacataatttaaggaaatgttcacaacaatttagatagtttaagaaaaaagttcaaaaaataaaactctcatatttcaaggaaaaaaatcctttttattcttataaaaatagcttgtaagtattattgtaacatataatattatatatattttatagaaaatgatgatagaaattaaaataaataaataaattataaccaggccgattttctgatatatacatacatataatgccaatctggtactcccatgcatgcgtaagcatatagatttttatatatacagatatttcacaccattgaaataataacaacatatttcgagcaaaaaaagtgaactacatacacttgactcactactttttcgctatatatagaaatcaaatcatacagcccaaaagaaaagtcatgacaactatacatgaattgaccccaatttcttcttcttctttttttaaatttttcttaaggcattttcgttactgtaaaacaaaaatttccttaataggttgacttcatttctgcccttttaatttgctacataaagtaggattttcttttcattaaagagaaaaattaaaagatcatgagcttgttatcccaataaaaatatagctgtggtccaattggaacactttgaaaaatgtgaaaaaagcaacgaaataattttaaaagatgatggtaacactgaaaattaacatttaatattattaggccctattttttcaatcaaatttattggaaatgtgaaaatcctaaagtaactagctttgaatatacgatggcataagtaaagaattgatatttcatgctgtatatatatattgaaaaagtattagtagatatactagatcgatagaggtagatgaatattatagaaaagtacgtttgattggaatacaaaagcattggattctcttaattattgaaagattcgtaaaatgtgagcaagtaagttagttttttttttaagaaatatatattggtttttattggaaaacaataaataaagggataccttttgacacctatcatgggtgcaagtgggggattcaatctcgaggatggatcattttaaatctttgcaccaagaaaaaaaaatactatatttttgaatattcctaattatatatatctgtatatacagtgttcatatttttacttaatcttcttctgtgattaatatatatttatacgctctgatcatgtatatattgatgaaaaaatgtatatatatggggaacgtttttattagtaacatgagggtgtgatgcatattataattaataattattagatagatctaataattgtaggcaaacagcatctgagtaatcaatcaaatcgacataatgatacaatcaaaataaggtatgattagcctatcattcaaatacacaaaaagtagtacagagatataaggacaactttacatgttttcgaaattataatatcagagttgtataatatatagagagatgcgattaatatccctataatattccagatcagtttaggtttatctatatgtaaactaggatagcataagcttatagcttaaaatatttagtttgaaatatgtgtggtcatggcaactgtccttccattggtttcagaaagtggcatacaaatatatatattttatatatatataaagattcctggattcccacttctctcatcacatatatacacatgtattgtatatataattataacttgttaagagagaaagagaagatagctctttgagaagacacacatgccaatacccttattattttctattatatatatgtatggatctattgggcaatgggcatgagagacaggagggagtgagcatgtttgtcacttcattaaaaaactctttattttgctttctatagtagtatacatattattgtattaatcaggctgtatggaagagtgggggtatgtttgccctttcaattatcattattaattatttatattatatctcttttttaattactcgccaaatataattctacataggattctttcatattagatagaatgataatataagtcaagaaacagttaaattttcagtcaaatttacctataaatgccttcataaacaaacgtacacatgtttatgctaaaaatgaaatttcgatggtggaaaatattaaaatatatgtatacagtataactaattataagtatatctttctgctatctgaaaaagaaatatgtataaattacgctaagaaatacatatataactattaaatattgaacacacacgagtacatgttttgtacataggttaaagtgtgtagagacaaagacaaatgtcctaacccagaaaaaagagatagacatatatgctttgctatatatggtagctttttctgtctaggaaggagatttaaataactggagaaagaatattgctcttagcgattagtatctaacatttttttagaggtaacgtacgttagtactatat

SEQ ID NO: 19708 - DNA, 20690 bp, Cannabis sativa
  modified_base (8862)..(8862): a, c, t, g, unknown or other
  modified_base (17484)..(17500): a, c, t, g, unknown or other
  modified_base (20541)..(20549): a, c, t, g, unknown or other
aaatcgggttcggttgtgcatttctaaaacctaaaatccgaaaacctgaactcgaccacccgaaaacccgacccgtgtgcagccctaccccatacaccaactgttggctcacgtgcggtctgtcaacgtgaatagttctatgtgcagaactcatcttcaacgaaccaacattgggccttaagtccaatatgaattaacatggtaatctatatacactcttgcaaataccccatcagtgggctcaatatagaaaatatactcacacactctatgaaaagggctccaccatcaccattcagagggttcaaaactcagtattaaactttgtcaaattgtattcaccatactattgactcgtggaataaaatttaataaaacctgaaccatgttataaaagtcttctacatatttcttttaattacttcttagctcaattttttttttattcagttttcgaaaaactcgatagacaataatactaataaagatttttacacaaaatatttaaaatcattttttaatttgttttacaatttttttacaggttttttacttgttacaaaaaataaagttattttcatgtagcaacaatatgaaagcaatattgtttttaaaaataaccatctgtgtttttgtaagaaaaaaattaaaatctatttaaattttaaaaaactgtagatgcacatcttggtaaacttttggtgatttttgagtatttataaaaaaatcccttaataatattaataataaggcataagtaatgtttttatggaaatgataatctttcatattatgtttggtatgaagattttttgttttaagacttggaaaattaatacctggaactaaggtaatcttaagtcaattcaactaaataaattaaatcaattaacaatgatgtagccaattggatgagtgatcgattatttggtttgcactcagagcattttccatttttataggaacttatgtacctacaatgtatctccaatccgtttgagatgtaaaatatatcttctcttaccaccttaaatcttcctatgtacaataaaatataacactatggtttcagacaatatccactttgctttaatatattaatcagattattttgatgataagtggtatttttaaaatgggccgaaggagagaccggaaatatgggcccagtcgatcggaggcatagttgcatagtagtgcctagatcgatggctgactgagatattagccaagagagaaagaaagaaagaaacaaacttcttgtgattgtttgtgaagtaagattcaaggtccctctatctaacccaaatttcaatcttttcctctttcgattcaaagaatctatcaacaaatattgcaattcaataatccaggaggaagtagaagaagaacaacaagaagaagaagcttcgattgatcaacaatggcggaattcatgaacctggaggcgcaagacggagttcgaatgccctggaacgtcatgccggggaccaagcaagaggcttccacttcctgcgtcgtccccgttgctgcaatctacactcccatcaaatccttccccaatatgcctcttcttccttacactcctctccgctgtcgtacatgtcgctcaatcctcaatccattctccattgtcgatttcgcagccaagatctggacttgccctttctgcttccagcgtaatcatttccctcataactatgactcaatctccgacgaaaatctccccgctgagcttttccctgattacaccactattgagtatgacgacaggagcgccaccggatccccaacctcgccccctgtttttatgttcgtcgtcgatacttgtattatcgaggaagagatggcttatctaaagtcttcgctttctcaggctgtcgatcttcttcccgatcactccctcgttggcctcattactttcgggacatttgttcatgttcatgagcttggttttggcgagatccccaagacttacatcttcaagggatccaaggacatttccaaggagcagcttctcgagcaattgagcttcttcctcaagaagccgaagccgtccgttggtgtcattgcaggcgctagggacggcctctccacagatgccatatctcggttcctgttgcctgcttccgagtgccagtttgtactcaattcggtattagattagtccttgtttccatatcacactgatgtcccaatttcatgaacgtatgtgaattgagttgcttttgttggtctgagtaggtgttggaggagctgcagaaagatccttggccggtaccagctgatcagcgcgcaccaaggtgcaccagcacagcacttggtattgcagccagcttgttaggagcttgctttcctgggactggagctagaattatggcatttgtgggtggtccatccactgaaggacagggcgctgtaagtagttgctgattatacttccattatttggttaattaaaattcagctatgagctttaactccctgaatacacatcaaacgattaacacggaaatatgaaatgtacagcattcaaacttggtctccagtgatcatcattaccagtaataaaactgctatattattattttgagatgaaattcattatgctttgatatgcaaaatgggtttccttggtttttcacctcaaattttgttgacagtagctgtaacttcgtaaaaagattaacacttgaggttggatgggtgagagtgtgtgtgagtagtcgggactgtaagttcaagtccctgcgaatgtatcttatgtaaaaaaagtgggaaaagaaggaatgttgttcttatttagttatataattactagatagtgaatcaccttatatcctattttagcaataatatattgggaaatgtaataggacaattattgattattatatattaatcatattttaagcattataaattatttagaatattgcaaaaaataaagttcaaatattttgttgttcccatttagagggtttcctcttgctttttgctttctttaagcgcgacaagccgttgccatggttttggcatgagcattgctcaacatatcgaatccgttgctttagggggtgacaattcgtgttgacgtgtaatatttgcgttgatgtgttatattcgtgtttctattatgcatgttgacatctgcgttgacgtgttatttttgtgtttgtattatgcatgttgacatgtctaattggtcaacccttagccgattcatgtatattttgtgtcaagaaatgttaatcctaacccgacccgttgtgttggcatgtcgacctatcgtgttcatttgtcaactataattatctacaccaaatattgattaatattattagtatcgaatgtttgattatatgtatatttaattgtatttaggggtgttcatttgaccacatctaatatttttaggcttatgatcctatccaattatataggttagattttaccattcgatccgatctatatgatttcaatcatccaatcgattcaacatttattggatgttggataggatcggttctattcattggatgtgattttgcatctagcaattgcttgcttacatagtagacggggtgttgtctatcctggtcttcgcgaataagcactgagctgatcgcataatcagacactgcgaggtagattgagagtacttctctaggcaacgtcttggagagtattgggagttgccccaagtgcatttttagagcctgaaaagcttcttcacatttgtcagttcattgaaattttttattaccttttagaatctgaaaagaattctttacattagttagatgaacgcgaaacaaaatgatttaaggcagcgaccttacttgtgaggctctgtacttccttgggcttagtaggagatcacatctctaattaaggtttaatctttgcagggtaggcttcaattccttgctagttcaccatgaagccaaactttcatgatcctactccaaagacgcattttagcgggttgagtcgcttcttgcattagcacacgattttgaacattgagtgtagatgcgcgacatgatcggttgcatgttgaaattttacgagcatgttgaaattttacgagcatattgtcaacatatacttctatcgttttgcctagcagatttgcgaaaatcatgttaactaacctttgatatgttgcacttgcatttataagtccaaatgacattactttataacaatacaaatcttggtctgtaataaaggaggtgtgcttttgctttggttcgtacatcgggatttgattgtatcctgagtacgcattcataaagttgagaagctcatgccctgcggttgcataggtaagggaaaactatctttcaggcaagctttatttaaatctagaaaaatgacgcaagtgcgccatgagccattaggctttagaactaagacgggattggctaactagtttgggtaaaatgactctttgatgaagccgcatgccattagtcggtttacttcttctattagcgcttggtacactgtggggtctattttgcgacgcttttgtcgtactcctcgcacatccgggtctatgttcaagcgatgaaacatgacctcgggtggaattctgatcatgtttgaatgttttcacgcgaagacatccagattttgttagagaaaggtcaccaacctttgcgctgctgcaaagttaatttaaaaccaatttttaaaactttggaattatcaagggaatcgattggtacctctatagtttcttcagcagcttgtgcggtgtttgtgtagttgaagaccttagggtccagatcaagctttttctcatgcgggatttcttaaattctaaatgattcatgtcgaggcggtggtgccttgagcatgtatatcatgtttactgacttcttcttttctgtgattttaactgtagcattgtaacactcccttaaatctgcttgaacttcccttactgatcctacacctgcgggtgtagggaattcaattgaaagatgatagattgaagtcacgatcttcatttctttcaaaatagggcgacctatcactgcgttgtacgtagaatgctggtcgattactgcaaaatctgccatagatttcgcggtgacaggtgatttccccaaagttattggtagtttgatcattctttttagttcgattgtatctccggtaaacctgtagatactcgaagtcaccggcttcaaatctttttcatgtaaccccatttacttgaaggcttgtaaatttaaaaggttgatggaattaccgttgtcaacgagtacgcgatggacgttgtcacctccaatattagcgactacaaccaaagcatatgcatggggatggtgcacctatctcgcgtcgctttccatgaaagtgatatcatcacattctttcttgaaaagctttgctggcctcttgcccaaattattcacattcgttaacggtttctccttggttgctttcgcataacatgtggtctacctatggtggtcaggatattgcgaggagttttagaaccactcgcatcttctgtattgtctgccctatccgctcgggattggtctctccattcttcttatactgtccgaaatgccctcgtcgaattatttctttgatcttatcttgtaagaaccaacattcgattgttgtatgattaatatccttataatacttacaaaatttattcgggcccctcttatcgcgttttttcctctaattgggggtggcttcctaaaaacgcttttgtgctttttgatggcatagatgtggttgcgagagacgcaaagctctgtatagttgacaaaacgcggacctccttttcgctttggggaagtttccttcctagttagggacttagcaagctttgggcttcgtcgccttgtgggactatgtctttttgggctgtgcctaggattgcgtctcttggaactttttaatcgcgaacttggagacctctgtttttctttgcttttctcgagttttgccagcgaattcttaatcctcttatggtgctctgccatgacaaaagactcgactagggtttctggttgtcttgcctgcagctctttccaaaagtctgtccttagcaacacacctgtaataagcatgcaaacaagcaaagacttggaggtcttttccaccttggttactttggcgttaaaacgcttaaagtaattttgtaacgaatcacctgcatcctgcttaatgtttgctaggattgtgtatgacgacttgtatgtcatggtcgcctgaaaatgggttagaaataaatccatgaatgtctcccatgttgagatggacacttcaggtaattgaccgaaccaatcatgtgcgttgtcctccagagttgcgtcgggtatacgacatttagtcaattggggtacctgatcaactttcataatcgtattaaacttatcaagataattgataggattagtgatacctatatacttgagtgattcagagagtctgaagcctttatggagcctggcctgtcgcacttcttcggcgaagggtgacgtttcatgtagcttgtatatgggctttaactgttgctcaatcattctcagtgttcgcaagagattttcttgatcgacctctcttggcagaatgagattgttggtaagtgctgtttggtttcttgttggcagtgtggccattgttgctagttcgtgggtaccactacgtcattgggtgcagctggtgcgattggcaagtttactgcattcgttgcatgtttgcgttcgcagggggataccttgatccggccaattggggatcatggggttcctcctcattattgcaattccttggagtctacgatcgggcccgaaacacttcattgaggcaatttcgtaggtcacctctatgtacatgatatctttctcctagccttgtaaatattatttctggcctggtataaacactaggggaatgactatcagttctcaaagaagaagagtgagagtcaccatcgtttaccttagttcgtggctgcgcacgatgggttgtgttgtttagggtcctcttcctgtggtctttcctcctttcaactaggttttcgacttgtatcaggagcaacgggccctctaccacgtgtagagtcgcgaaggagttggtttaggtcgagtctttggccattttcgcctaaatgttccctgcaattataagcattgttaggacgttcattacgacatctagtgttatcagttacgtgattatcatcgcgacgtcgattggggattcgtggcggatgtcgggcttgaatttgatctctcctcgcgatctctgcttgcaatgtccgtacttattcctgcgaggttatgagcttgataataccctcggatgtaacgacaggtgtgaatggtggaaaatgccccacactggctgttggtatcgaagtttctctagcatgtcttgctatttcatgaaacagattgagggggtgacacgagtatgccctactcctcctataacggcctcaacaggagttgtccctccaccaaaaataagaacattaatagtctcgacgttgaaggatccagtgttgttgtttacgtttgtctgatctgtagccatcttgactctactaaaaaaatctttagaaacacttcttttccacacatagcgctaaatgttgtcggaagaatttggacaacactaaatttgtgagagtattcaaagagaataaggataccttattacagatgtgcgagtattcacttagaacagcgaatactcaaattattggctactagataaacaaaataaaagcataaataaagaaaaaagaagaaaattataatggttcagtcagagcttagtatacttagtccactgttgcaaggattttttgctttgtttatttgatttggatcactcctttatatagaaagtaagtgtcctttaggattacatagttgatcagtttataactgttttttcaataaattatagtatttaatcaaagtaaatgcctaaagaataaatgaaaaacaatttaatccgttcttgtattaagtgcagcaacatatgtaacttgataagccgcgagttttctgttcatattccaacacacgagctcgcaggctctatggtgtttgtactcacagggtggcctttaggcctattgtttgaatgtttgcgttcatttttgatcgcatagacggacattccatgtgttgacaacgtagaacatgcgagtccctgacggtttatcgaacacattagtcactcggaccactcctgtgtaaagaatcgatctttactagtcacaggagaggtctacttggtcatcgcatataattggcatatatgcgaccagtattaaatcctcttggtcctgcttattcttttgactatgcgacacaccgtatgcagctagaccctgtctcggtcgcatcttcttgcaagttctcaccaaacgaggttagctcataggagctattttttaacatgtcatcctttctatcaggaactgggtccacatgtcagttttatgcgaggctgtactcgtacttctaggcgaaaaattcgcactataacaagatgtatttcatatatatttattaatttaatttgaatttaacaaatatttttagacctagtatttttttggatcggatcgaatccattcaatattttaagtccagaatgtattggattggactggatccatcaaatccaaaaaaaaaagagtataattttaatgttaattttcatatatatgtatggattctaagtattacaatatgaaatataattactcttccaaattaaatgaaaatactaattagttcgattggatattggatgtattggatttttggacagcccatccaccatccgatccgatccaattgnatatttaaaaataacatccaatccaatccgatcacaattgaatatccaatgtttggcggtcggttgtaattgaatcggtcggttctcattgaattgggtcgatttatgcacaccccttgtattattttgttagactcatttgaataatacacttgataaaaatatataaagttgcaaataaataatataattacttaatcttaatatcaagtggaaagaagatatcttatatttttttaagtaattttctttctattttagattttttttaaaatatattgaattgatgtcgtatcaatttcgtgtcacacaggttgaccttaacttaacctaactcaacccaaataatttcatgttatttgggtacgactcaatttcaacccacgtctattttttatgaccttaactcgcaataatttgcatcgagttcgaataattcgtagcgagttcgtgtcatgttattgtgtctaacttgaattgcccccctaggttgaccctaacttaacctaacccaaccaaataattatcgtgtcatttgggttcgatccaatttcaaccccctctacttttcgtgaccctatcctacaataattcgtatcaagttcgtgtttgacaatatactattttagtgccttattgtttcttgtaataccttgtatattgtcaattagtagttcaaaattgcacattttcactacttttggtatacatattttagacaaaagacttacaaatatgtatatttttttcattcaaattcttttttagaattaaaacatgtttttaaaattttctcaataaaacatttcttaaaattagtgaaaagttacacttttgagcttatttacaatatacaaagtattaaaatggtattaagtgcacaacaggctaccaagttggttccaagagaaacagttggattctaaattggtgttagtcccttatatattgttgtgtaaattataatcttgtgaaaagactccaactattgtgcatcattttcaaatgttccaaagttttgatagttttggtgtttggtggccgaagatttattttgagcaaagctatgctattctgtaagttaaagtaaatagcagattttggatcacttgtggcttttggacttgttcgaaaatgcatagtctatcttcaattgagcattgtttcttagtggcgggtttattcttcaaatattttggttttgcagcctttgataatcctgtttgggataattaacagaatatcttatgatttattattttggagaatttcttgctccattttggctgtgcttttgtgcatttttctcttgtttctttgtacatctgttaaaacttcctggctccgtttttaatttctgtatcaatattataattatttctagtattttaactgaattttttctgattattgatatatcagctgaggtgttcatgttttttctttttggtagattgtttcgaaaaatctatctgaaccaattcgttcacacaaagacctcgataaagattctgctcctcattttcataaagctgttaagttctacgagggactttcaaagcagcttgttaatcaaggacatgtacttgatctttttgcttgtgcccttgaccaggtaatttttgaatcgttctttgttgttcctttattgtacaccctatcttaaacattcgattaggtaatagagaaaattattgatccaatatttcttggacctctatgtagaattctcaatattttcttgccttgttcatatttattttcccctaaacttcatttggtctctctttcaggtggggattgctgaacttaagggtgctgttgagaaaactggagggcttgttgtacttgcagagagttttggccattcagtatttaaggattcgcttaaacgtgttttccagttgggtgatcaagatcttggtttagcagcaaagtaagctggaagaagttcattaaattaacaactattggttaaattgcacagtaatttttaattaataaattttggttagggatcaattccatgcttattattttttaaataaaatattttgttgacttcaacaaactgtttattattttgttttttcttggttaacgtaatttctggtattgttatatattttgtaaatactaatttgtgtgatctgacttttgaacttcttgcagtggtatatttgagataaactgctcaaaggatgtaaaagttcagggcgtgattggtccttgtgcatctatggaaaaggtaacagactattagccagagtgttatggtgaaatctttttaatctgtatcaattttgtgttcttactttgtttactttgtgcagaaaggtcctttgtgttctgacacagttgttggtcagggaggtacaagtgcatggaagatgtgtggccttgacaaagatacatcgttgtgtctaatgtttgagattgttaggaaagaaaatccagatgggatggttccatccaatagcaatcagttttatttccaatttataacttagtatgaattcccacttacacgttcttgagtaatttctctctgttaagctagcaatagcataaaagcaaatgcttattgttcttataagatatttttctgttccagttatcagcatcaaagtggtcaaatgagactacgtgttacaactctgtcaagaagatgggtagccggacaaggaagtgtacaggtgagactttccttttgatgttccttgatgcgtgtttaatttatatttaaaaataatatttctactgttggatacttttaccgagattgtttcccaatgtaaacacttatttattctaatttgtaatttcatttctctgctttcttgtgtggcaggaattgatttctggatttgaccaagaagcagctgcagcagtcatggcacgcttggtgtcttttaaaatggaaacagaggtaccattcatttcaataactttttgctgctctaatgcttggaaaccatatgctcttgcttcatttatatattgataataaaaactattggttccgatggtcttacttttgcttttttttttttttattttctgaacgagcaaacaagtacaactataaataaataaataagcaaacaaactaattaattaattaatctaggaagagattttctacttatatttcggaaattcggaagtaatgttgttggatcaaaatacagatttgttttacacattgaatcataggcatgctggttacaacaagttatctactcgaaattttatttcaacttctgttaatctcttgtctacattcaagcttgtggttgttaagttactcgagttcgtacatggaaaatgttatagtttgctgctctttaaatattgtagggttaggccagaagccccatttttgaactgggggccatatcgagtttgggacattttcatggtttataaaagaaatggatacttggattttcagcaacatgtagaaatactaaccaactaaatttccttttgtcgtcttcagctcatgtgcaagtgcaatagcagaccactttcctctaggtttttagaatgtaaaaatcctggcaagtttatagtaacaccatttgagccttccaataatagtctaagccatctcattagtttatctataagaaaaagataaataattggtttctctttggcgtatgtggcaaagaacttcagcgctctctgctgtccttaatcttggattgaataattaccttttcctagtgaggataccataccttgtcctcttttctgttatttcatttcaaaataaatatggttgtttgtttcttatgaaaacaagattgagaaacaacctctaaagctaaaaatgatcactccctttccatcacaagcttcccaaagaaaatctctcatgattttctctaaccaacaaattacaccaactacagctttgtataagggcaaaaggtgatttgacatcaagtgttatttttctatgtttgcttccatcaagtctctttgcacctgtgctaatttagaattcagatttatttggcaagcctaagcccctcattggctacctgccaagtcagtcgtgtttaaccgactgcatttgtaaccatttttgttgcatgggattcatacacaaaattgtactgtatttgagttgatgcctgaaatattttatttttctttttgttttttgtgatcatgccttgtgtatttttgatgaagcttaagtatttccatttcaggcagagtttgatcctatcagatggttagataaagcattgatacatctttgctcacggtttggagattatcaaaaagacagtccgtcttctttcagcttatctcctcgattatctatattccctcaatttatttttcatttaagacgttcacagtttgtccaggtatattagcgtttacgttcctgcattgttttatctttcaaaagatttcatttggttgttatcatgctgccatctaataaaatctagtaaattaaatacgactcattacaggtgtttaacaacagcccagatgagactgcgtatttcagaatgatcctaaatcgggaaaatgttgccaattcagttgtcatgattcaaccttcgttgatctcatactcatttcattcaaccccagaaccagcacttcttgatgttgctgccattgcagctgataggattttacttttggactcttattttactgttgtgatttttcatggttcaactattgctcagtggagaaaagctggatatcatactatgcctgaacatcaggtattctcttttggtagagaatttgaaagatatctcatataagtattttgtactcgtgtagtgattactattagtctcatttattgcatttacacatctagcaactacaataatttatcttgtatgtcctgctaagctttttgcatcacaactaactgcctaccttctttctcctccttttcttcctactctaacttggtggttaaatttgttttggttgcaaatggcttacttatagcatatttcttttgccatcatatattatccagcaatggcggtcaagtctctgttcttatctagctgagatatctaattcacctagatcttgggttaaatgaatatacacaaaaaattataagaaaagtttaaaaaatcattcaataaagttgtcatgttgaatcatgaagtatgagctcataaatgttttgtgcttgcaggcatttgcccagttgctcgaagctcctcatgttgacgcagatgcaatagtcaaggaaagatttccggttcctcgcttagtggtttgcgatcagtatggttctcaggtattctgatgtttcacacacttacgctttctcgtgttcaacggtgttaaaatttatttttcttccaggttatttgtcggttctattacttggctgctaagttatatatatagagcataacttgatgcatttttgtgtacatgtgtaggctcggtttcttttggcgaaactgaatccctcggctacatataacaatgacgcacctctacctggaggggatgtcatctttacggacgatgttagttttgaagtcttcttggatcatctccagagattagcaattcaataaaaacacgtgagaatgtctttgtagttttgtaaaattcttttcattttaacatttttgtctgtacagttatgcatctgactgcttcctattatttactagcattgttttggtttgggctctatagttttgccagctacttcatatttttcttttctaatttattgtgagtggagtcagttagggtaaattgtggtcaaatcttagattgaattataaaaactttccacccacatcaaaatgaattgtcatactattcaacctcttttgtggggattctgttttctatcttttaatgttactgtgattcataaacctcttatcgactgttaaatgttctgtacagctatgttagtttcgtacactaacgtttgataatttttcatgtgtagctatgactattccaaacgtcataatttattgactataatcttggaaggaagatgtgtattgtgaaataggtgcaaaccttgctggctatggcatgaatatgtacacactacacaaagcgttaatgttacattgacattgttactccaattatatcagtattactcaggtgtatggtacatcgacaataaaataaatgaatttggggtaacatagaaaaagtttctgtttgttgggagtaattaagcttcaacaaacattttcttcacatcttgtgtatcttattccttgtaatttcagagtatgctgttcaaagttgtacggaaagccattagtttccagcaatatagtataaaagattacatattcctttagaaaaacttattatctactcttgtttttctagatatttatgagaaggggatatcatcattccctttatatttcactattacgactttcattttcctgctgcatgattttggtagcttcagtcttatagtagctcatgaatttggctataaactctgccaagaaagaggtgtacaaatgattagtttatgtagaaatagaaactatggtactttgcaaaatcataaaacaaggtaataatatggcaattgatctatttattaggtggtgattgatttagttattgagataccttcaatcctcatgtactgctgagcattagtactctttcttgtatgtgcaggccctttgctactctccaaataactctcatctattctctgcgtacaacaatttccccgaattaagattattatacgtgcaaacttacgtttatgtaagaagttttatttatacgtatctccaaagctttggtttttaataatcttacactgtattccgcataaagattatgaacccggctcttaaacgtctcatcatccaaacgcttcatcacttcttctgccaatgactgcattaacaattgccgattattacaagtagaacactcaacaaatgcatttatttatataaaataatatgtaattcagaaaaatattgtgtacctggaaaataagctcaggagacacatcatgctctacaagattttgaagctttccccggatgatatataatctgtcatgaacaataataataataataatatattctcatttggaagttgacacatgatttttctcttctagctagctccctaaagactgaaatatccaaacgtgacgtgacagagaaaagggtataatacataatattgtattttgtttttgtatagcttacagttttgggccttgctcttcaatcatgttcttagcaatattggcaatatcatcttcccaaccattcagaattacttgatcttctgtaaagggataactgtgataataataataataacaataatgtgtgttataggacaacatatatatattttatgcattcaattcaatgcaatgcaaagatatcatcgaaagttttgtgtatagttttgcttactgttttagccaagttgcctcgaatgaacgaatggcttggcgaagattttttttagaagcatcagtaatcttttcagctaatttatcaggcaaatctatctcttccttatcagcaatgagcttcaaaactttaattatctgaaatgtatgcacgaaaagagaagagttgctttaataatttcttattaattactgtatatctaatctaagtatagttagtatatatataatttctacctcagttcttgaagggggtaagagttgaaccacagtgcaagtagttttaagggcctgaagctttgaagcatcggaacagcagaaaaagatcttattacacacattatacctttccaacagccacttaatgtatagaatggcgtccgatgatagcttgtccactccataaaagattattgctgttgtaacatatataatatacatacattttacaaaatataaaataaattggattttccctctaaattttaacaactaaaatttttcatatttgtaaaaattctcctaacactgttttatttattgaattgtaatggtattgcttgagttaatttcagtcatatatttggctaacgacatgcttaaaaatgatgtattttcctctcatatgacataaagaaagtttatttattaaattttaaatattattttttttttctaaaataaaaagttaattttccattttaatttactaaaatgaaatataaaacaaaattttcattatatttttaataatttataattagtttttttaataggagaaaaaactaacgtacgtacgactcacaattcaataacgtgcgtgcatgagcaggagtaaaaaggtatatttattctagagtaatttgcagcataaatacttaaatttaactttcagttaattttcagttgcaaataaatatctaagtttaatttttagcggtaataatacctaagttatatttctgaaagtctgtaggtacctaaccgttaaatattaacctattaaatctacatgtcattttcttattcgtatatttgaactaattttttttttaaataataaaaattaaatgacttggatcaatcagggattgtcacgtgacaatttaattgagcaggtacttatagaagttccaaaattataacttaagtattannnnnnnnnnnnnnnnnacttaagtatttatttacaacttgaagttaaacttaagtatttatgtcacaaattactttattctaatatatagtatggagaatctattatatattgtaaattagtataatttaatatccacttatatattttaattcaaaataaaatacatagaataatcctattgacactccaattaactaacaatgttagttatatacctcggcagttgtctggtagtggtttgcatggcaaagaggggttcttgtgagatacaccttccatgatgagttcgtaaataacatgcttctcatagcctttaatatctgaaatattaatttctaatagccgtggacaattctttactagtactttaatacttcctacttcttcaccctataatataagcattaatattaattctaaactaataacaattgatatgatacacaaaacattatttatattaatcaaatgattatacctgtaaactgaaaactctgaattcttcactggcctgtaaaaagaaaatagttgatttatcacatatatattttataataagtttttccatcagagagtaggatacagaattgaataattggacgataatttataatgtgtttttgttatgaaaataccaactactatatatatatatttatatattaaaagatcaatctaataattcacatggaaaaatatataattagtgctaatctagcaattttcatattttgtattaccttcgtctcttatataattcactcattttttgttagggaaaatatgcaccatattatttgtaaaaaatatatttataaggacactaacgattttttttttttaatttatttaagaatttgagatgtaacatttttttttacaatgcattctgtattatgtccaccacgcacgctatttcaccaacaaagagccataacttctcatcaatggcgggcttggcgaagacaatgacagagtttgattattgctgagtgagctccgacatcaattctaaattctctaaacacgtcgttgatgtacgtagccgcgatgccactgacgacgacgaacaaataaagcacagaagaggtaattcatatcaagttttatatattttataatttccatatgaatttaattaattttatgtatgcttttgaatttatttttatttttatatgttagtttaattttgatataatttaggtatacattgagtatagttttaataatacaatgatgaggattgaacacaagttaatagattttgagtaagccataatcaaataattagaagaaaaataattgacacgaaatttattgtggttcaactcctaatttcttaaaagttatgtttttcaagagttattttctcaaaatatacctctttacaaatgagcaacttagctatgtagtgtctctaatatcttccattttacttgaaaaatatttgcaaataaaactaacatttcaatttagatatctaaccaatccaacatcagttataatattaatataaaatttaccaataaaataaatatctaaatttaaactctaaatactcctccaagaaattcttgtgggatatctgaaacctctagactattgaacaattactctcatacctgaattggatggatcaaatcatttaaacatcatgccaaatatatgctccaagacctcacatttaagccatatgtactcgaaccccactttaggtgtgtggttggatgtaataaaatagaaatgaaataatttttattatttaaaagtattagaatgttattcccattctagatctagttatgttttcatttcttctaaccaaacaacacctacttggaaatacaaaccccttgtgggacgtttggtatgagatttagatttgataagaatgaaaatataaaatttcaattaattaatttgaatagagggtttgtgtttccaagtaggtctctctttttaaattaatatggtggtaatattaatcccctcaaatgtatgggtttcatattccctccaagtctactcttttcaactcaaactcacgtaacaaacatccaattaggtggcatttgattggaatgaataaaaacatagctagaataaaaatgacagtctaatactttaaaataaaaccaaacaaatgaataaaataaagttatttccttctattccattttcatttcattttctctaattaaaccctaccttagtcattaaaatttaatttaagtttgacattctctatttccatcaaatttaaacctcataccaaacaccttaatgattgatcactcgggtaccattttaatattgctcccacaatgccccgagaccaacctaaacttctcatacccaagtctttcatactagaattaagcccaggtaccatattgcccattgctccatgtttgtcaattttcttgacacataaccgagccttacatttccttttaagggctcgggtacatgttgatcatgtatgctctcataagagagccatttgttgaccatatgtgctcccttatatgggagccctttgttgatcacgtgtgttctcttacgagagctactttttgatttaagcggttatatattacaaccatgttttacctgggactcgaacccaggacctccaagacacacacgcacccacctatgaccacttgagctagcctcaagtggtttcttacgagagctactacactttagaaataagctcccgaattcgagtcacttctctttggagtgtgatgggatttgaatattgtgacttctcattataatcaataacacattgtattttgagcataaatttagttatttttgtacgtattatttcagtttctttttgacatgttttaaaattgtaatagtaatttcttttgaggttgttttattatttttttttaatttattttgtattgatatctgttatttttaattaattatcttttggtatggtattgcaatgatttgatttatagttgaataaatgtttttgtttatttttttaatgcaatgaagtgatgtatataaatatatatatatnnnnnnnnntatatatatactagataagagttacggggcgagccacttaaatattagttttatataagttttagtggtttttgtttaagaatccagtaactgagcaacggcaacaacaatggtagataaatctatttaagtttttcatat

SEQ ID NO: 19709 - DNA, 1953 bp, Cannabis sativa
ttttttttttttttatataattgatgatgtggccttgcttgtgtctctatagatatcaataggagagtttttatctcatcacaaagtaatgatttttaaagcctttaggcattgccaaacttgccttaactaacctcctaactttccttattatgcttacttatttacaaggaaaaggagaagagaagaaaagaggtagctaagtagagggaacaaagtgattttcaggccaaaatctaaaccccataagaagaaagggtgataatggagacctcacaactcttaacatgcaaaggtatgtaatgtaagaagtgaaagtcatatctatatttattcatatattcagggacgaatctatgtattcaatatgcctctcaaatatattttttcaaaattaagttataattttgtaatttttttttatattttattataaatttgttttttagctccctaaaaatattttttttgcactttgcccccctacaaacatttttttgtctctctccctatgtatatatatatatgtattgttaatattaattaattagttaattagtatgttgttgtgtttgaatttgagttgttgttaggtgtggtgtgttggggaagtggggaggcaccaaagttagaagagatacaagttgaggcaccaaaaggaaatgaagttaggttgaagatgatctatgctagtatttgccatactgatatctttttctgcactcaaggattcccaatggtctcttctatatcttcttatatacataatagatagggtaatacttttggaccttgtattttgtaaaaattatcgatttgatcttctgttttgttaaatgacaaaatagattttatattttttaaaaggataaaaataggaccatgagctcaatttttgactattttttttaatataatcaacttgaagacaatttctaacacgaacatatacaaaaaatattaccagttttgtcataacatcttttgattggattattattaagttttattttaataaaaaatcagttcatggtcctatttgtaccattttacaaaatacaagatccattatcatttaacattaacaaaatagaagataagatctaattggtaacttttacaaaatacagaattcaaaatagtatttactctactctatatatctcaaaattctttcttttgcttattgattatgataataaagttgacttgtgtggttgagctttccttttcttcttctacaaccactttttcctagagtaccaggccatgaaggtgtagggtatgtcaaatctacgtatcttaaaatatttatatatatagtaaaatttctaattgaggttattcttaaatagagtattcttatataaaggttctactagatacataaaaatgatctattttcaccaattacttgacgtgatacaatgcagagtagtggagagcattggggagggagtaacaagtgtgaaacaaggagatttagtagttccaacatatgtgtctgagtgtagtgagtgtgaaaattgcttgtctgacaagacaaacatgtgcctcaaatatccattgaacattagtggcttaatgcccaacaacacttcaagaatctctgtcaatggccaaatgttgtaccatggtttttcttgctctacttggtcagaatacactgttgtggatgccaactttgtccttaagcttgatccagctcccctcaacttgcaccatgccagcttcctctcttgtggcttctcaactggttttggtgccccttggaaggaggctgcgattgaagaggggtcgtctgtagctgtcattggccttggcgcagttggcttaggggtggtagaaggctcgagaatgcgaggagcgactaagatcattggcattgataagaaccaaagaaggaaggagaaaggagaggcctttggagttactgacttcataaatcctctt

SEQ ID NO: 19710 - DNA, 2093 bp, Cannabis sativa
tgtcaagctgtcttggatatctaaaatgcagcactggtggtagagtgctctctgtagaatatacagacagagtgggggaggtagctaagaagtatggtttgaagcttcatatcgatggagcccgaattttcaatgcagcagttgtgagtatacctttatcttattacaatttttattcttttactaaacacttacaaatagtgagttggttggcactcttgaaaaattataatggtgtcacaattaagttgatagcgatcacttcaaaacatgagttataactaattgatcctttaaaaaattcagaaagatgtttcccaacatagaagtttagtgatgactttaataattgagttataactaattgatcctttaagaattgattttcaccattattttaaatggttatgctctggcattttgcttttcaaaataatctcttatgcctctaattgaaaaggattggttcacaggcacttggtgttcctgttagcaggcttgtgcaagcagctgattctgtttcggtatgatcaccaacattgtcattcttacttatttagctcttttgggtttttcaatggctgatttatttaagaattgtttctgttttatggtttgttctaagtaaactatgctgcagtactcactagtctcaaatgtgtgtgaacaaaccaggtatgtctatcaaaaggtctaggggctccagttgggacaatcattgttggttcccagagctttatcaacaaggtaagaagaacactactaggtttcacataggactacacaagtaggactggttatgaaatatgaatgaatgactgaactgcttttaattatgatataattggtccttatataggctagaaggttgagaaaaactctaggtggaggaatgagacaggttggcgttctttgtgccgctgctttggttgctatccaagagaatgttgcgaaactcgagtctgatcacaagaaaaccaagtttttggcaggtattaacaatgttaattagtattagttaagttattttacttatcccaattaacttatgttcactttatccaatgaatgatgttgtgagcttagatgggttaaataaggtggaaggactagaggtggatgttgactcagtagaaactaacatggttagcattctcatcaccgaaatttctaattgttgccatattttgcagcaaaatttctatcggtgagaacatttacttacattttatttattcatttttcaatagattttcatcgacatactcgaacactccaagttgaatgcagaaaagcttcggaagaagctagaagagcatggcatatttgtgatgcaagaaagctcatcgaggtatggtgttgtacagaacagaatctcagctctaattcagatggttaattgacatgtagtggtaacaacattcattaacgtctttttgtcttttgatttcagaataagaattgttatgcaccaccaaatttcattcaaggatgcccaattcaccttgtcatgctttcaggtggttaaatatcttaaaatatgaacaatttttctcagtggtttactttttgttgttgttggatatgctgactttggttttatttctcttttgttgtaaaattatgcagcaagctctgggtggagtacatgaagaaaatggcaactagttggagaaccaaacaaataaaatgataaaaagtgcctacctcttttcccatgaggaggattttgatcttcttcatttgaaatatcatatatgcttaaatttggaatttaatcttgtcaaactcttgacattgattaatgtgttattaattaaaataaatgcttagacttgtttgaaccacaagtttactgaagtggatgattcatatttcataataaataaatgtttgggaatttctattacacggaagattacatgagaagaaaaataagaaaaataatataagacacaatgaacacaaagaagatataggtttaaataaggttcaaaatttcgaattagaaatcattttctctcacatgaagacttaggtggtgtttgattgggagaaataaaaacataagaatagaaatggaataaaattta

SEQ ID NO: 19711 - DNA, 5865 bp, Cannabis sativa
ccgaatgaattgaaaagaggagccttaaatactgttagtagctgacatgtccagcacttaacagcccaacaaattagtttttaactaacataactgactttcccaaataggaaaggtttataatagaaaacagttatgtaacaactgttaggagacaaaacaaggtttagttttaaatggattatattccacaaattccaccttaatccatgtaaaactgaacctaaatcaatactagactacacttgggggagtgatcctgtaaaattagtaaggaccaacgttgagcaaatccatacagtgttggaatttgctcactggcaaggcctttgttcctgcatcagcaggattctcattaattggcaccttctcaaggttaatttcaccatcctctatcttgtctcttatccaaaatattctgatatcgatgtgtttggatctctcatggtacacatgatttttgcttaggtgaattgaggattgactatctgaaaaatacagtcaccttgcctttcatcatattcaactctcctagaatttctttgatccacacagcttccttgaatgcctctgttgtttccatgaactatgcttctgtggtagagagagctacaactggttgtagttgagatttccaacttatgtagcttgaattgagttcgaaatagtagctggttagggattttcttgtgtctctatttgatgcataatctgcattaacaaatcattcaagttccaccttgatccttgttttcttgaactttattccatagtgagttgttgtcttgagatatttcagtaaccatttgactcctttccaatatcttccccaggatttgacatgtatctgctgagagtgctaacaacatatgcaatgtcaggcctagtgctaatcatagcatacatgacactcccaattgctttaccatatggtatttccatcatctgttttctttctttgtcatctttgggagattgattggtggagaacacaaagtgtccaacaaggggaactttggtttcttttgagtcattcattttgaatttccataaaacagtttcaatgtacttgccttgagttaataacatcttttgattcttcctatttctgggtatctcgactcccaaaattctcttagccacccctaagtccttcatttcaaattcacttttaagaacatacttaaacttttcaatttgattttgatcctttcccatgattaacatatcatcaacatacactagtaaaaattttgcaacttgagagttcaagtttgtaaagtaaaggcaggtgtcatatcttgatcttgtgtatccaacccttgtcaccactgagtcaaatttcttgtaccattgtcgaggagatttcttcaaactatatagatatcttttcagtaaacagacaagctcaccatcttttgattccaccttcaatccatcaggctgtctcatatagatggtttcttcaagccttccattcaagaaagcagtctttatatccatttgctctatgttccaatcatattgcatagcaagagccaacatcattctaatggttttcattttgaccacatgagagaaaatttcaaagtagtctacaccttctacttgagtaaaccttgagctaccaatcttgttttgtacactattggttcatcatctgtcattccttccttaagcctaaaaatccacttgcaaccaataactttctgtccttcaggtttgagaaccacaacccaggtcttgtttttctttaacgacacaaaatctgaattcgaaacagtattccatttcttagcttgtttgctgttgatagcttcaagataggtctttggcactttgtcttgtgattccattgccatagatagagcataggcaattatatcagcttcaacatacttagcagggggtcttatttctcttctaaccctgtctcgagccaactgatagtcatccaaaacatcactcatttcatcaggttctgcatcagtgtcttcaacattgtctggtgtagtttcttggtctgagatgactcttcccaatttgagttgagtgctaacttggacatcattttgtttacctgaaaaattagaaactacacctttctcgtttcttttaaatggaaaattattttcattaaaaataacatctctactagttacaattttatttgtttcaaccaagagaagtctataaccttttacaccagtaggataatccaaaaatatgcattttattgttcttttctcaagcttgtcttctacattgtgtgcataagtagcacaaccaaatattcttaaatgagacagagatggaggcttacctgtccacagttcttcaagagtttttagctcgatttttctattggggctcctgctaatcaagtaataggcagtatgcagtgcttctctccaaaagtgtttccttaaacctgcttctaataataagcatctaactttgttaagtaaagttctattcattcgttctgcaatatcattttcttgtggagtctttatcaaagttttatgtcttcaaattctaaactttaaacacaaataagtaaattcatcattcacaaattgtaatccattatcagttcttaatactttaattttagtattagtttagttttcaacaaatattttccaattcttaaactcttctaaacagtcatttttatgtcttaacaaaaacacccaaacttttctactaaaatcatcaacaatggacaggaaatattgtttacctccatgtgtttttatcctgctagctccccatagatctgcatgaatgtattccaagacagttttggctctgtaattgcaatttgagttgattctatgttgttttccgtgtacaaatatctcacaaaatgataggttagcatgattgtaattctttagcaaaccttgtttagatagctcaactatgccttgttcaccaatgtgacctaatttggcatgccataattttgattatgtattgcattttttaacagtagcaacatgtgcaggtgtcacagtctttccatcaagataatacaagccatgtctcttggtttctttcaacaacaacaaccactgttgtgatcacagagtttgagttcttgaaatctttgaattcttcctgtgctctgataccactgttgtgattcaacaacactaactcaaaaatgtaaatgatcaaataatcaacaaccatgtaagcaattaaaatcagaaaacaaaacttataagaaaactagaaaaatatgagagaaaacacaagaaatttatcctagtttggatctcaattaaaatcctactccagctgccccccaaggagtttctccactaagaatcaacaagttacaaacaccaattgtagtacacaaacaccaagaactatcaatgacagaaatggctctccaacactcaaacttagagcctctcaacctatcatgacaacatgatctccagccatttctgttcttgatcttctctcattctctccatacttttctctctgtcatagtctctctcactcttctccgaatgaattgaaaagaggagccctaaatactgttagtagctgacatgtccagtacttaacagcctaacaaatttgtttttaactaacataactaactttcccaaataagaaaggtttgtaacaggaaacagttatgtaacatgttagaagacaaaaaaaggtttaattttcaatggattatattccacaattcattgcattcctatatatattatatataataatatataaacttaaacatatatattttaattttttcgactttctttctattctcatctttaattttttattatgttttaattttaatttttttttcatatatagtttggtgtagtattatattattgtacatatataatttgagtagggaaattttcttaaaaaaaattaaaaaagaaaattgataaaaatgagttaatatttcaagttttttttttattctattttaatatgattttttttatatggtttattgtaaaatcatattattatatatacatatataattaagagggatgagttgaaaataattattttttttttattacacattaattaaatataactccaaaataattttaattgataaatattctcttttataatcatgaaagtacaatatataaccttacataactttataaaattagagtccctaacacacataattggaataagacctataaatttaaaaataataaaataaagataaaaattaaaatagaaaataaaaagtaagtatacagtataattttctctaattaagaaaagaatttagtattaacgaatattgatatttcaatttgaaaaatatgtaacttaattttattataatatcaaaatttacaaaataaaaatgtccaaataactatacaagaccttttaatatcaaatacttttatcaaataaaataataatattcataactatactaataaattattaatatttttatattattttatctttcacctaaataaaaaagaattagaagtaaaatgttagtataataatttcttatattattaagattaaaatttgatataatttttttaattcgttatcattaaatatacacaattaaaaatttcttaaatatccgtcgcaaagtgcgagttgttaactagtttaaaatataaaataatcgaaaatagtatttttatgttgtttactaaaatgatcagaaaagaaataaaaattaatttattttgtttacataataaagaaaataattgaaatattttaatttgattaaattacaacatgtaattatttttttatttatagatttttgaaagatatattcatcttttttaatttttttttttgaatttttttttatttttaattaagttgaatgataagtgcacacaaataaaaagatgaaggataagtgcacacaaattacatataaaatttagtttgtggtggaaattatatttgcaccccaataagttataaataaaccatattttaaatgaaaattttaatatatttttatctttgtacaaaattaccaaaatatataattttaaatgatgagcctattttaatttttattttaataattacactccatttgcttatgaaattaaaattaagtatctccttcttcaagttctaagaaaaattaatagaacaaaataattgtacgtagtttcattaatgaagaacattttatacaagcataaaaaaattacgtgtttaatttaatgtatgtaagatttcattattttaatcatttaatttttgtttattgttatgtatatgaaaatattgattgattattaataatatttataaaagaaaactctcttgatatgtatatgcatgcatattttttgtttttttttttatgcatgcatattttgatctccaaaaagtaaggattatttaaaagaataaaaataaacaagaagagattaaaaaaaaaatcagaactaaaaaaaaaaaaatcagaactgtaaaaaaaaaaaatctacaaggaagttaagtggacaattattagatggggtgtattaattttcgttttaagagaagccccttagtaaatacaaaggggtgtgattataaaaaatattattcaaataaatcaaatggagtgtatttagattaagagtgtatttataatttattggagtgtaaatataagcacccatatattatttaatcaaatacaaattctcatattaaaaatatcttttattaattgagaatgtatagacaaaaaaaaaaaaaaaaataccaataaagtaatttttttttcaataatggatgaacaaatattgacatataatttaaccatggtatacatacaatatatatatatat

SEQ ID NO: 19712 - DNA, 3345 bp, Cannabis sativa
tctctctctctctctcttcattcccatctctctcttcttcttcttcttcttcctccttcgtcggctcttgtttgggcgagagggtttttctgccaaaatttttgctaacaacgaacgtttcttcatttttgaacacctgaatttgtgcaattcttgttcgattttttgtgaaaacgtggagatggcggagaatcttacggatcccggcttgaatcagtgttttcaaaccgcgttggctcggatgaactctgacgagtccaccattaccatcgacacttgcaaagatgtccggcgtcgttttaataacgtagtacaggtaggtttcattcattttctttgttatcttcttgattattatttttttcttcaaattttgcttctgactgtgtgtttggtgttgttatatctgaggatgtgattttagtttttgtcagtttttttttttttgaagtatttgagattcggaactcggaatgagataatttgtatgctttgattggaatccgtacactggtatcccttgatttattactcaacataggttatcgttatggttattttggcttttcaatcaagctattatgtttttggttcgacctatgtgatattttaaccattattcaagtaatgttaccaaaatttgcagttaagaattttggaaaccatagatctcatatttgaaagataatatctaaaatctggaattgagttacgttattgctaatttttttttttcaaaagttagagttttggttcattacctgctgtagcttgcattactttacgatgttacgaactcttggttcctttgtataatttaaggataattaacacatttgggatattccaactgcaatttgagtctgtttttgtttcttgttgggtttgtaaacgtgtagactgtacaccatgcatgaactagcaatgttgtatgattagcttctgaaatcgaaacaaccctttttcacggttcaattgatgaaatatgagtttagcgataattgaacatgttgtgtaaatatgggaatttatcagtggaaatatgcaatgattctttgtttcttatgatctgcccaatcttatactttggtttacattttgcatgctttgaggttggagttagaagagccactttgaaattttaattttggtaaagattgcttttgattgacgctgcatagttacgttttatggcttagtttactggacttgaagaatatgtaacttagttttctgtaagcactaagaatttgatgctaattgttgataatgtgaaaatggtatttcaattttgagatgattctttctttcacctgtttcaaaagttaaccgaaagtactcattgatattgaattcgtttatcaacaaagacgatgggtgtgatgaaatgtaagaacagactcttgaaaatggacaaaactaactatctaatatagggaatcttggaccttgtagcataacctataatgtgattctcttctttcatgtgcatgctgttatgtataaagttgacattctatccgaacagagaaggagaataatgaagctatggtgtttaaggtgctatatggacataattaaaagttgttggtaaattgatattatattttgtaaatagaagtatgtttttgggatactagatcttgcttttaggaagccttgtaaatagaaagataatatgttgaataaatattaattgttaaagctgtgaaagttattcaacttctcagttctttgtttttatgaagaaatcctcacagaaaatgcaatgatgaactcataccttagccctctttctaaaatatatttatcttggtcttaacagggcaaacccaaagagtggacagatgagaagcacagtatgtatcttaactcattagaagcatcttttgtagatgagttatacaattcaaatcgtttgggtggtgggggcgtgaaaaagaactcttgcaagcgaaattcttccgaccaggtttggcagccaaatttgcttcacagtcctgatttgtgaaagggagaaatatgatcttgcttccatttccctgctgcttaccttgtaataaattataaaattgcagtttgtggtgcttggggatggatgttggaagaagatcaactacgagaagaaaggatctttgttgagtcgcacaactgagtcccacttagtggcggataatcaatgggttcgtcatgttagtaattcaaacaaacgtcgccctctagcatgtcctgattctcaaggacgtattgcagtttgtagcaatgaaatccacttaagagggaagctggtatgcgtatgtggatcaaccaacggtttaaagcataatcctgtatgtcacaaatgccatcaagatatgattgacagcactgcaggtagctctctgacttcatttatcttgaagacctctatcttgttcaagttttttacttccaagtagctaataaagagaaaacttctattcctgttctgtatatttgttcactctctgtgagccttcttttgcatgaatttttaagtcttggttattctatttatagtatttcatgatctttgcattaagactatatgtgaggtcaacctccctatccacgtgtacaattttcatcttcctctttccttggtttgtggcttggttaatttacacagtggccttttaaagaactttaagtacttatactgtttgggcccaaattctgttgtcatttctgtacacacattcacatgatatgtatattatatatatacatatttcatatatagttgtaggaagtcatttcaatattccatgctaaactattttctagacatatggtagaaatgttaccttcatttcctattacacattatcttccatgctgtaaattttaatttcattggtactactaaccattaataataagcctttggcattatatacagtttgttttcttttggttgtccattagttcatacaatgcattgattgctatgaaagttccacgtcaattaactcacaatgctaattgggttatggtaatgcattatatgtgataaagtcaattcctcttttaaagtgttctcttctcctaagtgtggtgtcattggttaattagttaaaattagaaggtcatttactgttcgttgcttccttgggcacagtttaatatgattgctgtgtcagtgtgttggcaggactttacatcagaagcgaaagagtgggaatttaaattaagatatctgcaccacagtttaattgtttaaatgtagttactggactactttttttgataattccctaggtattttttcacgtcataatatgcgtctttttttttagtcatcatcgctaatgaaatagttgtcac

SEQ ID NO: 19713 - DNA, 1696 bp, Cannabis sativa
agagaaagagagacgtcacctgggtgtgttcgtgtgaaggtgtcccatatacttgatcctctaccatgcccatatgttcctccttcatacttcaaaatcagaaaattataaatataataataataaatgtgtttgctaacaaaaacttcatctgtaattagatatactaattatatataattaaatacctggtaagcacttgaagctgttccgaattgaaagcctttgggaaagctaagcctggttagaccagcttggccttggacagaagtacaactagtgcccaccaaataggatgaagttgcgaataatagcattagaagagtaggaatgtcataatttcccataattaagatatgtatgcgtgtgcctttacactctcataaaagaaaaatctctttatatatattttttaaacaatctaattatagttatatacacattatttcagctaatttcttcctaattaaccttttttttaataaaaaaaacaaacaaaaaaaacaaaaaaagacatcactttgtggttgaatatatataatatatttatattgtttaatcgtagagaaatcaaatgtctatgatgtattgtatagttggtaacatgaggatatatacagaaatctattacaattcatgttgtttaataacctggaaaatgtctccggcccttcttgattataatattaatttatcaatataaaatcttctctttcttatttaattatagatggccatatgtagtagatatatagtcatagatttgtttatgtaaatatatgaattttgacttatatcatatatgtatctgcatcaattaataacatgttgagcacatgtatacaacgtcattttcgataaataaataaaccaatatagaatatgatatgaatatttttaggctggagcaaaacatgattaagatctatcactataaaataaaagagaaatgctaaaatttactctagcatcatttagaactatcatattagtattagtgtaatattaagtataagatctcgtgtaatttaattcatcaataattattataaagatctattagtgtacaaaataataccttcaattaaatggtactagacactattagtgtctactaaaataagatgttgaatagatcataaagatctttaaacaaaatgattaccatggtgtcactttccatgacctaaatccaaatcttgtacagagtccattattgctaaaaagtcaattatcttacccctaaacatattttaaaaccattaacaacacataagtgtaatttcattattaaatgttactaaaatattagaaaagatactatacatataaaaactcgtttggaccgagtcaaaagaaacaataaataaataaataaataaatatgtatatgtaataataagaaaccccatttgtcacatactctcttcaaagcacaaaaggaaacccacaaacccaatcgtcgacataactctaatgagcactctctaaccaccgtccgaccccacgtgatggatcgttcaaatccccaagcgccgatgacctcaaattttgaacgaattttttggccacctccgatgtttgcttgacaagtcgtcttcaccactagactcggctcgttaaggaaaacaatctatactatgccattttgtcaagcccgctacttttttcgatgacatttttgtatttttgcccc

SEQ ID NO: 19714 - DNA, 6656 bp, Cannabis sativa
tatatatcaactatatgctacatagttagttattatggattaaataaatttgaaataggcttatatatgaaattaattaattgaagcattctctagtccaatcacgatcgactattaataagttctatatatatgtgcgccttaattttcttgtattaattatgtgatgttattctagatttggaattttgtgaattaattttgataattgtttttaaattaacatttggtgttgcctcgatgatgtcaggagctacattgaaatggaaaagagattccgagtgtggtcatacaaggaaggagatcagccactctttcacacggggccaatgaatttgatatactcgagtgaagggattgtcatcaatgaattggagggcggcccaaaaagcccatttttagctcagaatccagatgaggcccttgcatttttcatccctattagtgtcgttttcgttgtagaatatgtgtacaaaccatataaggactattcacgaataaggcttcaaaacatttttgaggaatacatcaacacaatctcccacaaatacccttactggaatagaagcaagggagctgaccacttcatggttggttgtcatgattgggtaagtacctaaaattacattctatacaaaattaattgcttatattaattattcttatatcattaaaatatgttgtacgtacaaacaaaatgaatacaggcaccagatgtttccaaaggatacagggctgatcttttcaagaatttcattagagtactttgcaatgccaattcttcagagggttttgaaccaatccgagatgtctgcttaccccaaacgagccttctcaaaggcgtagcgggattacctgaccctggttttattcgacctccaaataaccgttccatactagcattcttcgccgggggtgttgatcatggttttgtgagaaaagaactttacaaacagtggaaaggaaaacacgatgaggagattcaagtctacaattacctcaccaatacagaaaactacaatgaactaatgggtaaaagcaagtattgcttgtgcccaagtgggtatgaagttgctagtcctagagtagtggagtccatatactcagggtgtgtgccagtgttaatatctccgggctatgttctaccattcagtgatgttcttgattggagtaagttctcagttaatgtaccgtttgaaaacctttctgagataaagacgattctgaaagggattcctaaggatgagtatttggctatgcaacgaagagttatgcaagtacaaccacattttgtttacaatcgtccagctaagccatttgattttatgcatatggttatgcactctgtttggcttaggagacttaacgttaggctccaagcttgacttttttttttttgagctacataaatttagggataattcttaatacttcatcatgtatcattctaatgaaaaactatacatacttgatactagcccatttttttttattgatatgatgtatatatagtacaccataaatgttgtttgacagaaggcgacgaatgaatggatatgaaaagtagtttgttatatgatagcaagtaaagaaagagctttattttttttaataaaaaaaaattcaacaatattaaacaaagtttgcattaaatacctgaatatagatgatgagtatattttattagaaaaaccatatttagttgttgaatagatagatagatattcatattgggaaaaatacaaaaagttaatgtaagccgatgatgcaaatgttgactaagctgaaaagtatctatctatattcagtaaaaatagaagcacacaatcttaccatggtagatatattaatattttctgtaaggaaatgagaaaattttacagttattagttatgtgactttaatttagaaataaattaaagaaaaaattataaaataattgataaataacttcttaattttatttccctccaattttacgaaactacctaaaattgacccaacaaagtataacattaataaatcttgtgtttttgtctatttttttttttttaacatctgctctgtttgcagtgatcgtcatttgtctcactttcaaaccatagtttaaactttaaagcgtttgatttccattttccacgaattttttacccttcctcgccagccaaacatggattaacagaattcatcattgttaggctgaaaccccaggaaaatttcatcaccagagcttatctgggctcaattagatatctttcaagctttgtttggagatatgcacggatctgcgttatggtgtagggaacttgtttttcttctattgattccaggtatactgggttggggaaaggaaggtcactatgctacttgtaagattgcagaggtgagtgtctcttctctttactgctgtagttgactctgcattttttttaatattacattgatggtttggggataaagattatgtgggactagtatttggggaaaaacaaagtagtaatttttctcactgttggtcaacatcaattggttcattgttatgatgtttctaaaattttcgtatgcgtccatgtataatgttagaggtggagaaaataatatatagctaacaagagctcttatttgcgaattgggcattgtgcaaaacttggtagtaggtatatatgattttgactataacttcctggaagatttcaataaagatgggtgggaatttgggggtaggatgaggttggtcctggttgacccctttcacttgacatatatgcttcgtcttgtttgttgaaaggttttgttggggacctgcaactattgtttgataagaaatattagaggttttttatgagacaaatttgtttttgcttgcagggttatctaactgaagaagctctagctgcggtgaaacaattgcttcctgattccgccgaaggtgattttccatcagtttgtgcttgggctgatcaggttcgatttcactatcgatggagtagtgctttacactatattgatacacctgactataggtgtaactatgaatactgcagtaagtaactagctttctgattgttaaaccatgctcattttttgaacaattcaaattgcatttgttgccaattgcttacatgaccaaactgtggtacagagttatgagaacctttctttgaacttgttattgtttgctattgttgggggttacttcattgtgatttaagcagtttcacttgatgaattatcctgtttggacctttctgtagtggctctagtggaaataagtctaagactcgcttagtaaatttgataatcatagatgattggtctgtctattggagataaatgaaactgaggaaagtcttttaaggctaaaggaatatgcaaatgaggtgttatctaattttaatttgctgatataaaagacaactacctaccaaatatcggtagctttcccatatataatttttacttgcttttctttttaaaagaaaacattattctcttcatgataggagactgccatgactctgttggacgtaaagatagatgtgttactggggcaatttataactataccatgcagctattggattatcaggactcctccgtgaaatcaaactgtgagcaccttcgtttcaaccatatataattatcaagggaaataaatagataagatcctgattatgtattttcgtgatgcagacaatttaactgaggcccttatgttcttatctcattttattggggatgtccatcaggtttgctctttctagaaattcatcaaacttactgagtatacaatgtcatcaaactattgaaacttcagttaacctttctccattgtagttttcttacaaataggagttccatactcggtgatgacatgtgtttcactggagagttgaattttggctggattacttgaatagattagatttttcttgtttcactgtattaacttcggctaataaaatgtgtttgaaaaagaaactgttactattaaaagacatgttctttcttatttttggttcccttcttagttgcttgacttctgaatcaaaataaagttatcagatggctaactttcatataatctaaactttctgctgtataccagcctctgcatgttggttttactggagatttaggtgggaacacaataattgtacgatggtaccgtagaaagacaaacctccatcatgtaagggctgttttatgattcagttacattcatgactcatgaaggctagtttacatcatagtagtccatatgttgtgagatcattcagatttggttttgttctaggtatgggataccatgatgattgattctgctttaaagacattctataattcagacctcacaagcatgatacaggccattcaacgaaatattactgtatgttgctctccttttcccatgataggttcctgtcatgattgttcttcttacctagtttacatatgttttttgatttaccctttacgcacgcagttgagatttattattttttaagttacctcgggatatttactattcatgtgtggattgtacaaaatgtacttatgctgatgactgttggtcagtctgagtgcaagttgatgttagaatgtgttagttttcttttcaagtataactttgatctacttgttttaaatttatacagaatggctggtccaatgatgcgtcttcttgggcaatttgtgcaaataatcacactgtgtgtccagagccgtaagttcatgctcttttctggtctatccttgattggtatcttttttgttgttcacagtaactctgtttgcagtgcttgattacttacacattcggtgttcacttcaagcaaaaagatcaagcacgccatggcctggatggaaactaaccacgaaattacactattcagtcatataaattaagccacaattaaatcacaatgaaaaattcaactgagtttcgtttatatgcatgtgtatgtgtataaagatttatcttaaatgtggatttcttgggcatgataaaattgccattgataatcttcaggtatgcctctgaaagtattagtgcagcatgcaagtttgcttacagaaatgctacaccaggaagcactctgggaggtattttcccctaattcatttaaagttttctctttgtatgtcagtagaccattaaagctagatcaaagtagttctaatgtgatgtgcgacatgctatgctatatatctaaacttgtattcctcgtttccaattcttcataccttatgttgttttagatgaatactttctttctcggcttcctattatggaaaagaggttggctcaaggtggggtccgcttggctggtacccttaaccgaatattctcttcacatgaaaaaattgctgaagcaagaagataggagaacgtcatccatatcaggacaggtggatcatcagataagaagtggattcccatttgttaggtttgtttatatagctacaacttccccatacgttaaaacactcaaaggtactcaacacccttagctatccaattccatgtcgtcaactctttgaaaaaaaatagaaataaagaaatagagaaagagagaattgcatttgttattgtttatttgtaattgttcacgcttgtcttctaacccaatcaataagattgataatgcttcttcctatgtcccagaatatgctctcatcttgcttgtgttataatcaaaaaaaaaaaaaaaacaaatctcgcttgcgttataagtaatttatagggtagcatgaaacttaaaagtaatagaaatattaaacttgcactcaattaagacctgtcaatggatttggatttttcatatatagttgcaactacaacttgtatagaactacatcatctgcacaaacaatagatcatcaagcttgagaaaagttgaaacctatggatagatttagtggtgggttgaaaggagtagttccttttgtattagtttttgttctggcctttgcttcaattacagttccaagtgctcatggttggagtaaagagggtcatgttatgacgtgtcagatagcccaggtaaagtttcttccacttgttctcttttgaatagctcgaccaagaccaacgttgtcaattttttataaggataaatgaacgtagttcaaattgatgtactttatacaagtttgttagagcatatacattccatcacatcatcctactttaagaatatacacaacatgtcccaaaacctagagccggctcaagcacgggctcacgcccaaggcctcccacccagtctaaaaaattattttaataaaaattatcaaaattatatattaaaaataccatattttacatttttactactatttattaaaaattataactattttctaaaacaaatactaaatttatacttcaagatactaaattttgatattttattaagaaagaatagtcaattatatttttaaaatactatattttgaatttttactactatatataataaaaaacatgaatttttttatatgaaaaaagtcattttaaattttttagtttaaaatccccaattaacttgagacaggtcttttcacaccattaaaggtgtgtttggaagtaactatgtaattactaggtagggtaattactaaggtaataattacgcagtttagtaattaca

SEQ ID NO: 19715 - DNA, 3352 bp, Cannabis sativa
agcttgctcttctgtattttcattcgtgagattaattaaataaagcagctccattttctctctgtttcctctgtgttttctctgctggttttaccagctaataagaatggttgtgattacgattcttttggtacttgtgatgatatgacttcttccatcaagagaaatactttcaacttctaatttatatatactaatatcatagtatgaaaaagatagtcatatatagctatgttttgtagagtagcaatggctgagaaagtgatccattaatatataacattttcatgattgattaatttgtggtatggaatattgggctaggctagctatatgaatttgttacaatctgcataatacaaataaattccttcgccataaacagttcaataagaaccaataatcatgaaaaaaaaaataatgtagttgtgagattatcctattcaaataatatagttttgaaggtcagttaggtttactgttgaaaacaatccaaccacttggtataaaataaacatcgatcataagagaaactagttttaacccgtacgtctaaaattttccaataaaaatatcttacactcattaaaacactatatagtgatttataaagcaatctgtagttaaacactatatagacaaatgtaacttcaatttaatggtactttagtttatttgttgttgactttgtctgtttatgttttttgtttataacacttgggaattaattagctgtgttttgccaaggtctcttctagtgctcttgtttttaagttcataaaatctgcataatgttatagcagattaaaggaaccagtccatgacctttttagtagaattaattgacaatagtaggaaattatattatgcacccttttgaatttgatggctctaaaagttcaactttcggctatactatgacaaatgtcttgtttgaaatgcatacaacacaaaaaaataagcatatcataaacttagaaagttcatctttcggctataccatgacaaatgtcttgtgatgtggaattagtcttatcaattacattgtaagtatatcgagtttagctgcatgtaatttatatagcacaaattgttgttattatatagaaacaaagcatttagctgaggaagcatgcatatatatgttatgagtaattttgatctgatttttcaggcacaaaaatggattgttgctattctcttcataatacccgcttgtgccactaaatgagtaacattttgaattataatcaattctttttatgttattagtattgtttgatcaattccctaaactttctccgatagaattattatgctgacatatttttttttacttttttttttttctcaaatatataaatttatgtatatatatgttcaaggttaaggatctttctgtttttggagtattttacaatgattagtagtcatcatcctattagcataaaaaatgatactaacaatttctgcatgcctttgctcacataattgatttggaaaattagctaggcagcagttctttgatttattctgttattgtattccttctcatttcagatattaactcaagattctattggtttcaaatgttttaattgcacactttttagatttttattaatgaaggtttgtctctataattcacacgttctgtctaaaacatgtcaagtaaaagttctctttatttgctaatatatacttattctcatgtactgattcatatatgtatatatattattgcaggataattcatactagtctcctcctcttgcaagttgcaaaatcttgaagtacaagaatgcttttttttttttttttgtattaatttcactacaaaagagatatttgtatgtatagatattattctattattgtttcaatgatagaaattactttttttatgtaattacaaaaacctttctatgtaattataaaaaaatttgtttaatgaaattataaaatttgcaagttctatatttttttggtctgatgtagttatgtttgtataagtactcataccaaaattaattttataatatttaaacacaaaacaacattttaaatagtaaaatatattattaatatcgttataattattatatcaacaaaattgatatttttttaaaaaaaaattatataaataatagtttaatgacatttttacaaatgtaagtaatataatttagtaacatttttaaaatgtcactaaaatcattttaaatataataaataaatatataaaaatttattagtgacatttgaagtgttattaattattattatagtggctttttcaaatgttactagtgaattatttagtgacatttggctttacctcacattggtatatcctacattttttacaaatgttacaaaagccatagatgttaataaaagtcagaataatacaagaaacaaagcaagagtactatatttagtactttatttattatttattatttttatataaagtaggttcgatgcataacatcgaacaaacatacatggttggtacgtaaccataaccatatatgcatgcatgcacaagtaacgtactagtgatcaagaattgatgagagaggaagatgatcgtcggtttgttgtgaagcttcatcaatttctttattatatatttatttgctagaatacagtacccaaagcccgtagcattgcattgatagggataacaacacgggcttgcgatattgcatttagcaccaccgggcttacactcagaattaggcacacattttcgactcgtactaatatattgcaggaccttgacatactaatcctccacagcaaaactttccttctgcccaatgacagtattcaccggctatgtaaacatcgatcgccatagctaccttgcaccaacatcgatcgtcacaaacattattattatggcaacaaacttcttcattattattttctagctagttcttgataatataaatatatataattttaattgtggtgtataagtttcttgatttgcattcctatttataggagaaaatattgataataaaaaatatttttttttgaccaattgatgataaaaaatattaattgatcatgatgtcatcataaaatattttataattattaatattgaaataaatattggataatcaatatatatatttttttgaaaaatatatatttggcagaaatgataacttgtgctgaatgaactatgtaataaataatatagatgtatgtgtccttttaattttgttgttgtcatgtcatttttttggttaagaatatcatgaatctaaaattaacatgtttaataaacaggtatgaagaaactcagaacagggcaaagaaaagagaaaataca

SEQ ID NO: 19716 - DNA, 10226 bp, Cannabis sativa
aattgaaatttactacaaatataggggcaaatgtacaaataatcataatattcctactcttcttctccaacaagaaaactttacacagaaaattaaaaagaagaaagagactcataaataaccctaatttcctcactctcaactcttcttcacttcttctccgatctctctccggcggttgcatcttctcttatctccggcttcaggtggattcttccttcaatttggtaagaatcagtttcgatgaatgcgagaatttattttcatgttatcgtatgacaaatctgaagttggaaggtttcgaaagaatgaaattaaagtgtcagcctttaatcaacagtgattttctaaaattgtttagctccaatcggacccattttgctgtttggctcagatcagttccaatgatgtaattttctgtgttgtagtgttatttatgctaatgctgtttatgggtttttactcttatgcagtttcttcaggtttttaatccaacctaccaaaaatgtttcttacaaggttcgtgcactgattggttttttgggttttcttgtgcaatttcgaatttttatagtttttgtgataatttttgtttttggggcttaattcatgtgaaggaccgagtatgacagaggagtgaacactttctctccagaaggtcgattgtttcaggttgaatatgccattgaggctattaaggtgtgtaactttttctttctgtttagttctttgtagacactattatttttggaaatgaatgatgaaaatgatggttaccatagacactcataaatctgagcttgagatagtgttttgtcctgtttatttgtattttatttatgttttatggtgttggaaataacatatagactgattgggtattctgatttaaatacagttgggttcaactgcaattgggttgaagacgaaagaaggtgtggtgcttgcagttgagaagcgaatcacttcgccattgttggtctgtccaataccttgcttgaccttttttcttacataagtagtgtttcatattgcttggtaggatttagacagacctttgccactccatctgtatatgttagatattcttgtttgttttgcgttggttgaacttgaaacttaatttgtgttttgcactgtgtagtagtaaggaattactaaccaaaaatgggaaaaaaatgaactattttgggtcgttagtttaattctaatttactatcatgatggaaactacttttagattattattgttattattgtactgtgtttattttctgtcttagaagatactgatatggctctttatggaagaaacaatcaaattttaggctaatttcgagactaacttaggtattacaaggttgcttcaagaggactctttttcccttgttgtaaataaatggcatatttcagttaatagctgcctaattaataagtgtcgtttcttactgctaatatactctccttacacacctaagccagttcagcaggatactagtaaatcgcacaatacacaaacatcatgtacaactaaaatcacctcattctacaaactctcttagttattcttccttctatgaaagtgaatattatgataggaggctatcctttctttttattactctttttttctttattattcttttgttatccatagagaaaagctaaacaggttccaaatatgattttctaattattttatctctttaatttgttggtactattgtcatttttgctgatattaaatactgttgatgttttattttgggtgtaaatttgcgtcattttcaggaaccaagcagtgtcgaaaagattatggaagtcgatgagcacattggatgtgccatgagtggattgattgctgatgcccggacacttgttgaacatgctcgggtggaaactcaggtgattttgttgctcatgttcattatcgtagtatgtgttattcttattcttgttttttatattgatgtttgaacttcaatgtttgcagaatcatagattctcatatggtgagccaatgactgtagagtccacaacgcaggctctttgtgatttggctctgcggtttggtgagggtgatgaagaatccatggtaataatgattcagaaattattattattattatctatgttctcattcttttctttgtttttttcaaccttttgcttagttttttaaattttattttgggcatctctagcttgttgctgctgatgtttttggccgtcttcaatgcctattgtcgtattttgttgcaattcaaatcaaccacctgctttaagctttagtgttttattcttatagttgaaccatttaatcaatcatcaaaatagtttgcttttttggtttattctgcttgattgtttagctggttcagtttctgattatgatttttccagttgtacctgttgttatttgtggttgtaagagaactgttaagcaaacaacatcacttgttgtgagatacttagtaaaagtttagtttgcatagttatatgttgtgatctctggcaaagctcagtcttatgaaaaattcaaatcataacggtcaagcttttgatccaaaactcgtttttaatgtgtgttgttggtgtactcaaatctgtgctttatatcaagttcttgtgaatgtgaagtatgccacttgaggatagctcaagtgattaggtgagatagtgtgtgtgtttgagtggtagttggttcaagcctgtgaaccccataaatatcttatttaaaaaagaaaaaaaggtagaaaataaatctgttatgctgctcttcagagtcattaagactaaaaaatggtcctgtgtagtttcctttttaaaataataaattaattaaataattcaaatgaagaccctacaacttgttctttttatgtttgctaatatgaatttttcttcttcttaatatagactctaatgtggtttattgaaaccatttttctatcttttctaatctgttactaaattatcacatgcagtctcgtccttttggagtttctcttctcattgctggtcacgatgagaatggcccgagcttgtaagtgtattgatatccatagctgtaacctgtaacctgtaacgattattgaattattaagctgtaattgcttttaaagctcaacgttaggaaaaaattgatgtagggaatcacaaaattttcaaaagaaagaaaatatcgaaggagaaaacaatgtgtttcaaacatgacaccatagaatgtatgagtttttttttagttgaagtaagagtcacaaaggttttatttgtacctgtagatactataccgatccatctggaacattttggcaatgcaatgcaaaggccataggatctggttcagaaggagcagacagctctctgcaagagcaattcaacaaggtaaccttatagactgacccttaatgcaactcaataatgtacttgtgacgaggaaacactttttcggtgacattttgattgttttgctacgtttgaagaagctttggttgtgtttgttgattttgtttttaaaagactaaatgctggataattttaaacccgaaaaatattatgagaagaccccgttggagaagatcaagatgctatatctgcaaaccgaacaagaatattagaaataaaagttggagaagatcaaacgatagaaccccgttgagtcatttttttccaatttcactaattactaattaagcgaggattttgctaaaatatagtattttgattttggcaggacctaactctaaaggaggctgagaccattgctctttctattctcaaacaagtcatggaagagaaggtaaaccattatatttggtatcaacttcattttactacctttttcgttgaccttaatttaagacttaatcgactttgattctggcaaaacaggtgacaccaaacaatgttgacattgcgaaggtggctccgacatatcatctgtacacaccttctgaggtagaagccgtcattactcgcctataagttctggaatatcttctgcttaccgacaatcgcttctctaaatttgttgtctttgcttctctaaatttctgggaatggtgatgaggatgatttgcctttgtttctgattggtgttcttggttgttggatatgatgcaaaggcttcaaaaattgctttcaagctagaaaattatacattattctggatctttagaacaattaacattttgatacaattatatgttatccagtgaaaaaaaatcaaaccttgaacaagtttgtgttttaaacataatatttacttaaacattgaaaacaactatagaaaaagtatgagggtcaccaaagttttttatttaccctcatactaattataaaatctattttttaacccaacaatttacaatatatatattattttagaaaatatctatatttaagtggttgtataaaggagccaacccaactatagctattttaggaccagagtatttagttgttgagagattgaattaaatgtgagtgtacttgatatattgtgtgccacatactacatttatatattgataaaaataaataaattgtgtagtatgcattaaataattgattaaaagatttaataattatgatatggttttactttaaccatataaatagattgtattttatatatgatggtattctttaaatgtaagtgaaagaaaaaattttgaaaatgttaatttgatatatttttttaaataaataaataaataattgctctgatacctaaaaaaatttactctcatacattaaagaaaatgtaatttacattatgaacatctcaaacacatatatttagttatcgatgtgatatcttaactactcatatttatgtgtacatgttgataaaaataataggaaatgcttaataaaaaatcttcacatatttaattttgtgaaaaatgaaataagattttttttttaatgataggtgacgttactaaaattaattggtcaactattacgatatttaaaattaattcagaatactctgtcactgaatttttttttcgaataaagccacatgtatagaaatggttgagccaacctattaacactcctcgttgaaaatggtcatagatatggtattagcattactacattgctcaatccaaatgctcaaattcctttcccaagttacaaaaaaaaaaaaaaaaaaaaatcctcgttgaaaatccttatctccatacatcagtatacacgttgagaaaacaaaaacagaatcctctcacatttaatttctggacaactggattactttttctttcaaaataaacgttactacattaaattgatcatttatatcatattaaaaaaataattaaactacagttgaatctgtgtatatatatactttcttgaagcataaacacagaacatctataaccagaattacagtgaaactaatctcttgcttcaaatagcgagtgtttgatatggaagagcataaatcatttatgaagaaaaccattaactcaatcgtccactttattaaggtattttcctcttcctcttaagacttgtattttataagaaaatttaagtgtaactgtaattttagattattcatttcataatccaagtagtgttatttcttccaatcaagaatgcatgtgccatggcatatcccattattattatcatgatttcattctatttcttcatataattttattgtcaccatttaaaatcatcttttgggtgtttgttttgatttttttgagcaacaaaatggtttaaccacaatcatttttaagttggtaccagaacaaattttgggtaatatctcattatttcgttttattttttaatttttaagttacttatcaatctaaaattataatggtcggaataaccaccataattactttcagtatttattttattttaaaaataaaattcgaaactaattaataataactctgaaacaaatttattttacaattatttttacatttgtgttatgtcctctattatttactataaataatttatgagatttatattattttactaaaaaacaatcattttattttttaaataagacatctgaatcccaaatctgatagaaaaaatcaaaacaaatgtttttagatctgaaattttagaatgaagattttgttttgtacttgacctcatttaaaatattaatataagaaaataaaaaaggaatctttaacttaacttgttataatacacatagtattagcttagcattactatagttcttattattattaaattaatttttgttgttatgataaaaaaaatgatattattagagaaacaagattcaatgtggtttgtgtcatttgactctctctcctttctctctctgtcgaaatgggttgacccattaatggcaataagactttcccttaaagctcttttgtcttctggtgagaaggtgagactttaagtagtttttaattcatacacaaaattttcacaaagagaaaataaataaaaatgcaaactttattttagttacaatcaaattacaatatgttaatttcataaaaaattaatctttgtagttattcaatctaaacccacttagaaaatcagaagttggtgaaggcttatgggtccagctgtactcttgagctagagagagaaagaaagaaggaagagagatatctctctctctctctctcctctttgggtttggtttgctgttaatgtttttgttggtgttttgttctcattcttctaacttaggaagaaaaaagaaaaagctttactttttgtgatctttgtttgcatttgaagaggaaaaaaagaaaaagataaaagaaaaaagaaaaaaggagagaaatttatttttcatttttgaagtttgaagttttgaagaacaagctctcgatctgagctgagactcgagcttgtttgattttgagtcttttcttttcttttctttttttcttggtgtgttctttctatgaacttgtgatataaaattcatcagatggaccgaagtggtgtaaggtcttctaatgctcaaaggggttttcgagttcaagctccattggttagttcaaaaaccgatcttgacccttcttcacttttcttctttggccaatgtttcacttcatttttcttcaaattcatcaaattttagagatacccagatgggattttagttaaattatgaacaattttttcagttagtttgcattttcctttttggttggttttcttaaagaaaacccttttctttttttcccttttaaacttagtggaaaacccagataattttggaaatttaagtagcatttcctttcatgatttttgctttagtttgaattttgatgagcattttgttctggggaacatttggtttgtggagtattaacttggtctttttcattgttatgattggacaactgcattttcttgtttatgttcttaaaggctaaaatttgagcttggtttatgttaagtaattatgttacagcaattcttctcaatgtgtatgcaaatgagcttgaaatttgaaacttgcgttggtatggttagtttgggtacaaatagttattgttgcttagtaatgtgttgcttttgttttggttaatttgacctattcatcatgctcatatcatcatttttgtcctagattttgatcaatgccaacttcaatttgttgtttatttcattgaatagtatgaacttaaaagacaaaaacaaaaaaaaaaataagaatatgctatagaaattctgaaattgctttttcagggtgaatgaagagataagattaagataatgtatggttgaggagtctccatatggggtttttgattcttaaaagaaccgatttcggttacttttatagctcttttttcttatactgcaggttctttatttcctatgttatgttgtttagcttgtagaaagttgtaatgggggtatggattttgctatatcttgcaatctaatcccgaatattttgtaggtggattctgtatcatgttattgcaaagtagacgcgggtttaaaaacagttgcaggggcgagaaagtttgtcccgggatcaaaactctgcatccagcccgatatcaatccaaatgcacacaagggaaagacatcacgaagagacaaaagccggttccaggcacctctcctgcctggcctacccgatgatcttgcaattgcttgtctaatcagagtcccccgagtcgagcacagaaagcttcgccaagtctgcaagagatggtaccgccttttggctggaaatttcttttattctctaaggaaaagccttggaatggcagaagaatgggtttatgttgtcaaaagagaacgcgatgggaagatctcttggcatgcttatgatcctacttaccatatttggcagccacttccaccggtaccaggagagtattcttatgcactcggttttggctgtgctgttcttagtggttgccatctttacttatttggaggtaaagatcctctcaaaggatcaatgaggcgcgttattttctacagtgctcgaacaaacaaatggcatagagcaccagacatgcttcgcaagcgccatttcttcggtgcttgtgtcatcaacaactgcttatacgttgctggtggggaatgtgaaggaatccaaagaactcttcgttcggctgaagtttatgatcccaacagaaaccgttggaactttatttcagacatgagcactccaatggtgccttttattggggttgttcataatggaatgtggttcctcaaaggtttaggtaaccaccgcgaggtaatgagcgaggcttactcccccgaaaccaacacatggagcacgatcagcgatggcatggtttctggttggagaaacccttgtgtttctatgaatggggaactatatgctttggattgtagagatggatgcaaggttaggatctatgatcgagccacggattcatggaacaaatttatcgatagcaagctccatttaggcaattcgcgagcattggaggctgctgcactcgtggccttgaacgggaagctttgcataatccgtaacaacatgagtatcagtatagtggatgtttcgagccccgataaacatgtcgaaagcaaccctcaattgtgggaaaatattgctgggagaggtcattttaggactctagtaactaatttgtggtcgagtatagccggtcgaagtggtttgaagagtcacattctccattgtcaagttctacaagcatgatgaaattcaggtagaaaaaaccgaaattcctttcgttgtagaagagatttcgatgtgaaaaaaaaaactattttgagggttgattttgtctgttaaatctctatttgaggttatttgttttacattcatggaaaaggaaaaaagaaatatgagtagatacatgtaaatctttgttacttgtgggaaaaattaggttgagatctttcttttgttgttggttttatatttatgttggtagaagaatatgtaatccttagaatatgttttttgtgaatatatacttaggtttaatctctgcatattgaatcaaattcatgtttaattttcatgttttgttattatttgcattgtaatgttgttcattgaaataaacttcatttatattcaatttactttcacaaacaaactaaagaaagcatgatgatgagtacatactttgattgtaagaaaagaaaaacacaagaaagagtagaaggtaggaagagacgatttttcgtcatcttttttgctaaattccccgacatttcctctcgtggaggcgtttcaaagtttcttcacgctctttctttagaccgttgtgaaaattcttaatgaaagcttctgctagatcatcaacatccttctcttctcgaccgagttggcgtctactaaccgcttcctttcccttgttgttcatcatgtttgctttgaaaacttctctgcttgaatccattacagctaccgaaaatgtttgtaatcgaaagttgggttaaggctcaaattttgctttcttggtgtttagaaatgtggaaaaacatgttgcttttataggtaaagttttgagctttagaagcaatggttttggtgagaaaaaaaagcaaaaggaaacatttagagaaaattgaaattgaagctaagctaagttatgctttatctagaatatagtacattatattcttgtcaactttgttatggcatttgtggttagattcctctaaatgaatattttggttatggctcctccatcattggatta

SEQ ID NO: 19717 - DNA, 5030 bp, Cannabis sativa
  modified_base (4155)..(4162): a, c, t, g, unknown or other
acaatacattgtctatatcctaataaaagcctaaacatttaccaagtatatattgtaagcatattgaaattgcaaaccaatccattaagaaagataattgtgatgatttagaatatcacaaaagacttgagatgagatggcatggatgttagcaagttgctacatactgcgacgcaaaagcatataagtgttatgaaaagataaggatactgccttgatacttcgagcgagggtagtagacatcttcacatttagggcagtatattttaactgtggttgctcgtggaacgtctgattggccaactgggaggcagggttgtccacaacagtaaactctgggacacctcccgaaatcatagtttttgtacttgtctaactgaataagtttgcaacaatgtcattctacccgctccaccaaaaaaagggaagacacaagaacctttaattacagaataaagaattaaaccttaccatagcagccatgcctttgctggtcaaaatgtatcgagcgtgaattagaccataaagcatctctgctgctgactcgactaattcattttgttcctcggtaaacatgtcgcctgcacattttggtatgagtattcaactgagtgacctaatgtgctgctattttagatagcttttgcttttatttccagacagtagaataagaggcaaaagtctacttttaatgcaaggacagtatatgtctatttcaaatgagtttttcattttaattaatttcttattgtatataatttggacaattttttaaaaaaatattattgtaagaatatatttgttttgaaattcattttgataacaaatatatcattccataagcttccttttcttttatttcttaatccttaacaataaaattcaggtgaaaaaatatattataattagaggtgtgaataccataaaatgaaacaaataaggaagaaaatgaatattttaaatgaatagaagtagaaaataagaaatctttcgccagagaaaatattaagatttcattagaacttaaaaacagcctgacttccttgaaaaactagtacaggatccatgcttctctcgaaaaagctttcaactagagtgagtacgggaagtgggaacattttcaaacactgtttacgtaatattgtacagaagagaataataacgaacattccaacatatgacttgaaaccttaaaaaaggtgtcacaaataactcccaagaagatagcaaaaatattccaagagataatattagaaaaattctatgcacaattaacacaaggatatgaaatgaagtaacaaacatacaaacttaccatgagaagactcgacatccaagatcaaatcaagagcataatcataataaggaacttggctgcttaagccacagaggttaaaatcatcttgaatgtagtcatcatcaacttcacaaaaaaactcatttcctcgaaggttgcaaaaccatgaaatccaagaagtgtcttccacatcagaaccactgacatcagattcttcactgtctgtttcagattcctcaactgttggtgtaataaattaagtttatgagtaggcaaacagatagcactaagaagaaatttatacactaaataaagtacaaccattctattttgcaaagacaacaaagtaaaatcaagcaggtaaaatccagctgttatattcatatgtatattttttttacattcgcactttaacttcgaaacagaaatcaataaagtgaaagataaaaagaaccccgcaatttcactaggtcattcgttatgcaaacaaagatgaacgagtgaaaattgaaattataaactgaaaccccactattttccttcaagaggaaatgatattttgatttaaaatgagcacatattagttgcttcaagtcaacacaatttaacatcctatagtactatcttatcccttgattgtttttgggaccatgtacatttgtttagagatacactggcaaaaatttcaccacccgtaaatcaaatcatagttatgaattatgtgattagaaaagatagtgcagacagaaattacatgcttatagcattccaaatatttatataactatccaaccatttaaggacactttaatgctcttgcataaaaatgcattaactatatcttttacaaaattctagtgtacttcacagacacccattgatcagatgaactagtgtacctgactcactctgaaaattcgttaagcccaggtttaattttctcaggcataaggatttaaacacgagaatactatgactaagcatatatattcgtttaaggaaaatcatcaatgaacgaaaaagtatattttataacacaatcggtcaaaccccagaagattaatcataaatataaaatttaatgaggctttgaaagtcaattattttaggacaaagggtctccaataaaaggaaataatatcttctgactactccaagaaatgtatttacttttttccttcacttcacttttcatatgcaagttcggaactttaaaacagaaaacagatctttccgttacacattctcaacataccattaaaaagaattaaaacttcaattatgcgaatgaaagaggagaaatgaaacagattcaaaggacccacgaatcaaatatttaatgaaatcctctaatatcaaaacaaaaatcacagattcgcttcatacaataacttaacattttgcatttctacgacccttttgtaatctcaaaaagattatcaataacaataaagaaatgaatgagttaggtataaagaaaaggatggaggaagagacgaaccatcggagcaattagttttagagagagaagcagagcgagagtccctctgatcagatggagtaacagtcttccccataagtatagactgtaccctctcgttcattcccacagccctagaagacgtagacggcgacgatctctccaactgcttatccaagacttcgttgattcgctgcttccgatcaaccgagttcacctccgacttaaaccctcgctctctgtacattttcccccctttttaaccaaaaccaccaacaccaccacaaccaaccaccgtaacctcttcttcttcttcttcttcccctaaaagactcaacctttatgaaaaatactgtaaatatgaaaccctaacagagggttttgatgtacagagagctatataactaagtttaactcattctctctttctctaaaaaatcgatttttttttttttttgttggcttagcctcctaaaaaaaaaaaaacaaaactaaacagaagaaggaagacatttcattttaagtttctccaattgacttgcctgtagtcgatcgtatttttctgcagtgagcttgtgctgacgtggcaacttcttattggttggacaggagacagaggttcttggctggcacgtgatcacacacctttcggtacttccacaataataatatttttctttttttacaattaaatattttaacttattaacacctaaaattcgtgtcttttttgttaaggataaaattaatgccttattttcctaagtttttttttttttaattattattattatttcattttatttgtgtatatgggaaaaaagtaaattaaaaaaaaaatcttatgagagtttatgatgtaggcaaaaagaaatccaaagagaatttatgagagtgaaattttgaaagtacaataatgaattaaaattaaaggaaagagggtgggaccacaccacgataatagtgcttcactacattctcttctgaaagtggggtccatccacgtcaccatatgatgacacgtggcaagcaagcatgtgtgttgattgatctattatatttttttaatatttaatatttgttagttttatacttgggcagtgggattgtcgtcgtatgagtagacttgtagttgaaattgtagatttgaaagttatcttttcaatttgaagttttaagtttttgccaattttgatttttggggctaaatttacttgaacgtgatgctacgaaggatagatatagataaatttttagtatttttttaatcaatacttagtattagaatacgaaaaaaaaaatgttataacataacattttttatattattattatcataaagtaaaaaaatttgtttatttaatatatattaaataannnnnnnntattattttaataatttttagagatattttagattattttagaacaaaaaatcctaaaaataatgtgaaaaaaagataaaataaaataatatattttaagtgatataaaaattttttaccattaaagatattctaatatacaaaattcttaataaatgatatagaaaagccataataattctaaataatttatcgtacaaaaaataaattaataaattaaaatattatgaattttggtgtaagatattgtaaattatttgaaaaaaaatttaaattcataaacttaatattgtaactataataaatattgtcataaaaaatatatttctacatgtaaaattaacaataaccctcttaaaaaatatatataaatcatattcaaactaattatatattttatatctatgaaataatcaatgaccttcattaaaaaaaaaaaaaacaagaataaagataatttctaacctaattatagttaaaagaatttaacaaggttttcattgaccctttttttattgaattatttccatatagtacatctgaaaggaaacactttaaacgattatagaagttcctgcattaaaaattctaacaacaacacgtttttcagtacattaatgaaaggaaatagtatcagaacagaacaacttgcaatgaaaagtaccaaacacaaccacaaaaaagcaacaataatcacagacaaatgcaatttgaatttgtgtgagaatgttaaaacatgcacacaaaaagtagatataaataaataatttaaaccctcttaaagaatgagatgagataattatttaaagtaaacaatctcaataaaggcccatcatcaactaaattttatttcagatttgagaattga

SEQ ID NO: 19718 - DNA, 1278 bp, Cannabis sativa
actgtgttgacgatactgtaatttagggctgagcatgaaatccagaaaaccgaaaaaaccggtcaaaccgacctaccaaacactgctaaaactgaaaccgtttaaaccgaaaaccgagaaagccgctaatggtgcaaaccgaccgtaaacggtcggtttttaatttagtggtgaaccgaccaaagaaaccataaccgaccgactaatcaattaagtatatatatactgtatattaagtttatatacaagttatacattatttaatcattaaatattattattaatattattaaataaaataataactattgatttatttctctctctcgatcagtttcccaaagcacccattctttttttttttttgcttaatcccaatgcacccatttactctcatttattacttttgtttttttggaagaaagtaagtcatttactctagtatattctagggcaccgattcttctcccctaatttctctatcttaaagctgccatcaatgtatccacctccatagagagcctcttagacttagactactcaatcacaatgagtggctctctctcacttatctcgcattctcatcaattgcatgtatgctctcatctctcatccattctctccattttatggcaccataacaactagagcaaaaagaaaacaatggttagcatctgttctctacaacaaagaagaagagcaattttattttccttgcggcattagatctattattatttgcttttcttgtttaatgtatatattcaacatcttttatattattcaattcactaattttatctttgtatatatttaactatgattttagtggactggcagatatgtgttgttctagatctaatttttattcatttttgttgtttaaatttgttattgaatttacaatataaaccaatagttatttgattttagtggacttcagtaacatatattcatatcgttttaaatctaatttttgcctattttattgttgaaatttgttattattttagattctaaaatgctaaaatttaaattttaaatatatcttttataacttctacatgctagtcttaccgtgtaaaaaacataaaaagagaactcaaaaacggtttggacggttttaaccgagaaaaccgcggtttaataaatggtcggtttttttaattattatcttggccggtcggttttcggattttaaccgttaaaatcgaaaaccgaattttggatttttaaagaagaaaaaaccgaccaaaccgaccaatgctcaccactact

SEQ ID NO: 19719 - DNA, 3798 bp, Cannabis sativa
tttgattgcctcaatgcataccaagattgagatttctctgtttaaccaacctgaattgaaaggaaaaggccgttttctttcggattctagttcataggctctttcccttactaccacattgttccccaaaaatattgttttctggttcaaaacagataataagctcccttatgagattacatgtccatataacgaaattaaagattgaaggggtttggtaacaagttactaaccatgtcattatttccttctcttctcaatgacctcctcttatcttggttccaatggtttccgaaaatcttgcacatggaaatgttgtaacggccattgggatgatctgctccgagttgcaacaccaataactcattgagagggcgctcgtcctcgccacatctaaaatcacaaaccacccaacagttaacaaagttacttacttacattagaagttgacaattaagcaagattaaaaaaagatacattacccgccatagatggcaatatcaaaatctgcaacaatggcagtgtgagagaatcgcccttgtggttgttggcctcgtataacaagctgagtccaagagcaagtactcacatcaaggatccaaacatcattgtagtaatgtttgtccccaactccaccaatgacatagacctgaaaatcacaagcaacttagatccaaacaccaatgatgttcctttccattttaattttctaacaacaaactcaatcacttgcctttgtcccaatgtttacagcagcatggcccgcccttacaccaggcgaagatccttgcacagatagctattgaaacataaaaaccagagcttaaattaaactcagtatttaaaaaaagaaccatgtaaatcaataacatgttgttttttctaagaaattatacccgcgaccaagttaaggtatccatatcgagcatgtcaacatcgccattataccgatcaccacaatctccaccataaacaaagagcttgtttccaaatgtaacagcactatgactatctctagggacaggaacatcacccttaacttcaggggaactccatgtcatggttttgagatcaagaatatgcaaatcattcaagtaatttccttcaccttcaccactgcctccaaatatcactagcttctcatcactaactagtgtagcagtgtgactttcgcgaggtgaaggcggggttcctttgcattcgggttgcatccattctttctttcctaaatctagtatatgcagatcgtttactttcttcgagccatttgtacccccgaaaaccaccattttctgccccacaacaaccgcgctgtggctgtccctcgggccagggccttcgcctgtggatacaagagcattccaaaccattgtgtcaagatttagcagaagaacatcaccaaaatgcaagcctccacaacacccctgaaatgatagaaaacaacaacaaaaaatggtcaatatttagcattggaatgaaaacattttaagttcctaatgagatcaattacaaatttggatattaatagttgacctttgaagtatgttgtgctaataaaagccaatttaatcaaattccaaatttgatgtaaaatatattaccaaattctatatagtttcaaccccatatcttaaaatctcactttagagagcttaaaatttaacagtgtgcttcaaccgaagttcatcttccatttccctctagaactatttaatttccataataaattaaaataaaaatacagagttagatagacagaactcagaccaagccaagctcagaagatactttaagtaaagaactaaaccaagaaaagagaagaaaatagaaagtaagttatttatattacaaccattaatagtgatattagaacaacaaacaattaggagggaaagaaaccaaaatcatattcataataacaaaaaaaaattatacataccccaaatacatagagaatcccttgagcataacaagtagagtgcccccatctttcagaaggattaaatcccataaccttaggataaagccacattgccttcttctctacagcttcaatccccaaagaccccatttttatttgatgcttattcagtttttctctctttattgaagctgaaagagagagaaagagaaagagagaaagatggaaaatgggattgttgttgatggggtatcagattacttgaaaacagtatttgagaaagatgaatgaagaagagagaagaggaaaataaaagggtcaaaagaggacatgaacaaggcaaagtaagtgatgtatcaactatcagtgtcaatagacatgaaaagatgggagctttcaagtctaaatcactgtggcaaccaacaaagacagaagggttgtggtgaaaacaacatattttttcctcttaattctgttgattatctcatatttcgtgtgtgaaaaaagaaaaaaataaataaaaattgaaactttagtactacccttttaatgatcagtatttagactattagttgagctatataaatgaaaaagtaaaagaaaaatttacttggtacactaataataatcaaccaaccaacgactgatgtgaaatcatgagaagtgactaatattatttatttactttactagtctaaagaaagcttttttatttatttatttatttaagaaattaattttcttttcacatttctggtcttgctgaaaatgatggagtgggaggtgggcattgggttgtgggaaatgatggggaaggtgtattttggtggtttgaggttttgtaaggtagaatggggggtttagagacttgggtgaagagaatttgtttcagtgtttccatacatatacaactcattatttatttatttattattgattgatatttgttttgaaattttggtatagttattttatgatattggaattgagattgggattgatgggagtgaagtgtttccactcttacttttttttttcttttttttttttataaattttttttatatgtactcaattttcaaggtgggttattgatttgtatctagaaatgtctcttctcaagggtctttggggcaagtgtgggggctttgtgatatggaaattctttttttagttttgggaaatgggatttgggatttgggaattgggatggtgttggtttacctcaaaaggttgggtgttttcttggaaagctggtcttatctaataaataattaaaaatttgtaagaaagttggtcttggtttatattccacacaaaaagaaaaattgataatttcaagttaaaattttaaacaattcagaaaattaagtcataatttcataataagattttagtaattatataaatattatgagtgattgaaatttttttaaaaaaaaacattagataataaaaaattagaaatgctagagagtaaccttgatgtttaatattaatatatcctattattataagatatcttattattattgttagtgtaatgaatctcaaatttttttatttaataatgattataaagaatgttaattaaccatatgataatattttagagactgaattatagattatactctattctcgtggtaggttgaaattggaagtcaaacttgtgtgtatttatttagggactaatttaggaagcatatggttacgacactatgacaatacttgaaaatgatacgaaataagtaggtttggtaatatatttaataaccaatgttgtgtttgtatttgaatttgagtttttgacatttaataattatgtcatgttcatgtttactttaagggctcatttgatatgcaagactgaattg

SEQ ID NO: 19720 - DNA, 3798 bp, Cannabis sativa
acttacttttggcaacaacaaatcctccgagtacaaacaccagtaacaatgtaaaagtaccaagagtatttgcaataacttgtgttcttccaattgcagcgatgaagcgaaagagggaaagagccatctgatgtatgccaaagaatgccaacaactgtttgaaaaatctgttgtgaaagcaagaacaataaggtggttttagccaatgctatgctctatacataactcaaatggaaagaaaattgtgaagcttattttacctgctagctgctggagcaaacccaattgtgtaatatgttagaacaatccatattgctgattctataaatgatagggggattcttaggacccaaataggaaagcaaaaagcccaagcaggataaaacaagaaatccctttgtttgaaaaacacaggaagtctaaaaatagtcatagccagctctgccatcccattgaacatcacattaatcagactaaagaaaagtgctccaaaaaactttcctccatctactacagttcccactggcatttctgttctaaggaacacagtcaaagcaatgagcgacatgattgttatctgtgttgttttgaatatgtaaatgaaagaacttcgcttcataagcagccattctctcgaaaagcatgctttgaatagctctatatttgatattccatacttttctgtcaccaatgcagccgggtgagctctacttttgtcataaggaattccaagatcagatgcaagtttgtgaccaatgtggaaatttttgaatgactctgaaaaatcagagactgatatgaagttgtaagggtggtggtttttacaccaatattgttcttggtctttcttggatgttacttcttgtaaaaagtcagcaactcctttcctctctgggcatttgaaccccatgtactcaaagaactctagtacattttctttaggaccttggtacacaatttgaccttctgaaagtaagattatgtcatcgaaaagctcatatgtctctggtgctggttgtagaagggagataaccattgttacatctaagatatgaaccatttgtctcatgtaactgcatatttgaaatgtggtggaactatctaatcctgttgaaatttcatccatcaaaagaacttttgctggccccaccaacatctctcctaaacacatttcatgcaaagtccattagttcattaatcctagaaaattattactttgtagcaatcattttcaatatttttgtttgtaaatgataaactcatgtattttgtttttttattcttcataaatattgataaattgatgatgaaaaaatgcattggagaaactgagtcccatattcacttcaggatccttgtgtttatgtagtgacatgcctttagtgaaggtatttgatgttccaagctcttatttgctatttttgaagatactttacgagaactgaaatgagcttagaacttgggacaatttgaatgcagaacatattaagaacaacatgtcagttaattgcaatattgaatttaattagaattaatggtttttgttagttctaattatattatataagaattgcaaatataagcttaaaaatatacctgttgtaactcgcttcttttgaccaccagaaatacctcttctcatatcatcaccaaccataatgtcagcacaaatatccaacccaagtatctgtcatcattcctaatagtcagaattctaagacttaaacaaaatcaagcatatctatctatttaataaaaagatagagaggataattaagaactagctagttagttaaccttaagaacataatcagtgacaagacttgtcttctggcctgaaattgcagtggccttcatgaatgcatcaatctgagggtctggtttaatccctaattctttttctcttaaggagagctcagccaacatttcataccttgtcccaacgcctaaacatcttcctgagaaatctaaggtttctcttactgtcatctctccatagtgaagatcatgttgactaatgtaagcacatgttctttgaggtacaaattctttcatttcatggccacagtatgtgacttttccagatacctgattataagaatataatacgtactaaagttgattaattatgttattatgaacaatttatagatgggtacttcaattagcacaaactttttttccaaatattttgttgcatgtgattttttttttttacataactaactgtttgaattttatcttccgtattataagatattttaaattttttttgactaatgtatacgattaaaaaaatataaactaaaaaattattctaaatgttaaaacagttaaaaagagtaatgaaacacctttcttaggggtagtatagacttatattttttataagctctttagaatttttgtcctaactattactattaccaaatcgtctcttttgaacttttatattcattaactattcataatactaaaatatagaacttttgttaagttttatttaatgtatctagcaaaatactaatgtgtcattattatataagtgtgacatgtataatttaaaatttaaaatttaaaatttcacattggtcacattaacatttgttaatcacatgacatacaacttaacaaaagtatatttcatctttgtaaaaagtttaagtagaatttttaagagacaaaaagttcagaccatacaatttagatgaaaattctacaagagaaatattaaaaggtactagtagtgtttattattcttttacgtgtcaatatcgttattgatctaattaaatatcatcaggtcacatatagtttaatacaataacttttaattattaattatcatagtgtaagattataatttttatgtaatctatatattttttaaaatatttttttacttgacctttttcttaaaatagatgagtcttcaaaatttttttctctataataagatttcccactttattattgacgataaaataaataataaagacacattatatttacaatacaaaaatttatatatgcacttaattcaaattcaatattatatatataagacttaaattaatttttaaaattgacttgcaatttcttttcatattttttttttatattagtttcaacaattatatttattttattttctttgttataatgtatatttattttcgtagcgatggacactcttaaaaaaataccgatgcattttttatttgttttaaattcgaatattttttaatttttttataattatgtatgttatagttatttaagacattgtgtaaaattttaagaaatttgaaataatttacaatataaaaagtagtgtttaaacggtctatttcacacgcgtataaaataaaagagtcactggtgcaacagactgtttcaattctattttcggcgtgttaaatttctctaaaagtctcaaaattttacaagatatcttaaataattacaacgtacaggattatgaaaaaaattagactaaaaaattctttcatatatcgaaataaataagagtgcatcagtacttccattttgaaagagtgcatggtagaatatcctaaacttttatatgttttctaattttattttttttatcataataaatttgttttatttcattttatatatatattttttttaatataataagaaaaagaaacaatataaatttatgggtgtttttataatgcatcccctcaaaagagatatattgatgcaccctctacctattttggcatccagaataatattttttagtctattttttttttttttcatatt

SEQ ID NO: 19721 - DNA, 3931 bp, Cannabis sativa
tgtagtcattgatgtcatagtcatatttggcccactcaatcagtgtaacagtatatttttgctaatatgtttcaacaagttcttgtgagttcataaaccaattacatgattttttttctttctaattattcttttctcttttagtgaatatggtttgcttgattttcaaatttaatgcaatggcatctagtattgattgtcatactaatttattggatcattatgaattatattagtatatttgcacacgctgatatggtataactacaatgaatactaattcactctttcttttacagtacttatttatgcattgattaatactgaattttataattgggtagatacagtgcataaacatttgatcagtgttatatctttgtttaacaattttggtgcttaattttgggttagcaggataattattgctgtaaaggatgcttgttttggcttcgaatattatatatttatttgttaagatgctcgagaaatattgatgacttactcttttggcatattattattaccttagcttgcatacaaatgttgactaatgttgattatataattatagagggttgtcttaattcaatgtttgcttttattaatttctttttctcccacatgctgtccccttaaaatatgttttcaaatattttagtaagtagctggatatcatcatgtgaattgcattaacattaattgtttaattataataatattcttattattctagctgcacacaacgtttgtaaattggtattgcattatatatataattatatatatgtaaatacttctatttgaaatggcttgttcttaatttgtttctccctctgcctttttattatacatatagatcatgtcaataccccttgcccctatgtctagttatagttttttcctatatatggataagttagttggcaaaactctatatatattatatataacaactagagtcaatatttctctctcccctctttctataatatatttataattctctctttcctattgatcttttgcatgatttatagacatattagagcataagttggcttaatttggcaaaagttttgttgctatatagtttttgcatatattgactgataattggatgtttatgtgttaaaacacatttgaaagcacttcataattgttcttactctaatagagtaatgaaatatatgcacccaaaatatttcaaatagtgacagtattttcaataaattacatttattttacactggaaccacggttttcaaaaatattatcagatcagtgtgtaataatgtctgatttgtatattttaggtttgcacatacattactatgaattttagaagctgtaatccatcatgtaatagtttgtttagtcattgttattttcaattgcattcttctagtatattagttgttttccttattatgatacatcgttattttccaacggcattttaattagtattttcatttgaaattcttggcttttacatagaattggaatcatgtttgagatttgcagtactgtattattctactcaaccttatttactagtcaagtttaacttcttgtcaactattgaaatcatagagttgcatagaattggaaccatgctctgtgaacattgttcatgttctatagctatattagaagtgaggctttctcttttctccggtttccttgctttctgagtgtaatatataaaatatatatagtaagttattcagttactatgtacgtatatatatagtcacaatatttttcttttcctttagaaaaacaaaatcaagaattaatggatgcatttgggtgcatgactcccatgttttagtcttaccatttatttcttcatcaggagtcgatatatatatatatataacaatatttagcctataaaggtgctgtattgacattaccagtttttctttgatcttgtaacactaatatattaatttatatatatgcaatttcagtgtatatagcattgtcattaggtgaaactaatgaaataatgtaagttatcgaggatcgaatatgcagtttaggtagttacgatgtttttagtgaaccgaatggttttaattattcatgcgtatatattttgactgtacatcacgttaattcattggatgcttcgtgtagatatatacttttgtttttggttgttttttgagtgatatgtatatatgtatgtatatatatatttatatataacaactgtgattagattcgtttttttagtcaaaatgtgtctggaaccactaggaataactgttacattgatcatgacgtgcactttaaatggtggaggatttgttcaagctttgttatgtgtaatttagtggaagcttgaccgaatgagagattcttatagaagttgttagttaagccattgatcgtacttttactttagccctttcatatataatcattgattgccaattgttttgctggtttttctttcattatttattatatatgtatatgcattgaatgattaaaagcttcgcctcatcatgagttagtatgtatatacatatatcgaaaaatacatttatattaatgtaattgattactaattaactagcatacatagtttagcatgcttcaaaatacttgacaatcattttaggctcgttacgaagaattatataaatatgtagttgattaattatgtgtttccacttcaaaaaataaataaagttgataattgtgtataaaatgtatactttattttctttccttaatctcattatttatatatacttggttaatatataatcgaattgtacgttaacagaatcttcaagtgacatatgagctagagattgaagctctctatatatatagctagggtttgtaattatgaatttattcaagtataaaactatgaatgccttttttatgatgataataaatttattgtcgtaatggtgtaaatgaaaattttaattgctaatatggtatcattagtaccttcataaatttatacaacttctccatgcagagtactcaagctttaacttttacgaaatgtcttagtattattgaaactgctctttcctttagtcggcttaaaagtgaattatgagtagaagaagtttctgaaagggaaaatggtccacttatacagtaaattatcgaatgctgtatatataactatataatctcaattcttctaaaaaaaatatagagatcaatgctttatatacaactttattatataaatatatttttcaaataatgattattatggagtttttattgatactgttgttaaagatgatgctctttggtagtgctcaataataatgcatattaaaaacttcaaccaaataataataattattatagtaataaaaagaataatgctattcacataacaaaattcttttttcttattattatataaaaataaagtttaggctaggttttgaaagttagattttgatggggaaagaaaaacataaaaaacttcccatatatggtatgcaataaaaaattgtatgaaaaaaaattcctttcaacaaaatttttccaatcaaatatgaaaaaatgattttattgcataccaaatatgtgaagttttttatgtttttctttctccaccaaaatttgcaacaactttaatttattacctttggcgggttaagaatgaagtcttttgtaattgtacagaggatataaaataatgttaaagagagaattttattgttttggccaaaagtgtaagtgctattgatagtttgaaaatttataacagtatatatatagatacttgtttgtattgtatataaaaggtgctggttggattggatgtaatttgttttagtcaatgaaattttttttggttaaaaaaaatcttaaaaaagagataatattgatgtattaatgatcttatttatttttgtataattaaataata

SEQ ID NO: 19722 - DNA, 3159 bp, Cannabis sativa
gctgatattacaggttcatttaggcctggagttctcactgcattgatgggagttagtggggcagggaaaactactttacttgatgttcttgctggaagaaaaaccattggatacatagaaggagatattcgaattggtgggtatcctaaagttcaagaaacatttgccaggatttcaggatactgtgagcagactgatatacattcaccacaaatcactgtagaagaatctgtcattttttcagcttggttgcgtctagattctaagattgatgcaaaaactaagctaattatttgtcagttaccaaaattttcttttctacttggagctaatatatgcttgaaatgttctaacaggactttgtgaatgaagttcttgtgaccattgaacttgatggaataaaagatgccttagtaggaatacctggtgttagtggtctttcgaatgagcagcgtaagcggctaacaatagctgtggaacttgtctcaaacccatccataatctttatggatgaacccacaactggcttggatgctagatcagctgcaattgtcatgagagcagtgaagaatgttgctgatactggtagaacaattgtttgtaccattcaccaacctagtatcgacatattcgaatcttttgatgaggtaacatgtctttgattgtagtttaagaaaaaatgtgattgataatataaacaccatagcaaagatggtactatggaacattgctaatgatggttcttctatttcaacgtagctaatccttctgaaaattggtggacgcataatatactctggaccacttgggaagaactcaacaagagttatagaatactttgaggtcagtgcaacttccaattgatacatgtatgatccttcttagttcttttgcttcattaacttctgttttcctttgttttttttttttttttttcattttttctaacagggtatttctggagttgcaaatattaggaataactgtaatccagcaacatggatgctagaagtcacttcttcatcttcagaagctggacttgaagtagattttgccaaaatttacaaagaatcttctttatacaagcaagtagaatcttacagttcctagaacaaaagttgttttcttatatacaaatatctttgcagattgaatattatgttaaataacctcaatgttatgtatgcaggaacaataaaaatctcgcaaagcaattgagtactccaccacctggttcaagaaatcttcatttcccaactcgtttttcacaaaatgcatggggacaattcgaatcttgcttatggaaactcaacttgtcttattggagaagtccctcatacaactttatgcgtttaatgcatacccttgttacatcttttgtctttggggcattgttttggaaccaaggaaagaaaatgtaaaacacatctttactcttttttcattcatttaatcagctttctcttttccaagttttgaaaacacttaactttattcattcatctttttcagaaccaaccagcagaacttattcaatatatttggttcgatgtatacatcagtgggattcttgggaatcaataattgcatgactgtgttacaacatgtggcaacagagagaacagttatgtatcgagaaaaatttgcagggatgtactcatcgtggacttattcacttgcccaggtacaatttcgatagaaccttctaaagtgtcttgcttgaaaatgtcaacacttttgactcaccatgttttgtaggtagcagttgaaattccttacacattcactgaagctgtgctttttctgataataacatatccaatgattggatattattggacaacatataaaattttctggtacttctatacaattttttgtacatttttgtactacaactatcttggaatgatgcttgtttctatgacacccaacttcaacattgctgccattctagcttcatcttgctacacattgttcaatcttttcgcgggttttcttattcctaaacgtgtaagccagtctagcttttcattctacaatgaaaaagatatagtttgaaaagaaaaaactaaacattttgtgtttttctgtatatttgcagcatattccaaagtggtggatttggttgtactatctgattccaacatcttggtcactaaacggtttactaacttctcaatatggagacataagcaaggaaattgaaatctatggagaagtcaaaacagtggctaccttcatagaagattactttggttttcactatgaccaactaccacttgtggcagctgttcttattgcctttcctcttgtttattcatctctattcacttactgcataggaaggttgaactaccagagaagataacacaaattcattaacatgtatgtacatatgttacctcttttgcttctctgtaaatcatcattccagggcccggacctggacccgggcccgaccctgaattttagtgagtcataaacaaaaataaaactacaaaagcatttattaaagtatttttgtaattattttacagtacatgtaacatgtgtagttaatggtgtctttacatgtgtgcacacaaacttagaaacaaaatctgttgtgagagaattgaatcagattaatttttaagaacattgggttgttttactgttaaaaaatagccattaaaaattgtgtagttataaagtaaatatccctttgtatttgaacttatcttttctaatgctttttctctgtttttttttttggtctgatttcttactaagtagtttagttgaacagaagctattatctaagttttaccttcttctttgttgttgtagctgcaataagaacataatataaatgaacaacaaagtatcaaagtgacttcatccaaaaatcatttataattcacgtgatgtgttcttttttgtctttttaacagtattgtgtgtgatgatagacattccaaagtggtggggattatttgattaattagtgataaatgacatacaaacttctcatatatttaatatccatttcccaccaaagaaagaattaaacattgtaaagtgacagaacagtcttttaataaaagggcatgaaattgaatgatgaataaacacaacacactaatcttacccaagacacaagtattaatattttag

SEQ ID NO: 19723 - DNA, 2022 bp, Cannabis sativa
actataaaatgtgacccaaaacttaggctaaaaatagcctaacagttgtagtgcaatcaaacgtgccttagatatctatcatcgcgcgtctggacaacaggttaatgagaacaagtttgttatgtccttctctcctaatacattagcggccacaaaacattctttcacacaaatattggggatatgccgataagcgaatgtcatgagaagtatttgggcctacctgcatattcagagcatgacaaaaatgaattgtttactgacattaaagatccaatttggaaactccttcgctcttggaatgataaactcttttcgataggagggaaagaaattctactcaaggccgttgtgcaagctaaaccaacatacgcaatgagttgtttcaaattatcagctaagttttgcaaacaacttgatacaatgatgtctcaattctggtggggttctactaataacaaaaaaaaagacacattggaagaaaggagaatttttgtgcaagtccaaaatggatggtggaatgggtttcgctctcatgttcattacaaccaagctttgttagcaaaacaagcttggagaatttttcaaagtcccacttcccttttggcacgactactgaaggctagatacttttggaatggagatatactttcagctacatcggctggagtctcttcattaacttggaaatgaatatttggggtagggatttattggtgaaaggacagagattacatgtaggtaatggggctcaaattagatgtgcaactgacccttggatccctgcccgcaatgtttttactcctatatactacaagggacctaaagaccggttagtatcacactatatcaccacaaactcggaatgggatatcagatcattgcagcaagatttttgtcatgtgaatttcgatcatatcttgaaaatcccattctcattaagtgctaataatgatttttagatttggcattataactcctcaggtgattattctgtgcaatcggggtatcaattagcttgctcattggaggaacagaataactcatccacatcactatccaatgcatcatggtggcaagaattttggaagctcaatttacctttaaaaatcaaatatttgtttggagagttataaacaattctactccagcggctgcaaatctgttcaagaggaaaataattgtttcctctgcttgtagcctttgttcaaatgcatgggaatcaattggacatgctttgattagttgtaagcatgctaaatcaatttggagatactcaaattttcgacctgattttgctgtagcaagcaggatgaatgatggagattatttaattcatctgtcaacgatacattccaagtctgaactggaaatgataatttgcacaatgtggtctatttggtctgacaggaataatattctccataataattcgcacaagttacctgctgcaatattctccaactcatcggcatatctctcaaactttcagcaagtttcaaggaagaataatgctactggtttagcaccaacagtagctaaaagagtgccatggaaagctccccctcttggacaaattaaactgaatgtggatgcaactataaatccttcatcgaaccagattggattaggagacatcctacgcgattcttcggaacatgagatagctgctacttctatgaaaataccaggcaactttcggccacaggatatggaagcaaagactttaattcatggtctacaatgggcaagacggttgaatatccaattggacctcgtggaaactgactgtttaattcttgtccaagctcttcatggtttaacatcaagctgttattcgtttcacaatctcattcttgatgttaaaaatctatcatcctattaccctaatgtttgtgtatttcatgtacgtagagatgcaaaccaagctgctcatagtttggctaaacaaactttaactttggataatgattgtaattggttaggtgaaatccccctgccatttattcttttttttttttt

SEQ ID NO: 19724 - DNA, 4912 bp, Cannabis sativa
caaggtgcagtaatcaagggaagtaatcatggcaaaaagatttggaaagacaagaagaagatttgcttttggttggtatgacacccagactaggtggactgtttgagcaaagtcacgcgtcacataattgtgcgaagagagaagccaaaatgtcccagtatgactagaactccccgcgcgaacttggggggcaaatgttatcccaaaaattaccctaataatgtggcatagaatgatgtgacacatggcgagcatagaagaggttggacggatgtgaaactcttaatataggtgcccagaagatactggtcgacagtatatgcctaataaagccgaccaacatcatataggtgttagatggagcatatccactagcgtttcgagtaaccaataattggagcataaggggtgttcgaccaaagacccttgtgaggggaaatggccagattcatctcttcaactgatttccccataaataggtcaatcaacactcctataagtgaaagattgcgagaatcaagaaagattaaaggatttcgtagaattgactcacaatcagagcacattttatttatctgtaattaaatataaatattctacatcattttccctataaataatgatcatattcatccttaagagaacatttacccaattggattgtttataactttttcaagagatattgagaaactcacctggccagtctttgtgatcttgatattctttcataagcagtacaacaaaaaatggaaccaatcaaaggtgtcgaacctttgtaaattctcgtgttgtttatagtctttattaacttgatagttcaaatactcatattatcgttttattgtcttcgcttagttgactagaaacaaggtcaacgcttacaaagacaaacagctaagtgaagtgggaagtcattagtgtgaaaataagtgtgagaagaaactttaaacttggtatcaacaaaatgaaaagaaaaatcaaaatggaaaccagtgtttgtataacttacaccacgaacaacaatacccagatgttcaatttcacacagcttgtctaaatttccaattatacttcaaaatattgtacaatgatcccacataaagtggctgcaaatgcagggcaatgatctcccatatcagttgcaagaggatttgagctgacacaatacgaccccagccacccatttttgcgcagttgaggggctggtcatctaaactatgagattcagaactttcgggagctggaagcggctgactttgtgtaggcgagttttcagagctttcattgtcatcgtttggtggatcatcagaatcttctctcttgtctttgttcttctcgctaggactcccgccgttaccttccttaggggtgcttttgatcaagtctggtcgtgcttcaacaccaacacgtcttagatgtagctgtcacattgcagacaccagttgaagcttaaaaaagtaaaacaaaattaactcttgcatcggcagccatggatttttaaggaaaggaaaaattagaaccaatacctgaagatgtagattgacttcgtctgggcgtgaaagaaatgggaaatctcccccactcttcaaatacgcccgtcttgctccaggatatctttcacttaattgatctttaagttgttgagggattgcacagtagtcatttgtcttcagtaggagatcatgtagacacatacaggaattaaaaaatatccaaaatgaagaaaagaaaaaggaaagagttttgggctttctttactacatgtatgctagacctaataatggaaattcttgtgctgtctgtgttgagccctaaaaggatgtcgtgaaggaaaccataaaatgccagcagtgcagaaaaattgtcttacaaaacgaatgaatgtcatcaattgatagtccgagagagaaacaagagttcaatggggaaagctttcaaaatatatatactaaacgtattttataactgtgactctgaggaatgttcacttaaatacatggataaattaaagcaagagccagattaacatacatccattattgtgattagtgaatctgacaggaggagtgatccaacagaagcagcatcaaccgtcaaagtcaacctagatgccaaatcttctcttgaaagtgtttcaacctagatgatcaaatatttgggttaagtataacaagttatttgtgtatctttaaagtaattagccactaatacattttgagaataaacacagaaattaaaaatattgaataaaaaatagaaaagtatatgccacatcttaacaaatgttaagttccatgttaagctaaaacactgaattattttgcttgaaataaaaacactggattatttaaaaggctcctcgagtagattgctttatagtatagtagaatacagatataaaagcaaactagctaaagcctcctagattctacctgagaaacaacaaagtccacagaatcagcaatgaaaggctcatgggggccatcgcgaattcccgttaggacatatctttttaacaaaaatgagggtgtccaactaactctgcattgggcaatggttaaatcagtaaagtaaattagatgagagaaatttcttagtgaattatagagaattattgatccaataataactaattctgccatgtatcttatcagagaacaaagagtttgtaatcgtatctctccaaatggagtgaaagacatatgatatcacagtaagcaaggtaataaattaggtaaatgcctacgtttgactgtatcctagtgtcacaagttttacacaagtaaatttagttagagacaccaaatactaatacattaataaaatccaattgaaacaaagaagtgtatcaatatccagaaaaagaatgaaaaaatgctaatgcgacccccacgtcaattaacaactcaaacgtacttctcatataacttaataattttggcaatccccattctacattcattgcatatgaaattaaaacatacactggagcccatgggatcgcagcagagaaactgcgagtatccaaaaaggagttggatagtactaatgaacgaactcgtctaggacgatgatgagcaaaaagttgagccaagaagccaccaagcgatgtaccatagagatgtatctgttggaaacacaaatcgataaaaaagaacgttacttggtaatcacataggtatgatcactatgaaaggtgagtttttatattcatttataagtttaagcaaatacgattttactgtgttcatacagtaactcaatatagcctgttttcatcgggaaagtggtataacaggggaaaggatgtttaacaactttagatacagttgagtccaacgcctgcttttaatcacagttacatgatcacaaccaaattagatcaatttttatttgaaaatccctgaccctagctagccatagacctagcaatatactttataatactgatatttaatacaattaaatatacatagttaggcacttacatgatgaacatctatagcatccaaaaacttttcaaatgcttgaatccattcctgatgattccagacccgtggaatatcaactgagattatccggtatccctgtacatttaagtaaggagcgaagatacaataacttttatgtcaattaatccataaaggaaacacttttgagaaagagaaaaaggtcaagatgaaagaccaaaatattaactagctatgtcagctcacaagtttataaaaatgacccgatggaataatattcactacataaaagtacacaactcgcgaggattttctttttctctccttaacataaaatttgccaaactaacaatgtaaaatactaaaatttgcaaaataacctcacttaatttacattatgcgaccatgatggccacacaatgtaaatttatggtcatttcgcaatcacaatgatcattttatggtcatgcgatcatacatggttattttgctaataaaattttttgtaaagttatttcgctaatgagaattttcacgctatttttacaaaacactcttcagacaaggagaagctctgtgaaaaaaacaatgatcgatttgagaattgtgcagaagaattaataccagaatattaattctttgtgaggaaattagatcaaatgcattgatatcaaccataagattgtagtgacactatttaaataaaagatataacaaagtatggtcagatccactaccttcatagacaacgccatgatctgtttgtagtagacatccgccgttcctgctgttccaggaatgcaaataagtggaggaactactttaggcccaaaatcataatatcgccactgctttgttccaatctgcaagcaagtctcatcaccaatcatgaatcccaggttagaaatagttcaaaattaacatcatttaaatacacatccaacacaaggagaaagtagaaaaacacaaatcaatgtttcgtaaacaccaatcgtttcatcattagcagcagggttttgtggctgaaacaatgacatgtaaagtaaaaatgaaaactttacaagcaaactcttacatgatacagaaatcaacgacataaaatgtcatacaatgtgaactcaactacaattctaagcaaacgaacaacttcataatgcaaacgaacaagcatattagtaatttagtacctccacagataatttagaccgaaatcacaactgaagcaatagttaacagcgtaaaatttgcaaacccaccttacaattaacaaaaaaaaaataaaaaaaaattattaaaccaactagagaaatggtcaagcagcgatcaagaaatcacaaaaatcacaaaagaagccaaatctaacaagaacatgaacaaaggggaaaaatcctaatacagaaaacacataaaaatagggtggaataatcgaaaaggaagag

SEQ ID NO: 19725 - DNA, 4906 bp, Cannabis sativa
taaaactattttaataaaattgtatattaaatatgtacaaaaataatatatattatatatattatatatgttcggtcggttcttagttttttacaatattccagtgagtatccaagggattagcaataaattggcacactttattaacactgaaagaaatataaggtctggtaattgtgagatactgcaatgcatcaatggacctatataattgtggattagcaactagatctccataaaatacagatagttttaggccactagtcataggtgttggcaatactttggtatcttgcattttagttatgagcactagatttataatgtattttccttaggacagattcatatctgtttcattatactgaacttcaattccaaggaagtaatgaaacttgccaagatttttaacagaaaacttggaatccagagttgcaatcagagttgtgataagagcaaaaatacatcatgtgatgactatatcatcgacatagacaaggataagtgtaactgatgtggttgtgtgttgaataaagagattgtgattagacttgatgaaacaaacccaagagagatcaaacattaatgaagcttttttctttcctttttgtagttcagtttcagcctaaaaggtttgaaaggtcttaagagcttcagacttatttttagaagatatatccaagtgaatctattacaagcatcaacaaaactcatgtattacttctaaccattataagaaatggtttgagagggacccaaaaatcatatacaacaagttgtaaaggttctaaatacacagtgctagagaattttgggaatggaattttgtgaaccttgcccaaacaacaggcttgacacacaaaataataaggtcttttgttataagagatattacaagaattcaatacagattgtacagctttttcagagggatgacctgatctattatgccacaactcaaagatagaaacagatggtttattacaatgagaacatgaactagcactgagtgcagaatcacttgaacttgtggtgacaaaacagacacatttttgagctgacttgatgagctttgaacaaattagagagagtggagaggacaatacttggaatcatcctggatcaaaagtatatagattattgtagtgtgtcccagttagaattgtggctttggtcacctattccttgatataacaaacatgtggatgaaactcaaaaaacacataattatccagagcaaatttagagacaccaaaaagattcttagtaatttctagtacatacaacaaattattgagaatcaaaggtttatctaaactattagaattaagaaagatatgaccagtgtgttgaattgtcaaacctgatccattaccaagatatagcctatcttatccattgtaatttgaactatgcatgagattattcagattaagggtgcaatgattagttgcaccatggtactaatttccatctccaccttgatttatctgagctacattaacttgcatagatgtggatccttcaaatgctgggaagactcgagtgaaactcttatcaaacctatggaagcactcaagagccatatgactcaatttgtggcaaagttgacactaaagtctatgcaactaagcttccaggatgttgaaatttgtatatatcctcctctcccagtattgaatgatggagatctacctcatgacatggaactagaattagatcctatatttccatgaaaactagatgaattaggtgaagaataataagagtattaaatggaaactgacctcaagaggttcctgaattcttagaattatgattaaaatgagctaagtgtgcttcatatgaccactgattaggatctgtatttttgctagcaacaacaagattcacactgagattaatctcccgaccagtcttatcaattcttgattctgaagctagtagctagaacgacttcaatttcagcaattgaatattcttctattcgagtgtttgaagatatgataaacgtatcatattcgcttggcaaccattgaagattgaagcaatgtgatctcgagcaaaaagaacttatccaattgaggccaacaaatctacaacatgcttcactttgagaagatagtcattgagagacaaggtacctttcttaagattttgaaactttgtacgaaactctagaatcttggatgaaacttgaagggtgaaatgtttttctagtgcactctagatctgtcaagcagtattacaccccaccattcaagtgagtagactctcagtcatggaagatagaagccgagacaccagtatttgattttgaaaaattcacatttcacaaaagctggattgagaactcgattcacctgctctgcatcattgaggtactgcggtggtaaagcaacttcctgaatatacttttacaacctattgccacgaattgctgctagaatctattgtttttaaaggagaaaattatgatcattgagcttgatcaacaaggtgtgattgaagtaaacagaataataatcatctacttctttgacttgatttctcgctgctgcagattgaagatttataggagctgagggaaatgtggagcccattaccaactccagtgcttaccatattagctgtcaatggaggaaatagctctgataccatattagagttgttactatgtcttaccataattgaagaacaaagaacagttttaacaaaagagagaagaaagatgaagaagaaaagaaaaataggaaaaagactaaaagataatatctcatttaatcaagatgagtagtacactatatatatatataaatatatatatatatataagctcaagagaggtaacaaactagaaattgtaaaaaaaaaaataactgtataattgtaacaaaaatctaacaaccaaaccagctcttaacaatcataactaaaaatattctaattatctttacaatcgggatgtataactttctcttttaaaaatttatgaaacgcttttttttttttaaaaaatattttaaaaataattaaaataagtacatttttcaaaattccttaattgttattttataaaaattttaagtaaacaatatttttatatatatacaaataactctacaatatatataaaaaaaataaatacataattgagaggctacagtggagactgcagtcccttattccccggaatcatgatccattaactaggccaacgtctattctatatatcaatccatacaactaattagaattaattaatgatattaatcagtacaaaaattaaggtgcaaccaatataaatattatactcctagtgtaccaaatacttattatatatattataactagctaaccttttattattaattagtttgtcgaattttataagaactaataaacacatcttgtctattattatattatactctatagctgcaaataattcgaaaatatgtactaattatattactttttaaaatattaaactttatttgaattataaatctcataattgattttttattttaataaatatatgtaatgattattactcgttactacttatttagataagcaactgatattataattagcaacaaaggaggttagttgttcaacccaaaaagggatttttttttcttcttttctacacttgttatttttattttattttatttcatttcatttatctagtactaaatattcaatgctcacctgaataacatttcattatgaagttctgagcttttttttttctcagcacttaaatgcacattaagaattacagaccccacatataacacatcattttatactttcaaaaaattttaaataaaaaaatgcattttatttttttacacaaaaaaacaaccaatacatttatattcgaaattcaattttttttataacttcaccacttttgattttttgttatttaagcaatatttgtttataagaaaaaaaataaattgtatttattaatttatttattttatctcttcacaagacagcctctcccacttgtctcattactttcaaaaccattccccacaacctccattctgactaaaccattaatgccacataaataactcaaacatattttacagctctccatttctaaattataaaatcagattcaataattatatattttatttatttttttaaaaaaaattaaaaaaaaaaaacacaaataaattcatttgaacccaccacaagagaaactatttcttaagccaagaaagaagcctttttccctcgcccaaaaccgaaaagaaaaaatcatatgggaaagaaaatgaagctcccttttctggctaaccaaacaacagagcctaaatctacaacatggccatggccttcgtgtgctcaaacaagaaccctctctttcagaactactcctcaaaacgacaacgttttattcaaaacaatcaattcagctttcatagactcatcaactactacacctccttctcttctacctaatgactattactcatcaccatcgtcttctgactcagcagcaagcttctccacaaattccgccgacgacccacctctatcttccggcgccggagccggcggagacccagttgaggcagtgattgaaggactaaggtcaacggatgagagccggttgttcttcgagcctggggaggctaatagtactgcttctatacttgaagaaagtattagtagtgttgataataataataatattaagagattagagaaagtgattccttacaaggaaagtgttgctttatcaatggagtctagaaacccttatttggatttcaaacaatctatggaggaaatggttgaggcacatggtctaaagggttgggaaagccttgaagagcttttgagttggtatttgaagatgaatggaaaagac

SEQ ID NO: 19726 - DNA, 2977 bp, Cannabis sativa
gcacattttttgtaattattttgtttttgttgtacatttatgaaaaaagcccaataatttatttaaaataaaagagtcctgcaacatacaacttaaaccttatttttggtgtattaatttttcaatttttttaaaaattataaaggtatattagactgaaaaaattgaactcaacaaattattgtagttattaagtaaggttatactaatttggtgtagaattttttactttttgtgcaacaactctattaacttgataaaatagtgctctattaatctaattctaaccttcttttttctttttttctttttttctttttttattttttatttttttttatctatgcctctatgttgttttattttttatattgaacaacccatgttttcttggtaaattcagaaaggaaaggaatgcgtggaacgagactgggaatcggactaggtaaatataaaacaacgacagtaccatctcaatttgattcataagatttttgatttatttgtatcattcatttcaatcttcatcaaaagtacgtatataaaatataaagtattacaaaaaatatgcattaagtcactttgttcaaatttctttggctccacaaaataaaattggtaaattttatcctacactatttgtgtcatatcgttatttgtacattttaatatcgagtctcatacattttaatttaataaataatataacaaactgctaaccaattatagagcatcacatcatagtgttagactctttgagatgccgaataacaatacttatttcatataatgtattttgctatgaaaaaaaatcattggtacaaagcccttgctatcaatttcagtagcttagataattttggagacctcttttatattatttttatatctaaatagtttcaatcataattctttttatatgacactatatatttgtaaatttatgaaaaattcaaaataatgttcaaagagcatgcactcgtctcttttaaaattttagacggtgtttatgtttaaaatttcctgtattgtaaattatctcaaatttttcaaacttcgcaaaatgtttatagctattcaaatattaaaaaaacaaattaagaaagtttaccggtacatacatctgttttttttttttttttttgggtgcatcttataaatattattaattagtgccaatggatcattgattcaaacatgtgagtttatcctttcctttcaatgattgcatgcaggtgttactctttgtgtaatgggaattatagtaagtgcagtactagcccacatactgtggaagaagaatcaaaataaagaaaacgttgaggccttccttgaaagctatggccccattcaagttagaagatatagttattcaaaaatcaagaaaatgacaaactcattcacacaaaaattaggccaaggaggctttggtgatgtctacaaaggaatcttagatgatggctcttttgttgctgttaaggttttgaaccaatccaaaagtaaagatgggcaagatttcatgaatgaggtagcaaccataagcagaacttcccatgttaatgttgtcactttattgggattttgctttgatggttctaaaagagctttaatatacgagttcatgcccaatggatctcttgagaagtttatatttgatgacaacgcgaatgatgatgaaaacaatcatcacttagattgggaaacttgctatcgaatctcactcggtattgctaaaggactcgagtatttgcatcgtggttgcaacactcaaattttacattttgatatcaaacctcataacattcttcttgatgttggctttgtccccaaaatttcagatttcgggcttgccaaaatttgtaaaagagacgaaagtcgtgtttcaatgttaagtccaagagggactgctggatacattgctcctgaagtttttaatagaaactttggaaatgtgtcacataaatcagatgtctatagctatgggatgatggtgttagaaatgattggaggaagaaaaaatatcaatatccaagttgataatacaagtgagatatatttcccacattggatatataaacgccttgagttggatgagaatcttggactaaagagaatgattaatgaagaagatggggtgaaagtgaagaagatgataatagtaagcttgtggtgtattcagaccaatccttcaaaccgaccagccatgaatcgagtaattgaaatgttggaagggaatgtcgattccttggaagttccaccccagcctttcttgtactctccttcaagatcactatctccataatcttctcaaacatttgtacaactctaaaagtaaaatactacttagatcataatcgagattatttgcaccgaataacaggatcaatgaaccatactagtaactttaatttatttttttatatttatatttaaattattcaatattaaatattaatcatttaacatttatattcttgcaatttctttttttatttctaaaactgtaatttttccataaagaaccatggtgagttcatgtcttagtgaagtcctcatcgtaatggaatgcttcttttttctaaacacactttccatgaaagtactctgtcatcaaaattccaaacttttcaagtcaactaccaggtcaagcattacaaaactttcttgtggtgttttgcattagaaatccaaattattcttggggttggggatgtttaacatggctatggctgctactattcctctgtttgttatcttccttctcactcattctctgcttccaagctctggtgaagaagagggatcccttccaaaaaaatgtggtgtgttcccagtgaactgttcagaagatggacccaaaatccaattgaaaaaagaagaagaagggccaggggactggtatagaattgagtcagttgcgacaatgtctcgatcagactcagactcaagagtctatgttggaactttgtatgaaata

SEQ ID NO: 19727 - DNA, 2558 bp, Cannabis sativa
  modified_base (2487)..(2526): a, c, t, g, unknown or other
taagaattgcgggttaggtggggatcctagtttcaaatatgtatttttgattctttcttacttttggtatttgtataataagttgaacaaagataggaattataaaattatgtatattctcagaaattgaacctcataagctatatgagttatttggtttattgaatcaattaacatacttgttgatggttaagatctttagacaatgaaatcgattttgatgttgattattgggttgggtttaatgaatcatttgtcgttttgtcgtttacctgtgcttgagtagcatgataatgaaacaaagaggccatttaggcttttgaaaaggaactaaatgatttggttagtaatttggtacttactgcatgctatagaaactggtcccctctgccttagagaaattagagtactttttccttcataattcaaaaaattacttatagttactttctataattatgctcattacagtttcttaatccattagtgtttcaatcttatcatcatgtctttttcaccatacatagctattgatcgtccttaaactaattactgattttatttatcttctaatctgttgaaggaacatccatgttacttatgattgcaattatgatttaggaattgtttactagttagagctgttttgtttagttagatagtttaatcattctaataataatttcagattgattatcgatcttctaatttaaatggttcatagctagcgaaaatgtgcttcgtttgccggactgctagatgctttttgaatggtgtgttttattttaagctaatcttttcttagactttatagatgttaaatgtttaggaccctgttttatagtagataatttaattttttacttgttcgttccttattaatttatctttattttatgcctcttctcattagagtgttgtaatgtttttgtaggggattttatggtcattcacacagaagttatagtttccatggcggctttagattggtctctttttgattgggcttccattacattttgtagagacttgtttgattttggtctctgatttctctaagagatccttgtattgtaatgagatagggtcttcgttagaggatatcgcaagtttatttatccgattttcctgaagtatttctaattcatgtttgacgttcggccataaggctattcatgaattggttgtgtatacattcaggatggatggtaaatttgtttggttggaaagtttctccttttttttagatgtaatacaatccgattattttcaatgaaatttatgttcattgttaaaacaaaaaaactgtagtgttttcaatgtgcttggcaaaacttttgttttcacttaattcttcttttctcaataacgttaaccctgtaaattgtttgaataccattcaaattcaacatatttgagttttatcaaaaaaattccatggataactattagattttacaattatgaattattaaattaattttctctattttaatgacatatttgatttatatattgttatttggcactatttttttcctttttctttcatgtctatggaaattttatgtggaacatcatattttcacaatctaatagctcgtgtgacagagaaaaacaacattcgtgtaaaggaacattttccttcattagtcatacaaacatatatacatatatgtataaatttagacatttttcctgggtcttcaattttatataggtggaatggaatggaaatgaagaaacatcttttcttttgtgtgtgtgtgcagagtaggtatgttttcattttatctaatactcttacatagcctggaattgtggtggcaataaggttttattgtttatccatggaattgcctctggaaattgatacgagttaaccatatctattaaaaaaaatttaaagacataaacttacattatagggtttatgatatgtaatattgtgaactttgttgagaatactattttgtaaccaaacaaaactcctatttgggaaagttgtggttggattgaaggctagcattcatcattaggaaattaaagcatgtttgtggtagagtttgttggtgtggagtggacaataggccgtggaagagtggttaaattccttatagacatttatcatattggctccatagaatctcaaaaatccaaacaatggaaattaataaggttgccaaatcagaattattttgggtacttatgccgctatttatccttaaatatattaacatttgagtaattattttttttaaaaaatataataattgtgtgttgctaaaataataatataaaacttaagtgctttactataaacaactaaaagagtaatttgcagcaaaaaaacttaagtttaattcccagttgtaaataaatacctaaatttaatttttggcagtagtaatacctacgttataattttgaaactttttgtaggtacctggctgtaaaatgttaaataaattgccacgtgacaattcnnnnnnnnnnnnnnnnnnnnnnnnnnnnnnnnnnnnnnnnaaaaattaatttaaatataccgataagaaaat

SEQ ID NO: 19728 - DNA, 6926 bp, Cannabis sativa
taaggtcgttggtaaaaatgaaatccacaatgaaagaaaattctattttgttgcaaaaattaaaactaaaattaaaaatacatggaaatatatgttagtgtctaaagctcctaattaattgagttgatgtaaattttcataaattttgataaatgtcaaaactcccgaacttaaattacggtttgctagcgactaatatgtatgactaggaactagtcatcgttttacataaataacacatttgtggcttaggatattcatggctctttgaccactaaacttcttgacttttggtcatattaaaataaattttttctttttctttttaaagtggattagatgaaaaataatttgagtagtattaattataatttttttagtcactttttgtattggaaatggagctcttactatttcacacatgttatttgttgatgatagctatgtatactatcgtgctactgaggacgaggccgataatgtgcttagattactccatatttttgaaatcgcttttggacaaagggtgaatttctctaaatcatcaatattttttagtgctaatactcctttgaatttgcgtggcagactgtgtacttgtgtgggtatggtggcagctgatgaaaacagtttctatctcggattaccttgcattattggtcgtaaaaagatagcgatcttaagcttccttaaggaaaaaaatgagaaaagaatattgagttgggagagtaaatttctattaaaggctggccgagaagttttgttaaaaacagtggcccaagcccttcccagctatgccatgtccgtgtttcttattccccttgaaacttgcagtgaactagagaaacttatgtctaagtactggtggggtaactcaaagaaatcaagaggaataacctggatgagttggaatcatttgagcaaacacaagagttcgggtgggatcgattttaggaatttgcatgactataacttatccttcttgggcaaacaagcttggcgattgttaactaatgagacgtctcttattggtcgaatttacaagagcatgtactatccacagggaacatttctttcagctgtgattggcaacaatcctagcttcatttggagaagtatttttgaagcacaaccgattattgcagtaggggcacctatttgtattggtgctggtttgtctgtcctagttttaaattctccttggcttccagatacaacaaatccgtgtgtgatcaactctcatctaggacttgttggggtgatgttaatcagctcatgacagctgataatacttaatgggatgtggaggtactaaatgttcttcttgaacttagagaccgtgatcttattctcaatatttcccttaatccatctaatatggatgatgtttggttttggcatcatgagaactcgggtagctactctgttaagagctgctatcaatggcttcaagtttctaaaggcatatggttagttgatatggagtcggttctttggcgttcgttggggaaaactaaagtccctcctaaagtaatccattttgcttggaaagccatcactggttgcctgcctacacgaacagcttcactcaaaacatgtgtctgtgcaactcagttgtgtctgctgttctagagaagaagagtcaattttttatgtgctggtgtcctgccattttgctcactcttgttggaacagatttggtgtgactcttggctcaatctctgtcactcaatttggtgactggttgctgaaagttctgaaccgtggccaacctgctacgtttgaagaagcgtcgatggtttcttaggctatttggaatgttaggaatgacttgctttggaacaagaaagtctctactgctgctgaagtcattatctcctcacattcagttctaaatcaatggaagtgtgtttgttcgaatcgcttcgagcccctgcaatattgaataatttcagtagcactaaacattggattgcgcctgggactggtgtcattaaagtgaatgtggatggtgttgtttttgcagcaactcttggtgttggctgccttgcccgaggtgatgatggtcgacttcttgaggcgttttgtttgcacaaagttgggtgtgttcatcctagtttggtggaggtcattggtgtcaaagaggagctaagttggatcaagaaaaaaggatgggagcgtgctattgtggaaacagattcacttgtggtggttcaagctcttcaaagtaatgttattatgcaatctgtttttggttcaactatcacttattgtcttaatttactaaaatctatgatgcatgtcgaagtttgttatgttaaatgatctactaacaatgtcgctcattgtcttgcacacggtgcttgttattggtcagattatctttttgttgatagcaatgttcctgatgctttaataatgttgtaatggtcgatttggctgttctatcttaatgaagttttctctttccattcaaaaaaatatttttttgaatttttcttatgagtattgttattgggcaatggtgcctagcattttctatagatggcaccccaacgattagttagtgatattgctaaaaaaataatttcttaaattatatgagacccgatacttaatgcactatgacaacgaaaaatgtactaggcaccaatagtgactcttagcaattctctatttttttttatagtggtattcgttattattataatactattcttgtaaatttttttaaaaattgaatagtttaaaataccaaaaatagaattatattagaatttaccacacttgtttaaaaaactttaaacatattttcgatactaaactattcgaaaaatttctaaaatttacaggaatgatattataattataaagaacgccatcatgaattttcttttttttttttaataaaaatatttcgacatatattttcggatacagatattaactaaaaaattataataagagattgacggtaatactttaaatacttttattaattttattagacttctatatttaatttatatcaaagtatttttaaatataataatttgaaactactctacatataactcaacttatttttcagcccgcgaacttctcagttctaataatattttagccaaaattaattgtaaaacttatttttttttaatctttatattgaaatttgagattttacactatatattgaaatttcttactttctttattactgtgggtttttttttaaaaatactgtgtaccgtgttaagttttcactattgtttcacggttgttttttagttgtttttaattgtttgttttcttattttacaattattttataaaaagataatattttttaaaaaaacttcttgtggtagtaaaattgtaaaattttaaattcaatatttttgtaaaaatcttttttaattttgtgatttattctcctcttctattgcctctcctcctactctagtgcaaaataatctaatttttaatcaaattagtatgtttgttgcaaaaatgatacccaacaaaagaattaccccgattttatatattttttaattaaaggatggtaacaaaagtacccaatattttaaatttttattgaatttatccagtaaaaatactcattcgagacttccgttaccatcagttagtaacttaatatccaatttaaagaaggttgataagttttagagaaaattgtaacaaaagtacctagtattttgagttttagttaatttagtactcatttatttttcacgacaaaagtacttttcttaattaaaagaatgccaacacctccattgcattttttctcaccccttgagacactgttcaatatcaaaccagactacaagtcttttagagtctttgcctgtctatgttaccctaatttaagaccatacaatagacacaaactccaatacaggtcccaaccttgtgtttttcttgggtatagactgtctcacaaaggatacaaatgccttgccaaagatgggagcctacacatctctcgagatgttctctttgatgaacatattttttccatattctaaagtttctgcaaaagaaaatactaccaatacttcctctcccattttctctttcgttgttcctcctaccatacaacttgttattcctctcaatgctccaacatctcctcaccaggatcctggtccctcatccacaaccatttcaattgggcctattccctcatgctctcaacatgtttcctttgccactcctcccataaacactcaaccatattccccaccagctatatcctctttccctccctttaatgcagttgatgctacaccaacatcacctactgtctaacataccactgagccaacagtcctaccatctcatgaaagagttaatgaagctacaattatcccaccaaatacactttttcataataccattgttgcaccaattgtatttatcactaataaacatggtatgcaaactaaagcaaagtctagtatccataaaccaagagttctcactacttctctttcaccttcttctgtaaaggaagctttaaaaatatctcactggtttaaagttatgcaaacagagaatacaaccctcaagaaaaacaaaacatggatactattaaaacttccacctgatcgtgttcccattggttgcaatggtttgcaggatcaaagaaaatcatgatggttcaatttcaaggttcaaagcacgacttatttacaaggggtaccaccaacaagctggtttcgattttcatgaaacatttagcctagctattaaacctttcactataagagttgtgctcactcttgcaattacaaaagggatggaaagtgaggcaattagacattaacaatgcttttttagatggtgatctcaatgaagaaatatacatgattcaacctcctagattcatagatcccgaatatcttgacatggtatgcaagctcaacgaagcgctctatggccttaagcaggctcctagggtctggttcgaaaaattatcaacaactctatttcaatttggcttcgtctcagccaaaacagaccaatctctctttgttcgtgttaaaccaaactgttgcatatatgtactggtgtatgttgatgatattttagtcattggcaaccatgatgatgaagtctctgctcttttaactcagttgagcaatgaatttgctctgaaagatcttggcctagtgacatattttgttggtatactggttctgtctatactagatggtattctcctctctcagaagaaatacttacaagatctcatctgcaaggctcaacttcaaggtctaaaacacagagtacacccatgaacagtggtctaaggctatctaattttggcagtgatccagtagaagatgtcactctctatagatcaattgtgggggctctacaatatgcaaccatcactagacctaacattacttttagtgtcaataaggtctgtcaatttatgcataatccccttcaatcccattgggttgttgtcaaaagaattgtgaaatatcttgcaggcactgtagactatgggttgcatctaaaaccagtgtccaacttcaacataactgccttctgtgatgctgattgggcttcggatccagatgacaggtgttccacaactagtttttgtatattcgtaggggagaatctcatagcttggaagtcaaaaaagaaaagtaccatctctcgttcctccactgaagctaaattttgaagcttacctaatgttgtgtccgaagtcacatgggttcaatccttactcagtgagttgaattttgtcccaaccattcctccttcaatttggtgtgataatctcagatcagtaatgcttgcagccaatcctattctacatgctcctacaaaacacatagagattgatctttatttcgttcgagataaggtgttgtcaaaacaaatccaaatttagcatgttcctgcatcaaaccaacttggagactgtctaactaaacctatacctagcttcaagttttcttttctagaaacaaactatgtgtggtctctcaccccacttagtttgatgggggctgttaagagttagttataaagttagttattcacgttgttattcaattagtttgttacaatgtcttggttcttttattggttttggttcttgagctactggtgttagctcattcactttgtatatataaacttgtgtactctattttttataacaataataaaaaaattctttctttcattgtctttcttcttacaggaaggcaactattattaatttcaaattttcaatgaatttaagtctttctcttcccgacttgtgaattgagatcaccccattaaagagtaataatgctaaaagatattatttgtgtaaaatactctcctgatatcatgatatcgtgacttaatttttttattttttttttaaaaaataccattaaggctaactataaaagtgtttaaaattagaggtgttcatcaaatcgctcaaatcattagcactacatcacactacaaaaaaaatacggtttgaaattctttgcggtgcagtcgcggtttgaatttttcttaaaccgcgcggtgtggtgcggtttgcagttttgaattattaatatgcggttcaaactgcaccgcaccatatattataaaaataacaatttttatatttatttaggtccaatatgtgaaggcccaacccaacccaagtctactaatttttgtattgttgaaacttaaacttttttttacatatttatttttaagtctacagtatttttgacaagtgttgctcaaactttattgtatttgtgatagtttaattatttagtaataatctaaactgcataaaccaaaccgcatcgcaccattttttgcggtgcggtttttacaatttttttagttttacggtgcgggtgcagtttgagaaa

SEQ ID NO: 19729 - DNA, 2429 bp, Cannabis sativa
cataacaataatgtatcatccctaatgtattttactatgtttcaaaagaaaattttattttactaaaatgtcgtgaaatataaatggtaaataatgctttgtatatatttatgacaaattataaaggttttccctttaattagtaatttttctccatattaagggagcagatattatatatagtctgatagttagaacctacacgcaattcttagtaaccttcactgttataaatattttgttttaaatgttgctttgatatttgttcaacaagtacaatgagagttttaaaaaaaaacaatgatagagtatatatgcgatacacatatatttttataacacatacaaaatacggcacgtgttttaaactattttcaaagactgtttctaaatggatataaatacatctttttcaagaataatatgtaaacacatacgtgttcatattaaccaaacatatttaaatcaaccttgacaaattatttgttttacgaaattatttcgcattatttttcaattaaatgggatcaagttattatatctttactcaaattggttaattaattaattaacatttatgcaattagatgctatatatgtttttgtcaaaaaagaagaagaaagttttatttaactatatataatacgtgttgtacacagaaagagcgtgtgaaaactatactagataattaattgttaaattttgtttaccaaaaaggaagaggaatataatcttgagctgcgatcccattaaaaatattaatttttagcattgacatgactgataacaaaaacgacaaagcattgttataacacctttaataattgggttttgatgtgttacctaatagtgcatattacgcaacctcgtctatactcgtagaccccacaaaaaccccattattttctacaccaccaccatatatatcatataaacccttgctggcgattcctttggaaacccaatatttcatgattaaaaccaaccaaaagaagaaaaaaaaatcagtcatagtcaaaattatgatgaacttcttctattatataataataaatatatttaaataaataatggaccaacaatacaatcgttgccaaacctctagctaattaacctaagagatgatataaatatataagtatatatatatattttttttatttctgttaaagtgaaattattgcacacatcggttatatgaaagtgatacagatactactagccatattgctcacaaattaataaagacaaaacccaatatttatgaattgttattatcatcttgaatatatcacgaaagaatataatattttatttatataaacattaattggtgccatctttttgttcatatgaaatgaatatggaaaacatgcatgtaataacaagttgacatggatggaacaatatatcatgctgcacgtgaagcacgaattcgatcatatataggattaggacatttatatataatgtacactatatttactttttggatagtacactttaattcaactatcatatatactcaatttaaagttttcctttgcatttttcaaattataattatatgaatcattttaactgatcgtgttcgataatttagtcaaggaaattaataataacaagaataaatattaattagtcattaataaatttgtatgaaccatcgaattaatgtgacaaataattttgttatgttaattttatattaattaaaagaaaaaaaaaacacatcttctcttataaaaaatgcacagactcgctcacctcaaaatttgaaaatttgaaatttaaggatcaaatataataaaaaaaaaaaacgatccgtatattctagtttttaattctctaactaaactaatttggaaatattagctaatataggtcggctgtttaattttgagttatccatgttaattggctatctgagtacttaatatatttagttaataatcagtaggtcaactaaagccaagttttcttaattcatattaattcgataaaattgtagaaacgaacaacacctaaccaaaaaaaacgagcaacaagaagtctagaatgttcttaaaaatatatatagaaatagtcttgtgggtgacgtagaataaattgtgacatggcaatataattataaaacttacgtggtgcacactaagcaaattaatcataatttactaagtgccatgatttcattatatattatatttatatacacttctttaatgtgtattattgcttccatatatgtaaaaaaggcatcgctctactgcttgatgaggactaattactaatcacttaatatataaacaaatgaaaaataacttatatattcattgatttagtaaataaattaaacttacatttttattttatttaattagtagtaataagttgaaaattttacttgtgctttacaataattaattaa

SEQ ID NO: 19730 - DNA, 4168 bp, Cannabis sativa
gaccttgtgagtagttttcccttgtgagtagttttctgaatataaaaaatgagttaagggagctctccttttataagtaaaggaggccgacaaaaataggagaaaaataaaaattagacatttttggccgtagatgatgatttaacagtgaaaattagcttctgatagtgatagtcatttattaaagtcctgctgggcccgttgtgggtaacctagagtttattttcgtaactcccttaggggtgaaatttgaagtcgatagcttcaagattgtgattgaattttgagtcatgacttgatagagcattgtaatagctttgaaatgcaagttaaatcttattaatcgaatcaatattaagtgagttatgatcgttttactgaaggtagttcatgaccaagtgctaggttgacatccagcgcccaagttgacctcctatagcgcccaggtcgacatatgacgtcaacctatacgttgggtaagtgaaaaaaaatcgaagggatgtactttaagatgcttaagtgatattttgacatcacttagtttgtatttgtgtttaggcgaagctggtcaccaattcttgaagatatgttattctacgaaaatgagagactcgaaactcttcatttccgagtgagtatcccatgctggagatgataaatgcaaagttttgaattctacttctctgacttcatggctcttagttattgttaaaaactagacgggcggtcgaagcaaaatcataatcgaataagtaaaacccagcgcaccaggccatttattaacttgggcattgggtaccctatttctaagctctcgtgtttttgttttgatactttcaagcttcttgaactttaggatgagatcttctatcccgttttttatcattctagattcattggtcatataaattcggcatttaagtgatcgaaaccagcgcaccaagttgattgtcaacctgggcgctgggctctgcttccaagccttcatgtttgtggttgtcttcccaagtttgcttgaatctttattgatgacgaaaaaatgtccagaacacttttttcgataacttgattggaaacaacccaagttgacaatatgtcaacctgggcactgggtccatgttatggccctttgaaagttccattttgtctccgaaaatagttaaatcttaatctcttctgaaaacgaagaagatgctcagatgagttctcgaaaaacaccatcgaaatcgccccatgttgacaaaatgtcaacttaggctctgggccttacttctggcacccaagaagtgttgtctcttcttcaaaaatacttatttccccgtttttgatgaagacaaagatgatgcaaaagttggattgtcaatttgatatttggaaggcacctagattaacaaattgtcaacctggccctgggtgcccgagcatcaggtgctttgggtgctcaagaataaactttctccgaatatgattctgatgccttaaatatgttcgtggcatgtctagttcatgtcccaatgcaaaatttgactcatttgccctaagacagttccgaaaattgaaaccctaactgaggatgtcaacttgagcgctaggtgaaaccctaggtgcctaggggtactcatggggcctggattttgttgattcatgtcttcatggtatagaatgctgaaagatagtgagttggaaacgagttatcgtagtacgaacttctattctggagttcccgaagtcaacctgggaacagggctagggagcctccctaggtcgacctgctaagactcgggactactcaactatgagatgtcatctttcttgtcacgtaatattaatgtctacatcatcaatccatacacacatatattaaagattgaaaaaaattaatataatatttatagctttataaatagtaattttctaaatgtagctaaatatattataagctcgtttgatggagcatgatttttcatcatattttttgtaaataatttaactatcaactattttattagctactctaatatgagtgatcactaaaatagttgagctataaagctaatcacctgttgcttgggtggtccccaaatatggtggtgttactgctgtttttagtggcttgattcgatacttcttcttctatgagttttcttggtaaactgtatcagattggaaaataacaaatagaattggtgggtatattgtttacatgttttgtggtatatataatacactcatactgtaacatgtaatgatattgaaagataaaataaaaaatagttaagtgatggtggtccaaaagaactttgttagataaatgtatgactatttatatatatgatatatgcgcatgtgttaacatcaatcatttgatgagaagagagactatatagtgaagtaattgaattggtgtatgaaggagctccactcatccacacaaaacataataggtatagccaacatcttatccatccttcctgatctatagctacatatatatatatagcagctaagactatatggtcaaaagaaaatgggaaagactatactactggaggagctatcaaccagagactcaaatcttgtgacagttcacttacttttatacaaagcaactacagcgtagttttttgttgacccaagaagccaaaagaaacatgtacactcacttctagtcgtatatatatatattgatatctctgatcaatggctgaaattaactcttgaacgaagagatatccaatcaaatagtagtatatatttatgtatatataattaataaatactattgggaccacacataacgtttttatctatctttaaagatgatggatcaccaaagcattatatatatatgatcatcatcatcgcagttcacagtatgtactgatcttttcaagctttgaatctcgcacatcacggaacttcactacttataaaacttgtaaattatgtatatagtgaacgtcactatctatctttaactcactaaatgtgatatatgcaacttagaagcaatacataaatatatattttatatatttatatatctttttccaagttgtctcaacttaatggtgtaaggtcaaataatattaataatgttgtgatatcagattgggtaatgtggaatctaatagtactacttaagtacccctaaagtgcatcttcgtcagctaattcatataatatagtatattattattattaattaactattcgagattccaaatagtggaatttagaaattaataaattatgcttatatagtaaggaatccatatatattaattaaccataatatatgtataattactacttacctttccatcatcttcatttgtctctagctaatatatgtatattaagttaacctaattagcaagttcattcgaatatatgcactgagactaataaatatgtgggtctgcatgcatacatgtgtttgtgtgtatataatttattctgcgctttcataagagtcataaaagaataaaaacattactacctactgtaaaaggaaaagagacacctaaggcgaaactagcttcctacctaccaaacaccaattatagaatgtatttaattatgtatagggttataagtctcatcacaattcatgtacacctacaataacttttaaaaaagaaataacgtcaaaattgtgtgtatatatctgactatccctactcttgtaaaccgaaagtaaagaaaacaagagtacaataaatatcacatgcatgcgtaatcatcattacaagttaataattaaataaaatatgtatatgtagtaagagactagagtagctagttatagtagtgttatatatatatgttagcttgcttaggcccaacacttagacagctcttgtttattaaatataattagtttcttgattacgtacgcatccagaaaattattagtttcttaattaaatggttttgtataattaatatatacacaaacacataaaaccaaatgaataaataaggaaccaaatttaaaaaattaaaaatgctggggtcgatgtcgaaaggtgggcaccagtagtaatttagtggaacagcgaaggagaatagagagggtggtggcaccctcttgaggagacaagacggcgcacggcacgaaccttaggcttgccatacacctaatcatttctctctctctctctct

SEQ ID NO: 19731 - DNA, 1837 bp, Cannabis sativa
ggggggggggggggggagttcatgttctttgctgctactctctatcataagctctggttttttcaaaacaaaagctaccataataatgaaaggtggcctatgcagaagatgcggaagataatcaataaagagttcctgaatcattggatttctctttaggttgctcgactgattcgatcgatgagggccaggggattcatgaagttcgctggggactccctagaccagacaggattagagtaaatgtggactatgcaaacaaagatggactcagcttagtgggggtggtggtctcggatggaagcgggggagtcttggctctgtttgtctccaatttcattgcctcttctgtttgtagggggagttggaggctatctctgcagggctggttgtgcttcagagattgaggatcactgatgttaacttgatctcggactgtcaagctctggtcctggctgttaggaagcatcaacctccggcttggaatgtttattttcaatttactcaagttttaaatttgcttttagttttgaatgttaatgtagtttggctgtctcgttcttgtaaccattcggctcatgttttggccaaatggaacctttcctaaccagtatctttgactttttttaatgaagtgttttcgcatcttagcaaaaaaaaattgtgtcaagttgttaatgtcaatgctttctgttgatcttgatcacacactcatacatttgttcattcgaatgacaaaattgaagagaggcttttagttctgtgtttgagttattacaaggctatgtaaatgaattgatacaaagtctatccataggccatagactcttaactaacgtaacctaacacaaagttttattattggccataacttgaaatgcccactaagaacaatagattgtattaactgaattaattatgctaattgtattaactgtcacttatatagactaacaatattattgtattctgtatacaggcttataaatcctaaataaaataaacttttaaactatgaagatttaatttcaaaatcacgtaaaaaactttcttattatttattgttattcctactattaattattatatagttaattctgcagtatatttattactataaatactaattatttaattaacgaaaagttgtgttaacaaatatataagttttattgtgtagtatattattattttttagatcatgcttagtttttattttattatacataaagatgatatataattatgtaagtatggtataattattttatagttatatataattttgttaatatggtatataattgtttttaaataatattattttattttttcttgtaggtatatatattttgttgtatgatatattattttattgtgtataatatatcatttatttaagatgatttttagtttctattttattatataatacttatatataaattttttggtatggtatacatatttcaatagcggtatatataatgttgttagcataatatatataatttttgagtattaatatactaggtttagtaatgttataatttctttgtagcatataattttattactacgatatattaattttttagtaatacaatatatcaagtactgctgtatatatttataatataatatatttatttatttttgttacaatatatcaatatggaatactaaaaaatttatatagcttaatttaattattatataattattttcgaaagaattaatatattgtaaattattttataatttttatcagctaattcattatatttggccattttgttaactagtaaatatctcgcgcttcgcggcagatatataa

SEQ ID NO: 19732 - DNA, 2064 bp, Cannabis sativa
tgagattcctcagtcaaggttgacccaacagcaaaacgaagagcatacacgtcaccaaccatgcaatgactcatgtaaacccgacccgacccgtttatagactccaacaactctttgttcacgtcatttatgcatgcttcacgtaaatttacgttaccattaataacaccatactcatcaccgaagacgacgtcgtttttagcagttgttgttgttgttgtagtaataataattttgaatttacttatggccagtggtgaaatcctaaaacagaccaaagaaaagtttctcttaacgacaacctcaaacctgtcgtccgtacctaaaagagcttcgaactgtttagccatctttacatggcttcgtagaaacccttggagtctctcaacgccatagctacgaagaactaaccatagtttaagtgaacgaaatctcctgcttagtgttatttgccagtctttgtagtcaacgaccaactttgactcggtcgctttgttcttcaaaaactcagggcttgtcgataaagacttggtcaacgcaattggatcctttacccaaaggcaacaacagtcgagtgtagtgaaaaaccacttgtgcgcgttgaaactaaacgagttcacgcgctcaactccatcgatgaaatgtcggaattccggacaaatacacgcgcttccagcgtaagctgcgtccacgtggacccacatgtcgtgatcttttgccacgtcggatatcggacctagtggatcgaccgctgtggttcctgttgtccccaccgttgcgcaaacgaagaggggtaccaatcctgcttccacgtcagcaactatctttttctttaaaatttctgaggacatggataaaagcgtctttttattcgtctcgatgatccgacagttttccgggtggatcccaacgattctggatgccttttgaaaagcactgtgggtctgatccgacccgtaaacgacaagctttccgatgttttctcttccgatttcattaagctttcgatctctcgccgccacaagtgtgcaaattaccgcctcacacgtggtacccatcagaacgccgccgccggtaccggagaagaggaatgagttagggagtttgagcatttctccgagccagtccattactattgtttccagctcggtggctgcgggagatgagacccagttgagtccgacgacgtttaacccggcagctagggtttctccgaggaatccggcagtactcgcactggatgggaataatgcgaaatgggtcgggctttgccaatgggttaaacccggaattatgtgatcgttcacatctttgagaatggtttcgattggttctggaattttcggagcggatttgggtaaccgttttcggagataacccggttcgacccggcttagaaccgggtaggattcgatgttgttatagtaatctgctatgaaatcgattaccatatggccttgtcttctgaactcttcggattctaatgggttcatgatgggttattttgggaatgtgaaaatgtttttggagaatgggatattataatataataattcagaaaaagctttctactgatattattttctgcatacaattacaacaaatatttctagctatttatagattttgttcaactcaaatacacggctgagatctacggccacctaaattaagtggttgggattcattttacgtacacaaggattcaagtatagtgctcttaataaccaaaataatatcaccataatggtagtctattaataatttttcacataaacttatcaataatattcaacataatctcttttagtaaaaaaataaataaatgttcagcatatcacaatatgctaattattgattcataaaatgtaccaacataatttaaaaccttcctagcaaaagatatgataaaaaaaatatattatatatattaaaataatttatcttcctagaaaatatatatagtctctaaatatttaaataaagtatttttatacaaaagagtaaaaaaatatattatatatattaaaataatttatctttttagaaaatatatataatctt

SEQ ID NO: 19733 - DNA, 4325 bp, Cannabis sativa
tagccttaacttcttaaattataccctaaaaaagtttaccattgtaagtaacaaatatttaataaaagtatcttagagacatgcaattaatttcaatattaatctacatttgttataagttacatattagtgattaattttcttttctacaatttaaaacatgcacaaacaaacagctttagatctcataaaaaatgtccaagtgcaagcaatcctagggccacaaagttcaactcaagcaaaattcattatcgacttaggtcagaaagctcaagtgccaataatatcatttcagcaacaagtccttctcttaaaacgtcaagtcaacaaagctcgtactttttccaaacagcgacgagtgactcttctcaggtcatggccattagttccatagtcaaagcttttgggtggcgaaaagttgtccccatctacaccgacaacgaatatggagaaggaatccttccttatttaagtgatgccttaggagcagttaatgctgaaataccctatcgaagtgtcatttctccatttgccaccgacgatcaaatcaaagttgagctttacaaactagagacaatgcaaactagggtttttattgtgcacatgtggtatgacctagggtcaaggctatttaccatagccaagaagattggaatgttggaacaagactatgtttggatcataacacaagatttcaccaatcttttaagctcattaaattccatggaattgaattcaatggaaggggttttgggaattatgagttttgtgccacaaacaaaagaacttaataacattaaaactagatggagaaccaagttctacaaagatactaataatgacccttcttttcttgatgccaaactcaacattatgggcatgtgggcttatgattcagtctatgcattagctttagcaatagagaaaattagtaatacaatcacattaaatagtaatgttactactagtggtagcttaatagatctttatagttttaggatgtcaccaattggtccaaacttattagaagctatatcaagtacaaaatttaagggcatcgctggaaatttcatattagataataatggacaattagaaacatcgacgtttaaaataataaatattgtcaacggtggaggaagagaaatagggttctggacacgaaaaaatggcctactaagaaagttattattgcaatccaataatgacaaatattcaacttcaaaatcgaatctcggtcttatcatatggccaggagagtcaattttacctccaaaaggttgggagatcccaacaaatgggaagaggttaaggattggaattcctattaaaagtggttttaatgagtttgtaaaagtgatgaactttgattcaagtacaaacaaatctgatgctattggcttcaccattgatgtgtttatggctgcacttaatgttttaccatatgctcttccttacgattttttcccgtttgtcaaacctgatggcacgagtgctggaacgtatgatgatttggtctatcaagtatttctcggtgtaagtattttactaaaagattaatttgactttgtctaatttattggaaaatatttaggtaggaacattattacttttgctttaatcgtaggagcgagtattttttatttttggtataaagagaaattttaatttaatttcttatatggcaacgtacattatagttatagtaggcacatcatgtctgtttctcagtagttgtgaataatttacaatgctgaaataaagattcaaacaataagatacatgtatctctatttttttcttcatatacgcgtgtaaaaaactattttaaactttattttcaatactctaaattatgcataattttttgaaaacatactaaatataatttgttataactataaaatataatcccttataaacaaaattacagtataatttctgtaagtaccagaaataaaaaaaatgtccttacaataagaacaaaagtgatgcccttaactaaacacttctctactctacatatgtatgtaagactatataatcatatgcataattaatctgactaattaaagctattgtatttaatagaactatgatgcagtagtggcagacacaacaattagagcaaatcggtcgcaatatgtagattttacattgccatatacagattcaggtgtagtaatggtggttccaatgaaagatcataagaggaaaagtccttggatattcttaaaacctttgacttgggatttatgggttaccagccttggcttcttcctcttcactggttttgttgtttgggttctagaacacagaattaacgaagattttcgcggaccaccttctcatcaaatcggcacaagcttttggttctccttttccaccatggtttttgcacatagtatgtatttccattaatcaccgtcattgattatacatatataaaaattttatagctagtaggaacattacttttgtctctctcagtaagcgtcttttattttagtacttaattttgattaaaattataatttgcgttattgtgtacagaggagaatgtagtgagtaacttgggtagatttgtggtgatcatatgggtatttgtggtgttagtattgacacaaagttacacagcaagtttaacatcacttttaactgtggaacaacttgaaccaacacttactaatataaaccaagtgttaaagagtggagaaagagttgggtatttaagagaatcctttgtgtatggattgttgagacaaacgggttttccagattcacaaattgtggcttatgattctattgaacattgtgaccaactcttgtccataaaaaatgcaaaaggtggcattgctgctgttgttgatgaaactcctaatatgaaggtttttcttgctcaatattgctccaaatataccatgattgggcctatattcaaaaccactggttttggttttgtaagtatactcactttctcatcttaattattaaccttcgctttcttttttcgctttagaacaatatttatattttgagcattgttattaggcactagtggtgcctcaactactatgaggtgacaccttaaaaatagttaacgaaattttataaaaattatttaagatccaatacttaattgtatcaatagcaatatgacacctttgtaatgctagttataaccttctcttacattttatataattttgttatttaaaatttgaaaacaaattaaactagtggtttttatgaatgattataacatacctaatagtaatattgtcatattttttcttttgaccataggatataatttataaattacaataataaatatatatatatgtatatatatcattgttgttatattattccctcctaattaattactaaatgaataattatgtgtatcattttctcttaaggctttcccaaaagggtctccacttgtaggtgatatttcaacagccattcttaacgtgaccgaaagagatgacatgaagaacatcgaaaacaaatggttcaagccagcagacaagagttgtctagactctaacccaaaaatctcaccaaacagactcagtcttggtagcttttggggcctattcataatagccggagtctcttcattatttgcgctcataatctttgttgttatgttccttcataagaacaaacaagtcttgttagattctaatgatccatttgagaaaagaattaaggtttttctcaagaaatttgaccaaaaagacctcaacttccatcattttagaaagagtaacaacaacaacaatattaataataataatcaactcaatgaatgtggtgggatggacatggtggagttatcagataataataccgagtgccctccgagcccatcagactcaaactcgttgccagtttcaatggaagaacaaagatcaactatagtgccgaccattgatgagcttcttgttcaaattaatgaagatcactagcttaccaagttactagagaaaataattaaaaatcatatattttttaatatatgtgtaaataatttatattgctgatttttttaatgtatgttattggacactcacgcatatatatcaaaaaaaaaagtgataagattaaattggtccatgtataatgtcatgctctttcatgaaaggatttaataccaatcatgaaaaaaaaagtcatttaatttaatatatatatatatatatattataatgtatgtaaaacaagtgaacttatctatgcaattctaggaggacacaattagagaattgaattacaagactttgcaaaaattgcaagtcttgaaaaatgaattg

SEQ ID NO: 19734 - DNA, 3090 bp, Cannabis sativa
cttttagttcatacccttttcattgcaaaggctagcagccatcttctaagaactgatgaatggaatgaacattgaaggagataaatgtgatgtgactctttactaaaattgtagtattagtatcagtttatacaacaattacatttaatagttaatcatgttgtgtttgtataggccaatagggccctaattgttttgacactagtatagcttaatacacaattagagaacaaaatgccaacatactctaaagaaatctgaatcaacattacaaaattgtacattagctgatatttgttccaataaactgtaatatgttctcttacaggatacaatgcaaatcactcaaccctttgtacaatagttaatgcttgtttccaataaactaatactttgtttactaaataaatatgactactcatacaacatacaatacaaatcagttatacatgaatgaaagtgtaaaagtttcattgaagagtctttcacatactctgtatcaatctataaccactctgaacttccttgcactcccaatgccgcaaaggttaacacaacgcattagtgttcttcataacaagtcttaaacagtcagttgtaacactttgagtgaagcgatgaaaaaacccgaatcgtttagtcagctttcaaatgtctgaatgcccctgttcgggtgactcctgctggccaaggcaaatatgaggttgcctcactatgtaaatttgatctccctcttctttttctgtgtcctgatttcgataccaagtccacagagcccaagtctcattcttcatctacatcatcaaacattatcttgaatcaacttatccaaaacaacattgtaaatgcaagtggatcataaattttgtatcaaagctgcagaagaatagaaataacacctcaaggattccatggccaaagctgctttctctaaaagcactgtaatcaggttgcctgtcccaacagaacttccctgcagctgggccagacgtaaagtttgttgcacaaaagccacccatgtatggatcaggcgtagttgatggctcggggcaattacccggttcatcaacatgttcagtagccattttttctcggttacctccatccccaacagttatatacacaggaccacaaggatctaaggtataattaaaaacgcgatttgaccgctcataagcatgaacctgtcaaaattaatgttttgggtgatatagcagagctcagtattctcaaaagcaataaatgtaaaggaaataaacattaatgatgaattcatgcatgcatgcattgtcattaaatgaaaattagaaaaaacatcccttgaagcagtgtgcttgcattaatttttctgtttatcaaaattattagattttgaattcatatgtttcaattcttttatccacaaatgatattatagattatgatgacttacatgtccattgaacactatgtcaacaccataggagtaaagtagttcttccatttccactctcatgcactctgcttctctgtaatgggctttatagctagagtaccaaggaggatgccaagtagctaccaaccatggagttacagatcggtccacattagccagatcttgttccagccacttgtactggtttgctgcaacataaatgaaaagtataaataccaacagtagctatgcatatgcctttcaaactttaaacagaaaatgtagactcaagaatcatatgcaaataatgtgcaagcaaaacgaggataaataaaaacttggcttaccggccctatcataggcgatgtaagccccgagcatgataaaatggattccccctgcattaaaggagtagtagaatgtagatgaagaaccactttcttcagatgggaatgcaaaccgagaactgtaagccacaaaactctggttttcagcctggtcttctatttcatggttaccttctataaccattatgggaattttagaaactaatttctgcataaacctgaaaagaaacatcatggcaacaaaccaaaacaaatttccaataagtatgagttcaaaaggcaagtaatagaaatagaatggaaaacatattttcaccttccccagtaatcccagcgaggttgataggtctcatgaattggagtatctgagaaagaacaagaatagcaatccgaaccagttccatttgtaaggtacaaatttgcataagttacatccccgaccaaaagaacaagatcgggtttactactaatcaggtgactgatagttgtagatgtattgtaagtaagaccaagatctcccacaatagctatcctttttggatagctccggggaccagacattggcatagtcttgaaattgtatatttgactcatggctggtatagagggatctccacatcgataataatatcgtgtacttggtttcaatcctatatatgtgcagattcagagtaatgagaaactcttcaataaaggggtttctttttctttctcaaaaacaagattcatattctaaaaacaggctaaaacctgttaggcgaacgtgatggatgatcccagaagtgtaattttgcaggccttcaaaaggatatagctgactataaacaagagaatagccttctgcttcatatgacattggatatcttagttgcccataatgaacaatactggatacccttgcaggatctaatggatttatgtcaaaaccaatttggtattcccctaaaaacaaaaacaacaaaaaagttctaaaaatgaattcacttgtttaataaactaacagagcaacacaatttatgtcatgatttgagacagatcacatcgatcaagaatatcgaacaaaactgagaatgaatcaatagcatgaaccaaatcaagattcaaaactaaatgctgaaatgaataaacaatgctgccagatggatcttcaaactacacagatgaaactggaaataaaaaacacagattacgtggttcgaacccaattgagtgtactctacggaggaagaagcactaagctttcttctttattcctttcaaaaatagaattacaaataactaagactaaacaaagaaatcttaaagactcagctcataatagtacatcaa

SEQ ID NO: 19735 - DNA, 3024 bp, Cannabis sativa
attcacgtttttccaataacctcgttgattagcaacgagctgcgcagtacgttaaaaatcacgctaacatgcctatactagttagggtgttacaactctattgccttttgcagattaaggtttttttgctgtcattccttctagataagattcacataccagaagagttctaacttttagttctctcaaaggaccatcctttattaactgatttattctgtctaggccaatatggccaaaacgtagatgccatagatacgttttatcatcattagaaattttttgcctcttatttgattgaggcaatgctactctaaacaattcattatttaaaattaattgatctcttggcttaagcacatagtttttcgttactttattttgaagaataaataggcgtaccatttttgaaaataataatctcattattaataaaaacaatattgaaaaattattcatgcaaaagagataaagaaataatattcttgatacattcaggaataatataaatattgttcaataaaaaaaaattattatcaaatttcaaacggactctgccaacacccttggtagacacttgtgctccattacccacgtacatagtcacctccccaatggccagtttccttgacaaatcaagtatttacattgaaaaagaaatattataagtgactccaaggatttatcatctttaactaagttagcttcaaaaacaaataaatcatatttttatttcttaagctttgagagatactttttacagtttttcttccagtgtcccattacgccacaatggaaacacttgcctttacctttcttgtcctggacttggggctggctttgttcttcttggccttggggtgactttttgtttttgggcttgccactgatgttgtccttactattctaggagagtgtgtcagttagaaatcaaacctatagataattgtggccctttcctctgcagaggctgagtatatgactgcaattgaagccatcaaggaggtattatagcgaaagggttagaccagcgagttggggttcaattcagaagatataactatctattgtgataatcaaaatgctttgcatctcatgaaaaaatctatatttcatgaaaggtcaaagcacattaatatcaaactaaatttcatctgagatatagcgctctcaaaacaagttcaagtaaagaaaatatgcacccatgataaccttgcagacatgttcacaaagtgtattcgcagagacaagcttgatcaatgcctaaatctattaagcattctatattgttaagtcttgagtcattgcatcactggcttactgatctagtttaggtggatatgttgagaattagctcactaaactagccactagaaaaatactacaacatcggttcaacacatttatctattttttgtattcgatcggtagttaagttagttggcttcttttttttctgtcccacaatctcaactaccaatacctataaataaacataacagcctacaatcaagtaactttagcatgtagaagatctatctactgtccaaatttctctttttctttctctcttgaattgtaccatgttttagagatttagtgtgtgaaggagggttttaaagggtttttggtatttttgatccacacttttcaatgtgaggaactgttgtaactggtattgtacaccattgatgagtgtaattgagtttaaaactctagttgtaatgtgatgaaagtcaataaaaaaatacattcttttgctgccattgatttcgagctaagttttaaattctttgtctatttttctggtttaagttttaattccaatttttatttttagatgtttgattcatatgagttgttattgatcataataataacattaatgtgaattaaattcacatcaattataagaaagcccatactctcttaattatcataaaataaaataatgagttacattaccaaaaaaaatactatactaaatcataaatatgattaaaattagagcattattataggcaccaatggtgtctagcaccacctaagggtatcactttgtagataattagcaatatttcataatagttattaatttaaataatgtgagacttgatacttaattaaattaataagaatataacacttttagttagtgttagacactactaagatggcaggcaggcctatatgtcttggtttcaataagactccttatgagcgttgtttctttctactattatctaaaaataattaagttattaatgagtggacgaaacaaagaaataactcctcacgtgcaaaattataaaagattccctttaagatcaaacaattccatcggattgattatgattgtatgtgtgatagcatctactataccaggaatatcaatgaacccgattattgaaattgctcaggatacccttttttagcttctagaacctatttcttagttcaagatccctcttactaattagaattacattttagcttttctcatgaaattaacattaagcttgccaaaaaaaaaataatataatgtattttacataacagaataacagaacataattttaaaattttaaaataaaaatataattttaaagttaactaaatgactaatcaaaatatgtaataagataaaatgttcttgaaatattttttttaagaaattactcttattattggattttaacagttcttatgataaatatggcacacttaagtttgactaatttatatggtatttttttatttttaggtctttctatagtatttgatatgccatatatatatatatatatctacattaggtttttaaatctcatatttaatgtttttatttatttaggtagttttatttgtcactgatgctggaaaaaccgtcggagttgagtttgctgtcggtgctgaaaaaaaaaaattaccgaagtagcggtcgatgatgaaaaagtggtcggagttgttgccgacgccggaaaattcatcgaaatcggcattattgccggaaaaatcactgaa

SEQ ID NO: 19736 - DNA, 2412 bp, Cannabis sativa
gttgtcaatttagcaaatctcatgcgttatcctttgccactaatcacattcgtgccaaacacccattagatgtcatacagactgatgtttaggacccaactcccgtgatgtccaatgccaatttttgtttttacatttactttgtggctgattatagtaggtatatatgagtgtatcctttaaaaatcaaagatgaggctatcaaggactttattcagttcaagacatttgttaaaaaccaatttaataggcataaaaaatgtcttagaactgactgtgggagaattttaggcatttactcagtatgcatgtcattgacaataggatcgattttcagcactcatgtccacatctattagcttaaaatgggtgctgaaaaaaaatttcgacatatagtcgaaatagggctaactttcttagcacaagcctccatgcctctcaaatattggtgggatgcttttcaaaatttcgtataacttataaatagactacataatcctgtgttacaaaaccaatctctttttgaggttctcttttgtaaaaaacctgattacaaattccttggagttttcggaagtgcttgttacccatgccttagacatataaatcccacaaattctaataccacactagaaaatgtaccaacctcgactacaatgatgcacatgagggatataaatgcctaagcagtacaagtagattatatatatctaggcatgttatatttaatgaatgagactttcttttaaaaatggctttctcaacacacatagaggagagcaaccaatatctgtttgtgtaccatcttggtcagtttttattccatctcagcaaacaccaacttcccgaaacagatcagcctcaaactctccaactgacacacactgtaattctcatgaagatcagtcccttggataaagctcattcacaagacatcaggtatctcatattacccccttactttcacagcatagccaatccaaaacacctgtaatacattcagaacaggatgaaagagaaggacctcaaccaagagcacctgaacctgagatacaatctgtaccagtagcacctcttactttcacagcatagcctatccaaaatacttgtaattcattcagaacaggatgaaaaaggacctcaaccaagagcacctgaacctgagatacaaattgtccagtagtacctcttgcaccatcacacccaatgactacaagagccaaggcagacatattcaaacccaaagtctataagtcaaaggctgagattgaaaatgatagtaatgaacgaacactgttggagaggctctaaatgttggtaatactatgaaaagtgatatagtagccttatggaaaaacagaacatggatacttgtaccaatacagcctgggatgaacattgtgggtaataagtgggtattcaaagagaagagaaactcaggcggttctattaaaagattgaaagcacggctagtggctaaagggttcaaccaacgaccaggcattaatttcatcaaaacattcagccccataatcaaagctttaattgtttgaactatccttactagtactgtatctagatcatgggatatcaaacaattggatatcaataacaatttccttaatgggaagatagaagaagaagttttcatgagtcaacctcaagggttcattagcaaacacaaacccgattatgtgtgcgaattcattaaatctttgtatggcctaagacaagcttcgcgaacttggtatgataaacctatgaccacacttacaagccgaaactttcaaaactcaaaagctaaatctttcttgttttttttttttttttacgaaatgccaggttttatcgtcatggcttaatgatatatatttgtcttaaaggatcaagacccgcttcattacttccttagaatagacgtttacagagatgaaatagggttgtatataaaccagtctaaatatatcaaggagctacatctcaaaccttattcaacggtaatgatcgggtaaagctctatcgaaaacagatggtgaacctttaaagaatcctactgcatataaaagtgtgattgggggctgcaatatcttacacacacaaggcccgatttttcctttacagccaataaactaagttagtattttcaagctcccacaactatacattggcgtgcaaccaaaaagattttaagatacttaaaaggcacaattcatcataatctgcacctctgagttgttgcctataattggttattctgatgctagctgggcgtgtttctcaaatgacaggaagagtgtggctaattattgtgtctacctaagtgattttcgtggtcctcatacaagcaatcggtggtatctcgctctaccaatattgaatcagaatataaagttttagctcatgtggcagccg

SEQ ID NO: 19737 - DNA, 4369 bp, Cannabis sativa
tttttattttctggacttgaatattgagtgacatggatgtagggcaggtagatttatcacaggttttcacattagccagcatatgggtactctttcttgctattggcagttcagcttgcgttgtgcccataatctacaacattggacttgcttatcaaggtgcatataattcaggaatgcctcacattaaccatgtgcctgcattagagtttcttgccacagtaaatggtgttttattcctggtattcggttctcttattggctatccagttgcctcagcttctggtaagttagacatctgcttgaggaatatgaatcatttttcaaatcccagttaacttatgtgcatatgtttacagtaaaagttcttcaaggcctgtggagaaatgacttggtagcattgaagggggcatgcccaaattgtggagaggaggttagccaattgctcaatcataagatattaactagtctaataggctctccttaaatctttcctctgtctgcttctttcttcattttcactgatttcagtgccaccgtcctgcaggtttttgcatttgtgaaatcagataaatctaatgacaccccacatagagcagattgtcatgtatgtgaaagcctattagagtttcgcaccaaggttgaggtaattaatcctttttcgaacaatagaaaattcaagttaatccaatttatgttttttgaatccttttcatgtggtttgacaatctctaatgttcactgggctgccaagttcatttcatatcagccaacttgttgggtggtgtgttgtgtgtactgtgtagagattggggttaaaatctggctgagacgcaactgcctcttaataaaaaatatatatttggtggtttttagtcttaagtcattatcacatcagtgtgacatgtttttctaatgcataattgtgctcttgttatttttgtgcagaaatccgattgtagattgggtaggaaatgggtttatggtcgcatctatctagtttctcgaagaaatcgacgaagatggctgtaatatttgagctttatgtacagtggctcctcattctttccctttttttttcattttcccatccgtagaccgtttaactgttttatattttcattttattaacctaaaagataacagcaatctgtatgtaatttttggcaaccaacgcctaaatttatcattatgagatccattatgaaatgtaaagaagaaagaaagatttgaatttagaacataacctaattgacctataagctatggtcatcacgattgactgtttaaaacaaagacaacagactatattgtaaatttcacatgacaatctgagttcagaatcaactttttcctgctgaatgactgtttcttaaaaaatttgaataaaagaaaactcacaataacaaaagaagattgtaagggcatgtcctcataggcactcttatttaaggttacagaatcaaaattttgatactcaattgtagagaggctatgattttgctacgatgcaccaaagtttatgaagaaaattgttggatcacctatttaccacaaaccagaggacagcacactcctgctctgcgagttttccacatgatgcacactcataaagcaaagaacaactaataaagactctaattaattaactttctcattgtttgttaagctacggaatagcacttccagccttctaagttgtaatttttgcctcaacggatatagatgatgatgaatagatagccctatcagaagtggcccaagctgtagaccagaacccatgcaagctgaaaataataattgaataagttccacatttttcttgttttgccctactttgatgtataaaaaacatattttaaagggaaatgataaataataataacaataattacgataataaataaagataaagataagtaccagaaagagagttacggaagcaaacaacccttcttgaaggagagctccatgaccaccgaaatcttcttcatcaacctttagtatcattgcataataaccgtatattattccagatgacagcgctagaaaactgtgtaagtggcaatcagatcccataggttaacaaaattactgattttaatatgtatatatatatggtatatatatatataatatatacatatggtcagccaaatccagaaataacaaagagagacagtggattgagtttaatgaagattaagtaaaaaagaataacaatagcaattgtaaacattctatcaaaaaaaccaacggatatactacacaaaaaataaaaagaatttaaagacaagtaatatccaaaagtcatgtttcttagcaagacatcaaacgttctcttttcgaaatggacatcaaaccttctttagatctatttatataatcaccagttcttttgttttctttccgaaataatatattcaccagttcttttgttttctttccgaaataatatattcaccagttctgcctataaagaagtttaaacatttcaatgcctgtcttagcctaaatgagtacagcattaagaagaaagggagctgtaacctccagtccaccacaaacatttttaccaaaccgcaggtcaactcagagcattccttttccaatgactcactaaacataggtagtcaaagctttacgtccacatcccaaaatgaacgaagtttaaattctcaactaataacatcaaaagcttaatcacaatgttcagaaagaatataaaaaaggagaaattcttctcttgaaaaacttctttttttttacaaatatagtaatcaccctcctagaatttcattaatatgggaacaacaaaggtggaaaaacagtaaccagagaaggtctccactagttgacatagctttatatctaaaggaacgaaaaaaacccaatatgtcactccctataaaacaccaaaatccttctgatcaatcatagcctatgtaagtaaatccatatgacaaacatatccgtacatagttgagcacgataaacaaggcaatgcaatttcagaaacctctaaataaatccagtagatgttttcccattaggtattctaacataaaatagctgcattaacaggtagaattctcagtgcgaaagaggcttaacaataagttttaatctgggcctttcctctggaatcaaaatatctagcataatgcacggaacaggtataagcttaaacctaggccttcaaaatatcaaaggaagaaggcagagatctatacgtataacgtaatttgcacaacagaaatagacagtgctaaagcgaaaacttacatcataaaccatataccaccaaccaaaggtatggctccccatagcaacccacaaactagggccacgacttgtcggatccaatgcaagacatcacccagttgatcctgcacgaaattgtattgaatcaatggataaacgtaattaacaggtgaactaatgaattgggtccaaagtttgtgctcactgttaactgttatagcaaattaaatatatatatgatcaattgattaatcagtagctatccaatgccacagtaatcatatcctatttacccataaaattcttttcagcgcacttaaccggtaacaaaaaaataaaaaagtaatcttaagtgtaagaaacggcgaagaatacaagaaaataagattaccttgtcccatgaagcttctggatcgaacaatttggcgaatttgaacggagacaagtgaccgttctggtgattcaattggccgttcaattttagggattttccttctttcatacttggaaagttacaataatcaatcaacgaaatcagatattcaaaatcggtatctaatttttctcaagtagcggagagagggaggtaggattcgagtcagctaaacttaattgcccaacaatgatattgattactcaaaacgattgaaattaaagattcgaaaaaaattctagggttttaggttttcctacttaaattaaatttggtatgacagaaagaaactagaaaatgctgtagactaaaatttggatttttcagaaaaaaaaaaaaaagaaaaaaaggaaggattcttcgctgtaccgtggtgcctagaattaaatattcctacaatagtggacttgcacgtgaccagcgttagcttagctagctcatgatgaaccctaaacgttgtcgttgcactgtatattttcttttgctaaagttattttacaattcatataattaatgatgatgaataaattaaatagttaaatgttaggtttggtttgattttatataaaagtaaataaataaataattacaaaataataataatattataattaaaaaaatatattaaaggtttatattaatgattaattataaaattgtatttaaaaaaaa

SEQ ID NO: 19738 - DNA, 5489 bp, Cannabis sativa
tatatatctacatataaaaaatttgatgtttatatttgagtgagggttttagcccacatatgggctaaagtccctccgtccctgtgtgtatgtgtgatataatttggtgcgtggaagtgtttttttgactgtgtctcagtagtcatacttaaataattattgttatatatacaatatttttttataagtgataccttacaattgattagcgatttgtttaaaaattattttttttaaaatatatgagattcgatatttaattgcaccaataacaatatgacactaataaaaatactaagtacctactagtaataccttttaacaattccctaactaaattatattgaattgaaaaataaaataagctaccaaaccaataatgatagagcccgcgcaaatgttcaatgatgtgagaattccagttccaactaaatatatccacgttctattaacttattatgtagttgttgtactcacccatgtgagtatatttaccaaatattacacaaaccacctaatttttatttatgtacatatttatctgtctttaaaggaagagaggaaaaaaattcaaagcttaatttttcttaaaacttaaccatatataaggaaaatcattgtcattatcaataatatattgattagaatgttcttacagttttgagagattttgtgtgtattgggatttcatattccttctatatccttaattaaagaaactagtcttcaacattattatattgtttatgagtaaaagtaatgttggtctttagcattagtctttcttccttcaaatatagtatttgctatatattttgaaagaaacatagtcttttatatgtaagtgatgtcgaacttgtgaataatactttggcaactaaaaaaagaaagaaatataaagtagatggtgaaagagagaaaaataaatgtgggaaagaacataagaaaaggaatattcgacgttgttaacatgaagaatgttgaggtttgccttaattctcattgtgattgtaataatattattgaatttgaagactaaatgttcgaaatagtttggaaatattagaattaaaaacttgaataatctgattgcgggtagcattataatttctttccaacaacttttttttgtaaaagtctttccaatggtacttgaaaataaataaaaaattcgttaaaatttttttcttaatacaagttcttctatatgttctaattgacttcaaattatttctttctctttctacttcttaactacaaatcaaactcaaaaaatatatattttttttgaatggaaatttcatcttattactgaaattaaaccctcacatcagctaccaaacaatgtagcaattcagttggaacagtctccaaactaaaagtacgatcatgatataatctagcagctctagcaaacttgtgagccactacattagccgatcatttaacaaaagacacaacaacattattaagagatgcaagcatcatttaacaatcttgaatgacgctaccaaacaaggatatcatatcaatggaactatgaagagcttgcacctcacacagagaatcgatttcgatgtagacttgaggccattgactctctttcaaccaactcagcacctcacgaatgcctattgcttctgcaacagccacatccacttgagccgaagtgtacttcatccttccttcaagcaacagaccatctgaacttcaagcaaccatacccaaactgaagctccttccatcatcaaagactgccgcatcaacgtttaccttgacactattatcagcaggaggtgtccactgctcaccaacatcggcagccataagaataggccacgatgaatccgaagatacctgagcagctttccattgatcaaggtagcgaaacgcataagcaaccacgtctttaaagataaacagtttattgttccaaatcaggttgttcctggctccccaaacagtccaacaaatggccacaactctgcaattaacaacatcagaattgttgctgaaagtagcagtgcaccagtcgaaaaaacttgcaccagaattcacaatggtgccaattccaacacgatcccagcattttttgacctcacggcatgtgaccaacgcatggattatggtttcttgatcgttgtgacatatcgagcataaaggactaacctcaacacgcttagtacgcagttggaccaccgttggcaagcagttattacacgcccgccaaactagattctgcatctttgaaggaagtttctgctgccacaacttccgccaaaatgcatcgtctgattcatcaaaccaatatcccttcaatttttgcaagagagcataggcacttttaacagagaaaatgccggagttttctttggaccaaaccagatgatcaaaggttctagtaatgttgagaggaatggctttgatcaaatcacggtccctttcctcaaaaagatcacacagaatatcatcatcccaagttaactcccctattttcataagagcattaacagtggcattaaccaagaacgggtgataagatacaacctgggggtttccatcatggggaagccatggctctcctagaatcggtattctactaccatcacccacacaccatctaataccatgtcgtaaaagcgactgagattccaagatgcttctccacacaaaactcgggttcgaacccaattgagcattaagaaaattaccattaggaaaatacctagctttgaacaaacgagaagctaatgactgaggacgagtaagcatgcgccacccttgttttccagaagagagagattgaaatctcggagattacgaaatcccatccttcctcctcttttatgaaggcaaagtttatcccaagccatccaatgaatgcctttgttatcatcttatgaggttttccacaaaaacttacacattgctctttcaatatcattaatgatctcaagaggcaataaaaacacattcatagcgtaactaggaagcgcttgaacgactgattttataagaacctcttttcctcctttagaaagaaactttccttcccaactttgcagtcttttcttcaccttatctcttaagaaccccaacactgaagttttatttctgttcattgtacttggtaaccccaaagagaaactaccttcttcggccacaaccatatggaggtaattacaaatctgcgtttggataacaaggtcagtgttgatgctgaagaaaatagaggattttgtaaagtttacttgttgacccgaggcacactcaaatttatgaactaactcttgaattcgttgtgcttcttggagtgttgctttataataaaggtagctatcatccgcgaagagcatatgcgatattcttggtgcagcatttgcaactttacaaccatgaatccacccatttctttcatacttgtaaagtaaagatgataaaccctctgcacagataataaacagataaggagatagaggatctgccttatgcctctagaaggataaatcggaccaaactcataggcatcatggattattttgtacttggctgtcgaaacacaagtcatgattaagcgaatccaattttccacaaagcccattttccttaacatagcttcaagaaagggccattcaatcctatcatacaccttactcatgtccagtttgagcgccatgaaacccgttttccctttcctcttccgttttaagtagtgaaggacctcaaaagacaccagcacattatcagatattaaacgccccaacacaaaagcactttgagaatcagcaataatagcatccatgaacagcttcatacggttggtcataactttagttatcactttgtataagacattacacagagctatcgggcgtagatctcgcatatgttgtgggtttttcttctttgggattaggacaatattggcttccccacattcatcctcaagaacaccattctgaaaaaaatgctgaaccatttgagtaacatctcctttaacaatttgccaacatctttgataaaaagcaggggtcattccatcaggacttggacttttatccggatgcatttgaaaaattgccttccttacctcctcttccgaaactgacttggataactcttcatttgcaaaaattgggacaataaccgagacactatcaattacctcctggcagtgagtgttaccagtggaaaaaatagagttgaaataagaatttatcacattagctagaccattgttccaatcaacccaatttccatgatcatctttaagttgcaagatagtattgtgttgtttacggctactagctgttttatgaaaatacttactatttttgtcaccaccttttaaccaaaattgtttggccctttgcttccagaacgtctcccgctgctcaagaatttcaaataatcggtttctagcttcagtatattgttgaaccgaaacatcatccatcttaggcttcaaaatagacatggtggttttgcattgttgaattcgagacttgaagtcccccgttatctccttcccccaccgagctagagcatccgcacacaaactgatcttacccgatgtactagcattcgattgagtctcccaacaatccttaacaagctgataacacataggttcagaagccaagcattctcaaaacgaaaacgacgaggagtacgaaatgaagtcctcacaatcggctctaaaaacactgggcagtgatccgatgttgaggcttccaaattggttaaagttgcttcgggaagcagaatacgccaagaattagtgatcatggctcgatctaaacgcacttcgacccactcaccagtacctctacctctttcccaagtgaacggataacccaaaagatccaaatctttcaagccgcactcgtccaaacaactttgaaacccctgtagcaaccattgagggtacgggcgtcccccttttttgtcctcctgactgagtatattatttagatccccgattacacaccatggaagggtcgagttccttgccaaagtcttcaaaagggtccatgtttgatctctttgggctcggtttggttccccataaacccccgtgattctccaccaatttccatcaagtgtagctattttcatgtcaatatggttttggaaaaatcccaacaaagacccctcatctttatttttccaaagaaaggccaaaccgccactaagcccatgagcttccacaacaaaaattccttcaaaacccaatgcacgtcctacccaatcaactctatctttttgacattttgtttcacacaaaaaaacaaagttaggtttcttatgagaaataatctcttttaggaattgaaaaatctgttggttcccaagcccccaacaactccagctcaagacattcataatgcttggcgggcctggaaaccagaacccgccccattcatgttttttggattctcattttctactgttggcatactaacatcttggtctaacatttcaaaaat

SEQ ID NO: 19739 - DNA, 1773 bp, Cannabis sativa
tgaaactcagaattataggtgtgttcaatactcctaagtaaaaagggaaataggtctatggtcaattaagtaacaaataaataagccaatagattttggtctagcagtgagggttgggaattagaatgagaccaaggttcgaaccttgggatctcttgatattgagattctttagtctcaattaagcaccaagtgtgcctaatgatcagaaaatcaaaagaaagcacaatgaatctaattccctgagttacaaagcagagataagaataaattaagttagacagctggcaaattgaataaataagtgaaagatttcctcaaaaacttattaacctaagtgcatgtaagccacttttggcccagggtcagttgactagccattaagaaattttatggaaacttggtatggcaaaagaaggaaaaataaaacatccacatagtaattggctaaattttaattactagaaacaggtggtaagttcaacaactaaaattgcaggataatgcggtaattggtgtctggttataatcctaaagctttaaaacttttactaatgttataattttgggaaaagtataaatactcccatgtaaagccaaataacactagggtctaggacaattgtttatcttacctgcagcaacagatatgctgctaacataaaatataggagcatatggatagaaattgttggtcgatagatgcatgtactctatatacatatatctttatatgagtgagatacataccatttccctctactaccaatcttccatgtatgtaaatttagattgaaagaaggaactacatacaagaaaaagcagcaatcaagttagcattttacattactaatgcaatcattccatttaaagaaataaacactatctttttcatattcttcacaaataataggttaataggcttccatgtcgacatgcccagcataatatcgtaatgccatcaaatgttaacagctataatcaaatcatcacaatcacttggtggaacttatagtaatttgaaaagtatctcacaaaagattattcaatgaaacaaaatagagtgaatatgaccataaaaaggactcgcataacaaagatcattgcaaagtacccatatgtagatgcatacatcaattcaagttgctcgagaaaacataaaacttaataaacctttcaaatgagactggaatggcagataatgggcatgaaacatgaataggtagagatcatagtgacaactcttcttaaagaggagataagattataagaggaacaacaaggctccaaaattattaaacaattccacagttgtgaattagaacttaccatgaatgaatgcgcatccaccttcatggggagtaatcttctctgtgaactccattcagcatactcgcagacaaactaataaatctggattttcttttgcaagaaaactaccaaaaaatcaaaaatagcaaaagtggaaaagaaaaaataatcagacgttgaagaccgcaagaatggatacctgattactatcacacacccaatcacagtagattttctttttcttttttgtttaagttgatgtgaacaaaagaaatttagatccaacgagcaatacataaaatacattacctgtgatttgatgcatctccatatataggcatcggagaaaacatgggactgacagaaggaggccatgaaatcactacaatgaacaagtttctccatggtaagaaaataatggtttattgttttccagaaaataccataaaagcactgatatgg

SEQ ID NO: 19740 - DNA, 4445 bp, Cannabis sativa
atataatcagcgtttgaaatcactaggccttgatgcaatattcaaaagatctggtaattactagtttataacatctaaacatatttcttagttgtgttgtgagtgtttttcttgctagatttttattgctatggatggtgtgaacatgtatatatgaagtttcctacctccaaaatattttaggaaggaacaatttcgaagtgaagtttgcagtgtgagtttgagtttttttttggaattccatgaggtttaaatctgatctttagatgacttggaataataatatgagagattcgctttttgaaatgcctcagaaagaataactggaatattttttgtgtaacctttggttctgttctcattccctgtgagtaatttgatttgtttcatgaaaattgtagtaaatttattaatacgcttatataatttacacaatttaaactagtctgctaaaccttgtctctcctttcccaatctcattatctttctttcacaagctaagaaattatggtatcttgttgctttcagagatccttccttctcgagatattgctgctcttgtctacttatggaatccttatacaatagtagcatgtgtgggcttatcaacatccccaatagaaaatatggctgtcatactgtctctttatggagcatgtacatgtaaggacttaaaagtgtttttagactatttctgtacatggtttatttaataaataattagttttccagaacagttatatgtctaaacacagtactaaatcatttaaatccctactaattattactaatggctgttttgaatcctcttatttgctatattttaactattgcatatcttctttatattctgatggcccacaggtaaagctccgttagcagcttttggatgggtcatggctacacatctttccctttatccggtgattctagttattcctgtatgttgtctattgtgctctctttttttctttgttattgcaaatcttgcatttatgacctgttggttcttttgttcaatacagtatttggtaagtgtatgggaatagtataacacatgtaaatgataatcaatactttttttttccaaggtaattcttatattaggatatggtcctgaaactcctcccagaaaattgcttaggctaaggaaatatggcaaaattgaagatgctccctcaagtgatcacagccgtcaaccacgagaagcaaagaagcagcaagaccaagcctacaacttttcttggagaccagttgtaaagttcatagtatggtctatgatatggttagtctatgtgatagttctatgtggtctgagtgttagacagtatggtggccttgaagagatgtttaagaggtatctactatatcgcagaatctcatcttgtatgactggactaccattcttattgattacccacatccataaattttggaatttattgtcttagatttaaccttatgatgtctgttttttgcagaacctatgggttcatccttacagtgccagatttgtctccaaatataggtgtattatggtgagcctcaaactcccagtgttaaagagtagaatatcctacttttgaggtgtgagactaatatattctatgatatttggatgcaggtacttctttgctgaagtttttgattttttcagaaatttctttctgattgttttccacatgaacattttgttcatgatatttccgctggctataaggctgaatcaccgcccttgctttctggcctttgcgtatattgcaatctcttcaatgctaaagtcttacccttcagtgagtccttctcttttgtttcaaggttttctattttattgaggtcagagctttcctttcatgatttaacatcacacacagattctccttttattttcattttacgcatgacagagggtgtgaatctaagatattatgcttaaattttatcattgtctatgggttgtactagccaattaatgaaagatgtcttctagaatcatatatggccagatgatcttattatataaagtataagtaacggaaaaaagcattgcttactcatatgtcattagggttgtgcattcattgattgtttatattacatcttggaactctaattacaatttccccttgtcatttctgtttgaatttaggttggggattcagcactttaccttggtttgttgggattgtttgttaatgaactagcaggcaagttgatacttgttacataattgatcatttttattatttcccaagtttgatattgcttcgcattttaaagtttcaatacatgataaacagatatgcagttctcatttttcctcttctgcgcttatgttggggtttcccttctcagccctgtgatgcacaacctgtggatatggagggtatatataatcaatctcaattttgctcaaaatggtcaaataaataatttatcatggcttaactaaatgtgcagggaactgggaatgcaaatttctactttgcaactgccatggcttacgcttgcttgcaggtcctttttaatcctcttgaattccatttatttgatttattctcattccgtcacacttacgagagaagttgaaaatgtgagatggttaaaatatagttgctacaacctataaaagattggttgagcatgtaaggcccttggtttgatctcatgagatttttgctttctttaattataaatgaaaacagtaccagtttctagaagggaagaagccatttttatatttctatgagaagctctacggcacccatgattcctagtagtgagttgttggcacattgtgcgtaacaaatccttattaagtaatgggtttctaacggggccgccaacttacgggccaggcactatgtctcagttaaaatatttgaagaaatatgtatggaaatgtttgaaactcttgccttttccagcaccccgttactgatttcttattgttaaatctgcagatagttttggtggttgagagtgtaagcgctatgctcaatcatgacaggaagttaacaaagctattaaatgcaaagtatcaagatggcaagtcttgagcatcttttttgaccatacaaacttgtcgaacaaagatgatccttcagagttcataccactgataggttgtagcactatgctggtgttgatcgccaacttattaaccaacatactcaagcaaaagtttttaagacaacttcatggatggaaagctgatgcgtcctcagaaaagctttccctttcgacgagatcatttactatcagcactttgatggggttcatcactgaatttagggatatagtgatttcacaacaagaactagtcgaatttatttaattttaaatgtactgatttagaagaagagaaagttatgaggaagagacaagttcatactgttttgtgtttattaaagaatagcagagttcatttttgcaggtccaattttcttgtttttgtccttcgtcaatgcttgttttgttttgtacttattattcttgcttaaaacattgctcagtgatgtttctgataatgatccgaactgttgcttgcctggttaacaacaaatacaatagtaataggaataatgtgttttagtagtgaaaagggatgatgaagggaaaatttgtattgatgaaatatgattcacacaatcacaactctacaggtttcaagacagtgggcctctcctattgatgttaaaacaatcagttcaagtatacccattacaccactcaacacacacacacacacacacgcataaacacactcatcaagccaaaccaaaagctaacaataaacacaaaataaatatttcaaattaattatagtgagatcttttactttcagtgagatttttcacttttcttagcataagtgaagcgaaccaagaatctaacagtttcattaaatgcccagaaaaaagttggagtaaagtgatgcaaatgatggtttgttttcttcatatgattttggtggggtctccatgcttaacaaaatggcaataggaaagtgttcacacatcagccaagatttttgacttgcaattgtgctacaaagtaaattcacctgtcgaatattttgttgactcccaagtactagtcttactaaacataaatgccccaatactcaaaatttccagaactagttcccccttaaaggtcactcattggcattgctttgtgggtttgctttccatattatcaactagcatatctctaagtcacaagggtattaataatttaaaacatttttgttttaagagatgtttgtgttgttgatgtgttaaatttttgatgcagccttaatctatctctctacttccttaatttgtaaaaaggttaagttggggattaagcaatagatgactctaaattttggtccagggtcatgtgccttttggtgcaatcaaatggagtttttgaatgcatgaacttcaatgagtttt

SEQ ID NO: 19741 - DNA, 3704 bp, Cannabis sativa
ggttatttttatttataactggcccaaatcgggacttgattttttttataacaaattagaggttattcttgaatatattattcttaaatagaggttttactgtaactttattttttaaaattccctcataaatatcgtttattccttacatatcataccccacgttttctaaattacaatcctctccctaaaatatataatttctaagggtaagttgaaatatacctatttttttataggttaactaaaaatagctttattttaaatttaattgagatgtacattcttttattagtccattacctattatactcttaggaagtttttttcattaagtaagggtacgtccgggtataatcaggatataacaaataaaagaaaatataaattaaatatatataaaaaaagtaaaaataaaatgaattaatgaaattttcactacgtactaaaaaagcaaaaatattgatcagtgaccagtgaccactaacactgactaacaagatgttaatagcccaaagcccaacccgaggcccaaggcccatggcccagtctcgattcaacgacttcattcacactttccttactttcccgcgtcggcttcttcctcctgcaaactcaggccaagcttttaaccttatcaatggaagatcacgatcagagctccggcctcctcctaaccaatcacattcaacaacccctctcttcccaatccctatctcgtatcagagccctcatcctaagcccctcaactccccattccacaatcacctccatctttcaaaccctagctcgctctctcgaactctaccgcgactccgtcatacttcatcaaacactcaaactcctctccgatttgtcttctcaccgtcctcaattctcccgcctcgtattcgactcggtccgctcttgctcactcctctcctccgcgtcagctcacatcgcttcacaggcactggacgtcatcgtttccatcgcggaacgtgaccctgcgtcggttccagccgtgaacgagcttgacgatgacggttttttcccttcgctgtgcttccgtccatccctgtccgtacgactatggcttctgaggaacgccgagaggtttcgtgttcggccgcatatttctttaactctatttctcgggtttacgaaggacccttacccttgcgtgagaagagctgctcttgacggactggttcgtttgagcgagtccaatgtcatcgaagacgaagacatggtccgcggttgctataaccgtgccgttgatcttctacgcgacatggaagatagcgtaaggtcggctgcagttcgtgcggtaagctccgattagtgccaatgtatctgcaatctttcgtatttaagttgcgaattggtttgaatcttttgagttgtactgaatcagtcagttactaatggattcatgtttgaatgaaggtttgtgcttggggtctagtgcttgcggcatcaaaccctgagacgaaattacagtgttctgatgaattatttgtcaaggtattttctaaaaatcatatatctaaaaatttattgtgtcttactgcatgatgatattggagaacttatgaatttatctttgtccagaggcagttttacatgattttgcacatttaagcttgtgattgaattggttttttcaataattttttaggggaattagctcatatactattttttttttctttaaatttatagtttgagttgattaggtagttctacgtggcttgttatgttatgtgaattttgattacaatttaaattattccattagttgctatgtgagtaattatttgaattttcgtaataatgccaaaaaaaaaatcgctttgaaatgtaaattttttttttttttactgatgaaaagaagctttttttttaatcttaataatacttttctgcttatatatttgaaatttcgttatcggctcctgttttttaaattttaagtcctttttatggaagctaggattccttgcttataaaagctatgagcaaaagcttgatggacttcccaatttttacttaaatttttatatgggttgtctgcctgaatttaccatctttgcaagacaaaagaactctgcacatttctgtttattttaaagatttcatatgttccttcttgcctttttatgcagaacatatactaaaagtggttcagctgtaaataattcgatgtgttggtatagcccaagagcccataacatgggcgggtaactattcatttgcataatttctttcttgtattacatatgttttcttcccccctgcatctctggtatgtagtctgttagggaactcaagagtcttaactcttattatacttatataaaattatcagttgagaagtagtcctacttatctgtttaatttaccaccctctttaaactgctacaattgaatgagtggacattcttttcttaaagtctctgaatgttagcaaaacttaactttacttgtaagttgtaagacgatgtttgtgctatgtttatgcttgtaggtgtgttctatggctagagacatgagtgtggaggtcagggttgaagctttcaatgccttaaggaaaatagaagtggtatcagaggacattcttttgcaaaccctgtcgaagaaacttcttgggattgttaaagaaaagagatcgcttggtcagtgctgtggtgaacaatttgaagtattggcatcaagtgctgccggagctttaatgcatgggcttgaggatgaattctttgaggtaatgttttcttgtcttgttcaaggccttctatttctaccatgttattccaatgcttttttctcctttttgcaattctcatatctatttggaatttaatttacacttaatacatgcttgccatagtcttatctgacctttggaggagctgttcctttttgctttgtttgccatagttggcgatctatgaatataaaatgcaaaaatcttaatcttttgttgtttctttacatatgtcctcttgatatttaactggaatgaatatgaaggtgcggaagtctgcctgtcattccttgtctacactcatcgtcctgtcagctgacttcgctcgggaagccttaaacttactgatggatgtactgaatgatggttcagtcattgttcgattacaagctttggaaactatgcactgtatggctagctgtggtcgcctgaaattgcaagagaagcatgtgcacacggtatctctggattcttaagaacttggattgatttccagtaatattttctggaattccaaagtatgattaatttactagctgtatgtatatgtaatttatctcttgcacaaaggggtgattcttattattaactgtttatccatgaaatttgattgtgattgtcagactctctggatggcttttgctagcttttaacgtatgaacttgtcgttgttcctttttcttttgggttttctcttcacatatagttttgttcattcttcttgtttttgttgttattgttcttattgtgaaagatgacattgtaaattgactaatttatccttatttgattattcagtttcttggtcctctggttgacaaaactttatccatcagatgtgctaccaagagaatactaaaattagtgaaactttcggttttgaagctctttactctaacagtagatgccctgctagacaatttggcaagatatccagaggtataattttgtccttgct

SEQ ID NO: 19742 - DNA, 5311 bp, Cannabis sativa
ttatttaattaattaaaacaattttaaccgtgttcaaattaattggtaaaaggagacgtgctctcctctttatttttagcatcgttcccacgatctcacttaacgttcccatgatcaatgtcttttttctcgttgctaccttctttgcatccctatataatgcatcagaattaacaggagaaacatatcttttctcacacacacacaaaaaaaaaatcctttacaattatatttacgattatattataaaagtatttcgagcagtagtttttggtggtgtttcgacggttttctatcgtgcagtagagctctgatctcgtggtatttcgactaggatgttttatcctgacgacgactgacaatttttgactacttgaacattttcggatagtgtcacgaacgtcttaaagagagcgacatagttcgcgatttaactcaaaattttcattcagtaatatcatttctcttttatttttcattttccagtatttgtttgttcaacaatttgcataattggctagtacaaaacactacattttttttattggttctttttttctttttcaatgagaagtctcatgtgtcatgtgttttttttttttttttctttaaaataatcatattgataaagagaaagtcccttgtgttgagtttagaaggttctcaataaaatatataagaaatgacagaaagtgagaccgacctttgacctatacttgctgtacgtgcacagagattcatggatttctccttttactctatcagtttgagtcagtcaaaaccttcccaagatacaaatattgtcaactaacacacgtgtctaaagcccacagcttaagcaaacatatagttggctagttggctccatccagctggccaagtatgtaagagggctcttccccatcacactcactaacgttaactctttgtccaaagcgtgggacagtatttcccagcctggcttcttatcatccatccaaactccgtgttttttttttcttccttaaaatataattattcattctgaaatgtaaacctacatataatcctattatttattaaatgtatatatacacaactaccaaatcatcatttcaatatagttataataactaaaaactaactagtactacaatttcctactcaattaaactctactatactagcctactactactatggatcatttctactctgcaacttcagatgtgtggtcattcgaaggatcaaccgaaaccatgtcaccctccgacagtttcagcagtagtcgtccgatgaatttctccgacgaagagcttcttttggcttcgagtaatcccaagaagcgagctggtcggaagaaatttaaggagacacgtcatccggtgtaccgcggcgtaaggaggaggaattctggcaagtgggtctgcgaggtaagggagcctaacaagaagactaggatttggttaggcacatttcccactgctgagatggcggcgcgtgcccatgacgtggcggcgattgcattgaggggtcgctcggcttgtcttaattttgccgactctgcttggaagcttccgtctccggtttctctggacccaaaggatattcaaaaggcggcgtcagaggccgccgaggcattccggccagtggggttggcggaggagagtgtgaaaaagaaaagaacggcaacgacggcgacctcagaaacgacgccggaaaatgtgttctgtttggatgatgaggtgtttgggatgccggggctgctgacaaatatggcggaggcgatgcttttgtctccacctcactatatggatcaacactattatagtagcgatgacgtggatgtttgtgctgacgtgtcattgtggagctattcagtttagatttattttctctttattgttgtgtctaagctgtataaagagtgtaacttctaatttcttaattttgattggatagatagtttgtttgtactataataggtgtgagttgcaatgtgtagcattgctctcattttgttacaaaggtgcactagggagttattttgtaccgtgcaagtattttttggtcttgtacggttacctttattatagtcgtaataagtattagaatgaagtacttaaataacaacaatgaaaaagagtaaagttactctttgtttggtataacatacaatctagaaagtgtttgctctgctactactgcaacttgcttcaataatttcattctattttgtatacaggaacaattacatgtctcctaatgaaaataataataataaaaaaaacaattgtggaatttgatcctctaaaccaacctaaaactaactcacctacacttaactaacttaattaactttatgttatgttagttagttagttggtgctaattttgcacttattttctagctgtgacctgtacctataaatagactactcttttcacttttgttaggtgagaattaagagagagttttcagagtgagtgcttagtttctaagctgtaatatcatgttcttgaaggagttgaggtactgagattgtttctctggtgtttttctcaagtgcagcagagctgtgtttttcttggattggtggttgtattactgcgctcttattcttcatgctaatgaaagaattggtgatgttttctcagctggagtatggccagggatcgaattgatttctaggaccggaacgaggataaatcttgttgtctccttctagttaaattctgttttgttacattgtgttgttaactggttttgtgtgtgtgtgtgtgttattgctgttcaaattgttgatttaatgcaggtgttagattgagttcttggtattattgttgctgaatttacaacaacaattatacaaccttttgactcccttgaatcctaatttaggttctattgcttcttaattcactctcttttttagattgttctgatgtgcaatgctggttttgcatcatcttagaagtactacagttcttaattcatttggtttaagtattgtgtggattagtatttggctattttgttctctattgtagaaagctatcttactgaatatagaccaacatacctctctggtcaacacctcaagtctgatcattctttcctctgctcccttcatttgagcaacctcctacttccagttacgcgttgtgatcaaaattctacttcttaaatctcccactttatagacacaactttatatgttcccacttttgataatttgttgtccaaaccatcatctaaaaacaaaacaaggagtacctgctaagcttataacatttattattatctactttcatgtttgaatcagaaaagtaaaagtttggaactttgacattttaccatagttaactagttttctttttctatcatatcaaaacttctcctaagattggagcaagaatagattttggttagatttacacgagtcacatggataaaatgagaacactaaacaatttcctttgatggctacacaaaatctgcctctgcagaagcaatattatccaacaaaatcatttgaagggtctcttgtagctgcaaatgaagccaataatttattaaataagtagctgcaagagggaacaaattaacaacatttaatccaatttattcctatcccaaaagagtgaaacattatattgtgttacaggagaaagatcaagctcaacaaactctttccaattgcagaattagtctaataactaaagatatatatacatatatatttctaattagtaattttacagaaaaattagtattttatttttattataaagattaacagaacatggttcatctcattgagatgctgcagaaataagtcttggattttctatgaaaagaacaagtgtctcaaacttgtgagcaacttaaccataatttatacatctaattcaccaaaagacagtaaaacatagaaatatgacaactgaaattgaaattactaaacttatagcaattcgacagttgaaattccataattttatcacagtagccaacaacttcaattagaaccaaatttaatcatttcacttctaaaatagccccaaattttaccaaaagatgagataatagaaataaggaaaatacatagtaacggcacggttaagtagtttatcccgtcgatgagtttgcggcacatccatatcaggtcaaagccaaagtcaggatcaccaaatgttctgcatatcaatggttcaccacatgagagaattcctacggatattaagctgcaacttgctaaccatcattctcacaacacaaaatcatggcatccaaattttctaccgaataaaattctttaactgaaaagtttttctatgtttgccttctcactccctatttattattttgtgagaactagatcagttcgagttggtatggtcaaaaggtggatactggcatcttaaagacaaccaacactggctgtatgtatgtttaattaattttatttaattggctaacaacattaccagcataaaataatagcaacatacaaagatagcaaatgctgaagatttggccagggaacatcaaagcacatagcacaggacttgaaggagcaaaatagcttttcaaaatctgcaagtgttgggaaacattgttgagcatcagaaattaggaatggttgtgggtactagagtggatatgtattttgagctccactgctggttcaaaatcaagaactaccagtttctcaccttcacttagaagagctaaatatataatgaatatctaaaccgatggggaaataaagaataaaaagtttatgtgggcaatgcagtccaagttcataataagaagattgatacagcgacgagaaagagtctttgacagagcatgaaaaaagaagacagagatagaaaatcagtctcaacagagttctgtgaatagcaatgcaaggtatctaaaatcccattaaagacaatcaatttttaattttcatgaaaaccaatatgctatatttacatcaattgagcatggtctatagataggactgaaaagtgcaaaacatgctaaacacaagttactgaaatgaacctcgaaaacttgctactagattttaattccccatattttccatgaacaagtagacaacattaactattgtatccgaaatgacttcaaggcacaattcatgaagaaatactattggtagctaattaatgatcactatgtgttggaaatttgttttgaccaacacacttaaaaaaagcaaaattaatactatgcaaattggtatttttcaaaatttattattttatgcgtccataaaataattggtattattaaaaataacaattttaacctttg

SEQ ID NO: 19743 - DNA, 2489 bp, Cannabis sativa
  modified_base (2420)..(2432): a, c, t, g, unknown or other
tggcggtgttttgccaaacattcaccaaactctcttgcctaagaaagttgggaaaggaaagggtgaatttggttctgcatcacaagagttttagggtttgaggtcttttatatggtcttacttaggacatgggcacaaattgttgtttttgaggataaagtcctgttaaagatggctcgttttgaccttcttggaatcatgtaaacccaaattctggacaaattttttttaatggtttgaatatagaacaaatatatcattttcgtctcatttttttttttgatggttttgtcatttggctttgaatcttttatgtgttggtcacatttttatacgttctccctaaaagaaaaaggtaaattcagacttaaacttgaacaaattattaaggtgccatggtctatcgatggtggccgtactctttcaaatcaggtttagatttagtagtggctactttgttgagcatgatcaggatcataattgtaggaaaatattttgtgcacgcccaagagtataggtattgtaataatagctgtatatgtttgttgagacatatatcaaatgagctatctcttaaatttttcagcttcaactgcagtccatctctacatataactgttgtaaatattttttaatactattatattaccttgaaattgtattatactgaaatggattgtttgttaaattttaatttaaactaaaatatggtatatttaggtgtccataaaaattattaacagtgttacataaaaatattgcaagaaatataatttaatataatactatatcaatataatacgatgtaaaatggcttaccaaataagccataaatcactatgtatgtaaaaatatttttttttttttttgaataagagtgtaaaaatataatttttaaatatagtagtttataaatttatttatgtaaaattaataattttattttaaattataatatacatttaaaaattatacttatttaaaaaataattttattatggtattaaaagttgtttattgttattatatttctatttttttgttgttttaatttgtagtgtaattttatttaattataatttttttattagaatataatttgtttagtttaagtatgttcattagatatgtgtagtgtaatataaaagtgaaaagtgtgagtttaataaagaaaatttggtttcagatttttgatttaaatattttaaaagatagaagaaaaatggactcaccagtgtttttcttccatgagttttttttttttatttttcagaccatagttaacatgtgtctttagtaatatttttttcgcaaagtaggtgtctttagtactttttttaataagaattcattaatttagaaaatattatgaaggatttggcgagttattttgtaacacatggtttgtacaaagaggattagcctcaatctacatggcactaactttgttatgcaaagtttcgttagctaatacatgagcaacttgattagattttctataaataaaattacccgaacaactctttcattcttcatcaagtgcttaatgtgacatattaaaccttcaacatcctagcaccctccatctctctaaattaagttgacagcttgaagacaattagtctcaacccaaaaacattgacaatttctttgtatttcaatttgaatcccaactgcaataatatgtaattccacttacaattgtgtcatttccctagctagaaaggttgcgacagcatactggacttggcccctgtggtcactcaccaccatacttacactagcctctcctttacctgctttaacactgacatcaacattcagcttcaataagtcagcctccggtggtttccaagtcagcttcaacattcgcttctttggccgtgatttggctaactctataatctgacaagaaacgacagtaccaatcaacaacttccccagctggtcgttgatgtcccccatgagcaatgctattacgaatgtaccataaatcccacgataagaccacaaaaaaatctcaaactcttcccgctaccatgcccaagaaattcgcatactagacttagcccctatggtcacgcaccaccatacttacactagcctttcctttacccactttaacctcgacatcaacattcaactttaatatgctagtctccggtggtttccaagtagtaggctcccgctcatttccttatctggttgtgatttggctacctctataacctgtcaacaaacgatatcactaatcaataacttttccaattggtggttgatgtcccccatgagcaacactattacaaatataccataaatcccacgataagactaaaaaaaactcaaactcttcccgcttccatgctcaagaaattctcatgagaaaggacagtacatcttgttggaatatgttttaccannnnnnnnnnnnnctaccatgtatgttatttaacatactaaatataaatttctaaaacaatataaataaa

SEQ ID NO: 19744 - DNA, 5931 bp, Cannabis sativa
tcacttatggaatccaggcattcagaattgagattttccttctcttgatcatcaacatcatcatcctgaaaatctttttctggggttgagttgatcatggttgttgattcttgtaatgacattgtagcaatagtagtcttatcatcaagtactgttcgagtctcagctctgagtcttctgagttgataattcttacgacgtctagcgagatgtcgttctctctgttccaatgtcattgattgccttctttgcctgtctcgaatacgacgccgttctctctcttcgtctcttttcattacgcttaattctgatctgtctctccaccctttttctattgcaatttattcatttcacaccccaaaattaaataacatatcaggttaattatgagatcacaaaatcacaaattaagagtacggacagagagaaacctcatataaacaaagattgaattacaatcaaagaaattaccttaaatttcatggtttgagaggggatagcaagtgactgttttttaacttttttttgctttttatatgtaaatatataatttattttttaatcaatatggtaggagattgtaaaaaacgttggcaaaaacaaactcaactaaattgatgaatcatgaatgaagtgtaatgtatggcaatctgtcacttttggcatccaaatgagaaattaaccaattctaaatttatgattccatagttggcgaaacgtgactcgattcgatttggtgctatttttacgtaaatcggcacttccttcaccaacgcgcccgaattcgacgctgctttgctgcgactacgtaattgacaaaactacccttctccgcttgcccctttcattctaagatagttcttttttcgtggaaatatatgaaagcaaaataatgttccttacctggaaagaaaaggtttaatgattatataaattataaagtataaacataacaattccttggtatcattcatagtgaagggttttttgtttagaacttttgttttttttttttcaggcaatacaaacgaagttcttctatttcgcattactaaggacaactgtttctcacccccaactccaagacctttacacaagattcatagttctcttatagtagtggaaaagaacttaatctttttgtttctacaaaaactatacgcaccaccgtctctagtcctctaaaaaaactaatcgacatgagtactaaaaacccaaaaaaaaaaaaaaagatttacaatctgcatctttctattcaaccctcttcatctccatgcagaacaggtggccatagctctgttcttccagccaagataaagagccccgtggcgctgctctgttctaaaattcgggttaaattccctcaacaggtccttcacagcatatgtgacagaagagctcaaagggtatggtgataaaccggccattgtcaatcttgaccaccatttagtgaaaagttcgtgcctttcaaccctttgctgtccttcacaagcaaccatgttgactatgtcccgagccacacaatgttgttcagcactgatccgctgcttatcgtccctgggacgagctacatcaattgattcaaacatggctgtgtaataatcaagagtctccctgaaccttccaaggaatggagaagtgttagtgtttgattcctgctcaacaagggtcattaccttgggtgacaagctcttgattagcctcagtaaccggtccctgtgattttcagtgctcacactttcatctgccatgtgatgcaagacatatggacaattaacgactattgcttcacccggtcgaattctcagtgtctccaactttacctcactgccacacatggctgcaccatgaaactcaaatggcacattgagtgactgggcttgtttcaacagcctcttctcaactaaggacagaccccctccacgagcaaaggcggattgagaatcatcaacacccgtaattctgacaaatgggggaccaccaggccgtcgagcaagatcctcaaacaaggccatccattgacttccctgagcaatttggaaatcaattatgtggattctcggttcatattggatagcttcccgaatgacaacatttgcagatatataagcaaacctccaaaacgggactatctgatagaggatcgacatgtatgagagtaactctgagctcgttggttcattgcatttgagggatttgtagattgcactccctgatctttccaaccttgctcttaatccttccaacatgtatgctcccagtctttgaattggctccccagagactgaaaccatatttcccaagacctccattagttccattgctcttgttgtttcagattcggagaccgcacatgcacattcaatcaaaacgcgcggtaagtccatcttattattctccatcatcttccaagtggccatggaaggagcttggcgggactcagccttgaagctgcaaaaatggctgtcaacaatttcagattcaactcccagcattttttctatctccctgagtctgtgcttcaaatcactactatcatcaaccccagagcagccactaaatgatgatccagagtggatgtcaggggaatgatgtggatcagatgagcatgtgtgggagccttgtggcgaaaatggactcctatttgacaagacactcacagcagaaggagaatcacagttgagaaactcggttgttgctggggatgagtcaagggtaaagaatttctcgttgcaagtctcaaaggaaacactttttccttggctaccaacttcggagaacatattggtatctaaaatttggaaatgaggcatacaataggaatcaatctcttgcacaggtttgtggtacaacccatggataacgcttacgcgctggtgtttttgagaagtttgcatctaagaataagaaatgaatagtccagaattaatacttttgctagcagcccttttcagtgttttctcaagaagggtaaattacaagtaacaaccattctcgtataaaactcagtcatcaacacgtctctagggggtttcttcagctattgtagatacttggtacttccaatcaagacaattatgcaacggcaagggcaatctgtacaaggaaaacgagcaaaacacaatcagtaaaccacatcattcatgtactcagtaaatattaagggatcgtatctgctcttatacatatacaatatttttttatgtctaatgatgttgaaacgtgatccaaaaaaaatcaagattaatgtgtgtacagaaaatacagataaaaaaaaatcagctttcaactccatctcatgctttaaacacacttacacaaacagcagaaccagggtaattacctaaataagacaatatgagccaaaagctcattcggtgaaaatgaatttgcaagaaaaacgagtcagataaccctgaagccccgcttacaaattgctaagataatatatgaaatttcagaaaggtatactaaatctattttcacaaattccatacgtgatgtcagtgttaagattataactcttcagctttttttcttcttttctttcttagtaccatctgctaattgcctagcaacacaaaaatgatttgaacagaaagaaaaaagaaaggccaaaacaatgaagatttgacattaaaacactaaagatcattgactttaggcgaagtaatacaaaacataatcttcccatagcacataatcatatacatataaacaaaaaaatttgaagaggacagaccatcctaatctaaaatttaataaaaaaaaggtggcaagatatctaagaagatctgaaagatttaaacaaaaagtttttcaaaacttctgtgttactaaacagcagaaatcattatacaatacataattagaaccacatatgaacaaattacctccttactctatttgatttaccatcaatggaaaaaaaataaagtgaccaactacagattaaaagaaacattttgaaggtaacaaattaattgaagagtgattgagaacacaggaaaagtggatttgaataggaaaggcaaattaattaaaataatctacacagtgcttcaacttcagaaaaggggccatattttgattacctagatcatgtatcatcttattcctaataaacataatgcttttttcatcaaaataaagagatgactttatagatctacaacggctaataatatacatctatctaaaaaccaaaaaaaaaaccttgaattatatcatatcacaagttattgtacacaacaagtatatgcgcagtgcaacaaagaccaaccttatcaaactatataaaaaaaatatatctataaataattccatttcaagactctaattagtcaatgcaatatataaacaaatcagcttttaaaactaaataaaatcaaaaccaaatatccaacctaaatccaatttttacccaaattctaaatttcatcaaacagagactgaatccagccttcaaaccagccaaaatcaaaaaaaaaaaaaaaaaagcaacaacagaaacagtaactcagaagaactcacttgcaacaagatttctttcctattcaagagaaaataaaaagacaaataagaatatcttgaaacccaaaaatatgaattagaagtatgcataccttagcttaggttggtgatagaaagagaagtgttggggtaagcttgaggagaggcaatcaatcaatcagtgtgctcaaagattgatcttccttagctaacagagcttcctcctttaaccgtggcgttctttcctactcttcctttcttttctttcttgctttctttgtcttccaccaataataataatttgatatttgatgtattctccatcaaactttataattcccgccgccaacttactacccttgaccttctaacataattacaaaactaccctcgtcgatggcaatgctactcttctttctactcggtttgcttcttcattaaaatattggtccccacctttacagtgaccaaaataagcttatctgacgatattttatggctcacactgattttgtgtagttaaaagtcttcatctctttctcttcctaagattaatcttggccaagtgctctctctctctctctcgaatattccaaaaaacatcgttgagttcttgaatcgtaggacattgtgaccctcaaacaagtacatattttgtgaatacccaaaagttgaacaaaaaaagtcttcgcctcttaattaagaaaattaaatttattgctactaatccatctttaattgagggatttattgaaattaatcataaagtttcctctttttttcttttaaaataaataaatccatttacttagttttattgtgtatattcactactataatttcatgagataaatattcacttttatagattgtatattcattagcaaaactgcattgggtgaagttgagcataaattatggtcgcctagttactctcagtggcggagggagaaaaaaaaatagggcgcaaaatgtaagagaataattttaggggtggcaaattagaataatgatatatatatatatattcacataattaatatatactttttttttaaatgattaatatatactaaaatgcatataaaaataaatttttgggagaactattgtattactaacatttatcatcgagtatttttttttttcctactgagactttctcttgagtaattgatgaggtcaagtttttctcaaccaaaaaaaataataataaataaataattaaaaaaaaacagaaaatttaaattgttttatggttaaatattccttaaaattttattttaataattttataaaagtggtttgagatttatagttttaatttcaaaattaaaatttacagtctatatatatattttttaaaataataaataaattgaagaatgtcttaaaactcttatataaaaaattaatatt

SEQ ID NO: 19745 - DNA, 11731 bp, Cannabis sativa
  modified_base (4826)..(4838): a, c, t, g, unknown or other
  modified_base (8212)..(8212): a, c, t, g, unknown or other
gcatagttaccaaattcttaggatgatggtataatttaacaccattacacatttttaagcataaaatgtcaaatttcccattatttatatgccgaaaacatattttgaaatagtgttttttatttatgttttaaaactatttatttttgagtttttggcacataaattaattataattttttttatgtggcatgaataacatatttatttaaacttccatcccacattgttttaagtctattatgaagcttgtttttgactttataaatttggagagttatatttacaccttaaataattataaatacaacaactataaattcatcccaaaaaatttgtcatcaatttagaattttagttcgtgtttcaacaaatttggaggaatttcaaaattagtaggaaaatatactaaaatcaaataagattttaaactagttataatcaaaataatacaaaactatatgatgtatagtttggtgtaatagaataatcatagtgatcctaatgtaatagaataaaaatagtaataaaaatttattacaatgtttagtttgtaattgaaacgaacattataatcaaaattattgtgtttggtttaaaattaataaaataaaatttatattgaacaaaataattttattacttttattttataattataaaatattcaaaaaaagaagtaatatagacttttgacttttttttactatatatttattaaattttttttttctttgtaatggaatgtaattataatagaaattacattcattttagcatgtaatcatggttaaatactcaatataataactattataggagattataaaagttaaaaatagaccaatttattattattgcgattactattacggtatcaccttaatgtgtaagactgtcgccccaaccaaaggatccaaagcaatacacaataacgaatggaaccaaatatttagaatccaatatgccctttttgaaagaaatgatctcaataaagggtcatagataatcataattgtatatatgtagagcacattgtcaagtcaaatgtttgaccaagaatctggccaaaaatttacatctttaaatctcttctaaaccacatagcaagcaccctacttgaaaactgcctaggctgcatgcatgcaaataatgtctttatgaggcattacttagtgtcatccttcttttctgcaacatcacttggaagatcaagtccatgaggaatttttccaggataattagtggttgaagaatcagaacctatcgaactgcagacaacccatgaatgattttcattataagattatttataatacagaggtaggtagacatagttaatgggtctttcttagaacaaaatgactcaccctctatcgataataaccattgatcgaagctcacaattagcaaagctgcaaaaaagttgcaatttctatattttagacagatgaggtataaatgacctttcattagcataagattatttataagtagtggaagagtgtgaaaacgagaacttactgtgtacatatttcactctttactgtaggatggcaatcattgccgaatgcactcaaagtatgatataaaaatccactgtgggaaacaatagcaatctccttctccttacgcgtccacaacctggtcccagcaacaaaaacttgtattaggaaaagaaatgttctaaagcctatagtggatatgatagagattatcaaattcgttactttagagaagataagaaggaacaactacagtcatcacaaaatgttaacaaaggctttacttgagtagaaacatgtgggaatttggagaatttttcaacttacaaaaaagaaaagtttattggaactaataaaatataatgatagccggaactagaagaataccagttcaaaaactgcaagcccctctcagctacatgatcatttttctctctaacatcaggggtccacaaaacatcttcatcattctctatctgaataaagaagcaagtacaaaatgaaccacactttattagtgttattattgcataaaccattaccagttgttgtgagaataaaaaacagatgattgtccagataattaatggtaatgatgatgaattacaaaccagtgagaaatcaattgcagggaaaagtggccgatactcgctgatgcttcttctcttatcacaaggatgaactccctgaaaaataaaatataaaaagagcacaagcatattttagtgtttatgattagttaaaactagtgttgacaacacacctaataacaagaaatttatcttcaatagttacccttttgcctaaaacagcagagtacaaatacttagttatgctttgttaagtactgcttagttaattgattaagtttagttaattctgttattggggttagcttaatttctcctaagctgactatatataagtcagctccttattgtaaagtataactttcagaatcagaactaatacagaatttttttcatctttgctttcttcgattacttttgtatgtttcacactaataatgctacagacaaactcattcatgcggtagcaaggattgtggctggtagtaaatcttttcgtgttcttcttaagaaaatttataagttatatattgcaaaaataaatctgtcaaagcagtcataacataccaaatgttctcggcaaagctctactgctagaaatggtgggcaatttaggctagttattgcagagcggtcactgtttcctacatttgccaccattagaggaggtacatcaatcccgtcagcataggctccacctccaaacaccccaactgctgtttgcatggtcctgcaacgccaataatgatcacatacacacaacaaaaaaggccacataactaaggttacatattccaatatgtattgagtaaaaaagctccatgctgcattcctacaaactagctttaaacctcaaaaaaggtactgtattatactatcatatgaaattaagaacacttgaacataagtattaagcataccttaacaaaggagagacgattactagttcaactttcttgtgaagtccacatgcttgaacatgtttgttgagattatcaacctgttaattatcataccacaaaactaatcagtaacattaacagtttaatgagaaaaattatttcacttcccaatcttgtaatttcaacaaagtctcccctgaatttttcaacaaaattcctaaatttttccctcaaatgttacacatttcccggaaattaggaaactctgtcagtgaacaatgatgaataatttattagttttaatgcagagtgactaatatttttacctgattccagccaagaggggtaagttgcgcatcaaaatagtcataagacatatagttgctgtgatctttatcgcctgcaacattgtgaactccttgagcatgccttacctaaatacattgcccagttaagaccatatgaagaaattacaaaaataatttcaattttctcttgcttaagaatattttcttagattaagatttagaagttaaaacactaaaaatatattcaagaaaagattaaaaaaaaaaccttctaaagttaaaagaaagagatattttcctccctattctttccctcataaaatccacaacatataagacccaaatcactataaccacaaatttatatgagtatatatagatcccacccacataccagatgaatagttttggaacgatgcaaagggtaaagactttgaccaactgtggtggcatccatatctggctctgcaattatcataaaccataacccaaatatacattattaacaaatatatacacacacacaaagatattattatagccaagtaaatctcgtgttaagaaaagtcgcatcaaaccaaaaatattctcttttaagaatataccaaagcatattgtaaagaaaatctgttcaataattattatcatgttcaaaaaaaaaaaaaactgcattaaaagaaaaaccgttgcagttcaatatttcataaaagaaaaataagtagagatttgactcattgatcttcacaggaacacaaaacaagataataagatccacagaaagaaaggaaggaaaatgtgaaaagacggttggaggaattaattggagagacaaactaacctgagatgagagtattagaggaagaagaagatgatgattttgggagagatattttggacgtgggaaacttaataggggcaaaatggtaattaaaaggaagagatgtggtggtactactggtattggtatatatagtactagcaaggccaggggaaagggtaatcatttcggcttttcaatggcgccagatccaaaacaacacctaagctaagctaagctaagctaatctctctccacttacgtacgcgcatggtgtattttagaccaccctctctccacctgccgcctaccactaatatgtttttttttagcattgctattatacaccggtagtacctagcactttcttgacatgtcgcgttgcgattggttagctatactcgctaaaagttattatattaaattatatagaaccgatacttagttggaccaatattgatattaacacataagagaatactaggcaccactggtgacctttaacatttctcccttttttttagcttttaacaggaaaaaggttaaaagtgaccattggtctttaattggttagcggttttttataatttttattaaagtaaagagaaatgctaaaaggcaccaggtggtgtctagcaccctcctatgtgtcagtatcgctattggtctaactatgtatcgggtcccacatagtttaatataannnnnnnnnnnnngtatcgctagccaatcgcaacgtagcatgtcgaaaaggtattaggcaccattggcgcctaatagcaatgctctaaagtaaaataaatagaatgcgaattaaattatactaatagtaatattacacttcagaaaagtgtttggtactatgggtgcccttaaaatatgtgaaacttatcccatattggaatgaacgattgctgtgctttagacaccttaaggtgcttctttaaaagtaaatatttcatttattgtttatgggtaagtttatagtacactccaaaagagatattttagtagatcttttatctatttcggcattcaggatatttctttagtctaatttttttcatggtcgtctacgttatagtaatttaggactacttgtaaatttttataaaattccaaatagtttacaatatcgaaaatatagtttaaatattttattaaacccacaactatttttttcttatacgaatggtaagtaactataaattatttagaattttttgaaatttacaaaatatcttaaataactataatatacgcaattaaaaaaattaaagtaaaattttttctagataccaaaataattagaagatttactaggacaccccttttaaaaggtgtatgtactttaaaaaaattagaatatctttaaaattacattttttttatacatttaattgtataaaagtagtatgtatctacttatcacaattctattatgaaataatgtagtacaaaacacacacaattttttttttttaaaaaaaaaaacaaaatattatcataaaaaattatagaaattgtgcaccttagactctagtatatttggatttttaaaattaaaaaaaaaaatagatataaatttgtaagatctcacgtatatttataaaagtaatttttaatattttataataattattaaattaaaatatataagatctgatattttattgcactaatacttgttgacgtagaaatttgacgctaatgaagctaagtctacttcaaatttttatttcttatgagaattacaagaaattggctgaggcaagaccttcaatttctagagagagaaagtagagagacatgatctaaccttatggggacttagaaaaatgtgaaaaataaactagagggctctccttttatagggagtgaggtcttattaaaatattaataaactattacaaaaaatatgaaaaaatcactttgggcagatctttgccatggatgatgatctaatggtgaaaattatcaattttcagagattgaatctcgtccgtcagatcattctccggtaatttatggaaaaaattgtaactatcttaagcacgaattttagacttaaaatcttcagaattgcgatatggatgtgagacatgacttgatagatctttaaaatagcttcgaaagacaagttcgattacatcaattagatcaatattgagggagttatggtcatttttctaaaggttgttcagcacttaatgcccaggttgacatcctggcgtcaacctgaacgttgggtaagtgaaaaaaggtctcaaacttgtaatttttgatgcctaagtgatatcttgacttcacttagttagattctttgtcctggtaaagttattctccaattcgcgaagatgtcgctttttggtgaaatagggtagactcgaaacttcctgattttattgatattccaccttgttgaaaatgtaaaatattaaagtgtaaatttgacctgtcacaagtcgtagctctcgtttactaaaaaaatagtcaaatggtcgaaacaaaatcaaattctgataagcaaaacccaacacaccaggtcacgcgtcaacctgggcattgggtgcttcccggggctcgttttgatacttctagggcattcaagattgtgaacgaggtctcctaccccattttttttttaccaaaataagaaggatactcggagcaaaatttgcgtttgaggagcgaaaacatgtgaaccaagttgcatgtcaatctgggcgttgggtcaatgcccatgtcaacctaggcgctgggtccctgtttcgacccccaaaaatctcgtttgctccccaagatcacttgtatcttcattattcttgaagacaaaaaggatgcctataacacatttcatgaaaaatgactgaaaatatcctaggttgacaaaatgtcaacctgggtgctgggcccaactctagtgtcaaactggacgttgggtctaactttttaccaccaaatggttctgtttgatttttggaaaatcttgtatctcaattattcacaaaaacagagaatatacccagtagacttcttagaaaagtttattgaaaatggcccaaattgacaatatgtaaacctagacgctggacccaatgcctaggtcaacttgggcattgggtcccagctctatctcctacatgactctgcttgtttcccgaaaataccaaaatcctagttgatgacaaaggagaatattctcggaagacttcttttgaattgttgttggaaatgacccaaattgacaaagtgtcaatttaggcgttgggcccaacgcataggtcaacctggacactaggtccttgctttgccttccatggcgatctgtttctttcccaaaagtacttgattttttgttttgaatagagacgaataaaatgctcaggatacttcttcaatattgtggttggaaatgcccaatgttgatagtatgtcaacctgggcgctgggtgccctgagcacctagtgtctcgggtgctcaaaattaaaagtgtttcgactctaattttgtcgcctcaaatatgttcgtgacatgtcttatttatgccaaagtacaaagtttgagccatttgcactaagacggacgcaaacactaaaacccttgttgggatgtcaatctgggcgcttggtgaaaactctcggcacccgagttgactttcggggtgttgttttgtctcttttcagtttccagacattggacttgaattctttttattttcttgatttagaatactgaaatatggtgaattgaaaacaacttgacgggatccaaacacccattccggagttctcgaaggcaatctgggcgcagggttatagacccctcctaattcgattgctatgatacgaaactactcaaatccgagattttttttttcttgtcacgtgttaaatattgatgtccacgtcaccatagtcaattttcgggtaaacaacatacttattagaataaattatgaatatagttttggttatttaactcataataaaaaatgccaagggatactttaaaatgccaagtatcacaaaagatgatatattaatattgatgaaatttaatattgaattttacatattttaatttaanaaataatataaaaaattattaattcaccaacaacttacaacgtgctatattaatatagtgttaaaaattttaagttgcctttatatatgtagttttttttttatatattatatatattttgaaatgatatttgtagtttcaaacacaacacaatttagctttgataatgttccattttttggcttaataggcggtgagcgtacgattcgattggccattggggttggaagtagactttttggaccgattgatgagtttgttggactgtattacgatttacaccgaacacacgtgctaaactaaaccttcacgtgtataagtccttctccttcactttccattttttataataaaactttcactttccatttcattttttcttgaatgaatagacgtctattaataagaaaagaaattaaatttcatggttattacaaaacatgtttcgaaatttgagatactaaaaaaaagtttggcatatcatttatttgtttcggtaattaaaggatttttttttttttttaataattatgcatgttttatttataatcgtctaaaaatttgaaagtttataattacatattttattgcacatgtaattatttttttatacttatagtaaataattgtttggatattattttttaatattttaaactatttaggatttttttaaaaaattacatatagtcatgaatagctacaacatacacaattataaaaaaaataagatgaaaaaattcttctagacactaaaatagattgaagcatattataaactaaccttaaagttttattattatttttggagtaatttgcggcataaatacttaaatttaactctcatttataaataaatatctagatttaatttttggtgggtagtattacctaagttatatttctagaactctgtaagtagttgaccgttacatatcaaatcattatgcacgcgtcatttttatattgatatatttaaattaatttttttaaaagaataaaaatttaatgacatggaccaattaatgattgttatatagtaatttacttaacacttagcaatcatgtacctacagaagttacaaaaatataacttaaatattattaccgtaaagaaataaacttaaatatttatctacaactgagagttaaaaacttaaatacttatactgcaaattactcttattttttttttatctttcatcattattttataataataattttacataattttttttttttttgataattaagcaatgttatataaagttaaatgttacaagagcactacccatagagtgtttgagaggttagaagagtcaaaggaaataagagaaataaacaagtgatgagtatgtgataatagatgtgagaaatactcactaacccgacttcctaccgcagcctcattggaaaattgatatacctcacaatcacgaggcttgatatttcatacgcagttaaccaccttagtcaattcttatcttgtccacgggttccccatatgcatgccactcatagagtcctacaatatcttaaaaagactccaggtcaaggcattttttcccttaaaaaactatccctagcatcactgcctttgctgaaactagcttgtcttcagccaatgttcagttttcgttttttactgatgcatgatgcagactggggcaactgccaagatacaaggagatccgtttcaagttactgtatcttccttgacaactttctatccttgctaaaaaacaagttgtctctcgatcctctgctaaagctgaataccgagccatggaaaatgcaacatttgaacttacttgaatccttgctctccttaaagactttggtgtatctccgatcactcctgcaaagatgtattgtgacaatattactgccatccacattagtaaaaaccatgtttatcatgagcgtaccaaacatgtagaaattgattgccatttcataagagagaagatccaacaaggcttgctacaattgatgcacgtctcctcacagcagaatctggctgatatatttaccaaagcccttctacctactcatttttctaatattgtattcaagatgggtgtactcaatatttatactccatcttgaggaaagctattagaattagtttctttggttatacaattaggattttgttatgttagtttgttagcttctctccctaaactgactatatccaattgcctatacataaggctcatgtaactttcaacaattcaattggatcaataaaactttatcttctccattcaatcactctgtttctctcatataggggtatttgatatgggctttcaatgagaaatgtaaattaaatttaaatttggtataatttatatttgtgtggtccctcttactatctccctacaatggtcatgctaataaccaagagagtagatgttagtagtctatgcccgatttgtgaatcacatgatgaaaccattctccatgctcttgtcacatgttctgtggcagcgacttgctgggcaaaggctggtgtgaacacaactatcgcgactggtatggatttcttagactggtgtgctaccactttcgattctgcttctaatgaaacccaatgcttggttgctgttctttgttgggccatttggaaagctcagaacgataaggtgtggaataacaagctgcctaatgtttattcgactattgcttttgctattacttaccttggccaatggaagaccactcaaactccttttgagtcatctcagctggctgctggttatggagccaagcggtggagctcccctgtttcaaatggtgtcaaggttaatgttgatgttgtagtttttgaagggtcacaaggctatggctttggtgttgttgctaggaatgaattcgattatctaattgagggtgttgcacgctcttatttgggggtggttagacctgagttagcggaggcgattggggttcgtgaggcaagttggatcaaagccaatggctggtactagcaggtaacactagaatctgactgcttgttggtcatacaagcaatccgaagacccttgaccatgatttctagctttggttgtaaagctttacttatggaattgggtaatgttttaatttattttgtaaaacgttcagcaaactcagtagctcattcatttgcaagagcttttagtttttatcctgatcgtactttcagtacgggggatgtctaactgatttgttgccttgcttggtagcagagtttaaaatttaataaagtttttgattattttcttaaaaaaaaaaaatattgtgtggtcccatatttaaatttatttgtgagataatttcatactcttacattaatctcaatacctctaaattaatgtccattaaataaaactcttacattacatttaacaccccattaaattttgaatcctatctttaatttattctgcgtatagaattatatatttgtttgtcctatttaaagtttgataccagaatttatgaaaattttgaattaattatagaaat

SEQ ID NO: 19746 - DNA, 2713 bp, Cannabis sativa
aaatttaaagtaaagatgagctgtacatttcgacttttagaatctgatatgaattcaaaaaaaagaaaatctgatatgaaccgtttaattcgtaacgattaaaaaaatgaacgacccagatctaagtagtagatgtaccaaaagaggtttgaatgtagaaagataaaaaaagagcgctaactccctgacacctatcctaaccatggttaaatatgcggttaagcctctgaacctttcgcctactataaaatcccacggcaagagaaaaaaaaaccattcattcgttcacaatcttcaggcgtcttaataaacgccattttctttcgttttcacttcaccttatcttcttcgaattcttagtttttttcgttttccaagcgaagatgagagagtgcatctcaatccacatcggtcaagccggtattcaggtcggaaatgcgtgctgggagctttactgtcttgagcatggcatccaggttcgtactcttaccaattgttgttcttttttagtttttgattcatacatttcccttagatctgaacagatctggctagaaatctgttaggttgaggtccctttcttgtaaatcgttaggatacaaggacattttctttgttcaagccaatgtgttttagatctatgtgttaaaaggtcgtagacggtgtagatttgatgtcatcttgcatttttacaagattaagctgaaatttttaggttagtataattttaaagcatatgtagtgaataattactcatctgtttcgtttgaatggatgatgctaccagatctggtgtttttaatcgtagatggtaacaatagaatacatttttaacaagatttgttagatctactgttggagttgattttatatccttcgtttggagtttcgattcgacaatatgataacggaaccaaaattgaattgtttttaattaggatctttgtttttacccattgccactgtttgtgtgggttacgtttggttttgagtagcttttttagattcttgattgaagtcgatgcttatatttgattcgatctgtaaattgaacttcttttccaaccattttaacagcctgatggacaaatgccgagtgacaagactgtgggaggaggtgatgatgcattcaacaccttctttagcgagactggtgctgggaagcatgttcctcgtgccgtttttgtagatttggagcccactgtcattgatgaagttaggactggaacttaccgccagctcttccaccctgagcagctcatcagcggcaaggaagatgctgctaacaattttgctcgtggccattataccagtaattatctgatcttttgctttgttttttttccttttctttttttggaaaataaaattctttatggtggtatatttaatctaattcattttgtaaatttctcagttgggaaagagattgttgatctctgcttggaccgcatccgtaagcttgctgacaactgcactggtcttcaaggctttctagttttcaatgctgtaggtggtggcactggttcaggtcttggatccctcttgcttgagcgtctctctgtggactatggcaagaagtctaagcttggattcactgtctacccatctccacaggtatcaacctcagtggttgagccttacaacagtgtcctatccacccactctcttttggaacacactgatgttgctgtgttgcttgacaacgaggctatctatgatatctgcaggcgctcccttgacattgagcgacccacctacaccaaccttaaccgtctggtttctcaggtatgttttgtttatcttgtgagaaaatgtgttatatttactgtatttgatttgtttctaaattctcgatgtattattttcaggttatatcatctttgactgcttctctgaggtttgatggtgccttgaatgttgatgtgactgaattccagactaatttggtcccataccctaggatccactttatgctttcatcatatgctcctgttatctctgctgagaaggcttaccatgagcaactctctgttgcagagatcaccaacagtgcctttgagccttcttctatgatggccaagtgtgatcctcgccatgggaaatacatggcttgctgtctgatgtacagaggagatgtggtgcccaaggatgtcaatgcagctgtggctaccattaagaccaagcgcaccatccaatttgttgactggtgtcctactggattcaaatgtggtatcaactaccagcctccaactgttgttcctggtggtgatcttgccaaggtgcaaagggcagtgtgcatgatctcaaactcaactagtgttgctgaagtgttctctcgtattgaccacaagtttgaccttatgtatgccaagagagcttttgttcactggtacgtgggtgagggtatggaggagggtgaattttccgaagcccgtgaggatcttgctgctcttgagaaagattatgaagaagtgggtgctgaggctgatggaggtgaagatgatgacgagggagaggagtactagatttcttctatattgctcggcagtagtttactcataatttctatggtgtctgactttgctatagtaaagctctgtaaaattgttttgtgttggctgtttcactttcttgtgtagcggcttatgtgattttcttcctgttctagacttctcaatgatatatggttgtggctttttttttttttttt

SEQ ID NO: 19747 - DNA, 3052 bp, Cannabis sativa
attataaaacagaaacaaaaaaaatgtagaatttcgattaagagatcatcaaaatttgtggaaaagaataattattcaattatatatatggtttttttcatttacacaggaactagttcacttcaagaggaagtgattccatttgttccccactttataaaagggaataattataactaggaatttttatttttatttttggtcatggctttagataatatattcacatatatatgtaagtatataattcatttttaagtattaattagtatttttgtaaaacaaaaacaacaaaagaaagaacataaattgtggaatccaagtcaataatcccgaatccaacgtgttctgtatgtggcagtttgatttaatagattgaaaagaagtatatataactttgtacaaattaattaattacactaaactttatgtcacacaagaaaaaaaaaatcaaatcgaatcaattcctccaacatatatatacagtcctactcaacttgacattggaaaatcaagtaatgaaaaataaaataaaaaagctatataatttatcaatatccatatgaagaaacttaatctacttataattagcagctttaagagtttatattaattaatttccaacaatattaattacccttttatctatccaatctacaaaatctttagaagaaagaaaaaaaagaaaaaagttggactaactaacaacaaagagcttcccataaaggatgaggagctatactacttttgatgaatcaatacattagattcccaaattattgtaatggggttagggtttaattacaaattatttttgataggggtagtttggtcatttcacaactcattatctatctctttcaacttgatataataatgttgtagagagtagagagtagagtgggaaatggagcccaagaaatctattgcccatttttaagtgaaaatcgcccaccatatatataaagctcaatcatgcaatcatgcataatggaggacctagctagtgcccttaagtttaatatttatgccccactcaatttcatttattaatgtatataaatatatctagggtatttttatgatgtacccataaaagaagtgtactatgtataattttgaaaaaaagtctaatatatataaagaagatggaaagtttacaaaaacattgaggggcatagtcgtaaatacaaagtttatttttgtgtgaacaaaatttataaatttgtaataatacaatttttttttttaaatgaaatacatatataactaaattttcaagctttaataaccgtacatgcatgttacaactttgtaaacaatattttcagaacaaataaaaaattgttacaagttgttatattatttttatctatattattttttcaatttctttaatataatttacagtgttatttaaaacatgattttgtaaaatttcataaaattctatagaaattaatatatagtaggaatcaataaattagctgttttagttgttttatgtgcctataaaataaataacagtgtgtgatataattatattaagagatttttcacaatttctttattaaaaaaaaattataatacactgtgatcaatattgaaataataacttgttgcacatatgcttatttagatatttaaatgagggtgcaataataagttgtttgattaaatgaagattttaacatcttaaattatttaatttttattttttaaaaataataataaaattatggtaaattaatcacctacaactacgtaaattatctagtgtatatatctacaacttatctatatactgaaaaaaactataatatttgtgattaaaaacattcacaaaaaatctattataaagtttgctattacataaattaaacatatatatatatatatattgttatgtctatataagagatttctttataaaaaaaaataaaattagattaattgcttttcactaagtactagattaatatatatatataatattcattaatcatcaataatttccactataccttgatctctattaattaaaatcttaatatctaacgtatttataaaagtgatttcttaatgagacaaaacacacttggtagttgtacaaagacaaaaacatattaatcaatgaaggataatgactagtgctagctttaatattgttttgaggggtccatttctaaagtaaaaggtttttggtttgtggaatagatttttgtgggtcactttcataattaagcttatttagtaattatatatatatatggcctttattttcttagtttggtttgtaatactaagacaagaacactttgccaagtggcactaatttggtccaaaagttggatatagctaaagggagtggcattatagttattatcaagccttgaaagactaactgaattaatgaagctttttttcaaatcagaaaagggttttttgatagagaaataaatatatgaaatgaactaccatgcaaatataatatttttttataaaaaaaaaaaaaaaaagataaagaaaaagattatttgccaaacacttaaagagtttcagaaaaagaaggaattagccgttacgtggcattttcttagtaagtaagaaactagagctaagaccaataaaagtctagaacattttcttatatatatttaatattgattgtgatttgtgactttgtttatgttggccacttggcaatcaaatcaaccatattaatttgactctaataattaattagactatataatttagtgtttatatatttgctaacattattaagataaggttaatttggtaattaactttttggttttgctttaagtgcaattcttataaaatcaacatatataattgatcaaaattaattagttaattaaaatgatttgtgatcttcatattcatagttcatacaatataatcaattattcagtcgatatccaaacaagtatttctacgtacttttttctttttctttccacacccaatttatgctcctcattataaatgtttaaaaattcttctcacattctaaaaaatatttaat

SEQ ID NO: 19748 - DNA, 4621 bp, Cannabis sativa
ggtgacaagatgaaggccattaccaaggctttttgcaattgaaaacatcttttcttaattgaaaaaatagatgttatacttcatccaacaataatcttttaaatactaacacaaagttttacaaccttcgctcccatcaccaactttctttgctcacagttacgtaaattatgtcgacaacatgtgctagaatgtctttccaaatataactttttaaaagagctggaaataatgtttttttttcatcagtgatatggtaagaaagcttaaatgaaaggacacttctactacaaattaaaaaagcttctagtttagagcattctaacttacaggacagctaattgcagcactatccctagtattcaaatatttctcaaattactctgcacttctgattacatctctcacccttcatttaaacacatccaccataaaataacttaataagttataaaattattaaattattaaattccagcactttaatgttctaagaggtgcacatcgttccaaatattatattacaattcatattcacataagtacttactagtccaactccaaattttttgaaaacgaaatcgtgttacctcttcctctccatgcatattgaatcatttgtaatgacatattaaatattttatttaaataaattaatatattgtaatatatttttcttcaataaatatagatacatatttttttaattcgtgaatatgaattgtaatataatatttataatgataattctacggtttcaattcacttcttacctctttctcaatccatgcatcagcacacgtttcacttgagaaaattatatcaacactgcaataccgtaatcccatgaaattagaaactttgaactaatttttaagaatcctaagaaaacaaccatgtgaccaaaaagtcataaggatttgtcaaattagatatgaaaattagctacataagcttcaaataaaatattctctagagcatacatagaaagctagtaaaaaagccctttaccaaaatgaacaaataaaaagaacgtgaaaccaagtccttacaatatcaaaaatctctaaagtctttatcttctttcgtcgctactattgttgatttaggtaaacctaatgtgtgtcaacttcactcatcttccaaataggtattagttctagtggcacagactatatggcaggtaattctagccacttttctaatttttagtcccacactctcacttcaattgttaccttattcgatgggttaccatcttgtgttcttgggtttggttaactttaataagtggttattaaaagtataggttctattcgcatactaaatttggaataaattttagcatattttgacggcacacttttgatcattttattgaatgagcttcttttaacttattgtaaataaaccattgcaagaagtatttagaactctagttgttgcctgtttcaaattatttccattcctagaataaaagggatataaatgggtaataacattcagaaagaaaaaaaaaagtgcagtatcatgtttctctcctattttcactacaaaaggaaatcaaggatgcgtatgaaaatagttgtgtaattactaccctatgttgtggtagtaataacactatacttaaagtataatgtgtgtttagatatgaggtggtaattacttgtaaattcttaatgtcttgtttggcaaaatagttagtaattatatgggaaaataataatttttagtgcttaatgtttaaaatgagaaatttttaataattacagtgtaattacacccatttctcatgaggatatgagaattggagagtgtaattgatgcttctcaattacttctaattatatagttacttacgtggtcagacaaacatgcaaaactgtataattctcttcaataaatacacaaaaatgagtaattcctttcaattacactcaattccaattccctcttgtctttccaaacacgccccaaatgagcataacaaaagttaaaataaatacctttcaaacgtttccttatgtgttgggagtcccgacagcatagcatcaaatacaaccaccactttcacttctgtaaatgcgatgaaacaagtaggtgagcaaatgagagtggaatatgaaccaaacaaaaaaacaatcatgaaatccatgtttcttttgtttatgcattatgagaaaatgttgattcaatttgttagagttaacatacaaattcattaaaatattatgaaaaagtaaaccctttccagttctgaactatgatgtcctataacttctgggggatggaaaagaaataaaaaggaaaattttatcaagaggcatatttcttaggtatgaacacatgttctggttcctttagtaaatgacaccactcataaaataaaaataaaaataaaaattccctgtcattttatgtcatcattgatgatcatatcagctacaatggctgataatggtaatgaaacaatccaaaaaaaaaatacagtaagagttaagacagaactataaaaaacccctagagcataaaaagatgcacatatgacacattataaataggaacgaaagaatcaaaaggcaagacagaacgattgaaactccctagagcataaaaggaagcacatatgctatttaacaataatctctatacatatcattacaaaatttacccaggattctgtttcaaaatttacgatgaagccatgtacaaatagagggcaataaagataaaaacctctcaacaagctgaatgctacaagctcatcaatcagtttttgccgagccatatcaagtcttccattcataaaatatttcttcagctttgcccaatagccacaaacattatacccatcaaccagcaagacagggacagcagtttccaaaccctggtttgtactgtaaagcaaattcagcaaacaagagggcaacatttttccatggagatgcagatggatggaaattagagtagttgtacacgcaaagaacctgaaaagataacaaatattactagtagagggttgtggttggatcacgatagtactcggtgtcttccggcagatcttctttgtccacctttttctttcggtaactagtggcaggcttaggtgtgctagattttctcttttggaattcctacaagaccttcaccagataagataatataccaaaataaaattatgaaatacctgttttagatgtctctgtagcctagcaccttccataattttaaaaactgcaaattctgcttgacatttgatgtgattctcggaggagttggttcggatccctagtagcaaaaaagtctgtcaaaagaatgcctaaactggatgcattcactatatacatatctacaagttaaatttgatatcaatgatttttcagtttgatttcaaacaaacttgaactgacaactccaaaccgaaaagtttgtatcttgttctataattcgcaatgcatacaaaagaatctctagtgtaatctccggtcaccaacatgactgaccttaagacttctttgtttatcaacccaaaagaaagtattggcagggtttataccaagtacgcattaccactgcagcaaatcctaagattattgttatctttcaaatgtgattttcattataaagggaaattaagtaaacccattcatattacacaaaattaattgaatcgaaaaggtgaaggagagaagaaaaccttaggagatgatggggaagaagaaggaaacttcttgctccgccccataattataaagaagttgtatttgttaaaggagcttgaaatcgcagtcgaagaagaagaagaagacgaatagcagaagcagaaacatccagaagcaacgccattgatagaagcagcagatggcagtaaaaagatgagcgatgacggtgacaacgccactgatttcatggagttttgcctctgtaaaagtagtagaattatacttgcttgacaagggtgagatggtgatagaggctccagatttggttgcagacatccatgccttctcgtgttgataactctctctctcagctgttaaattgcagaatgaagaagattttgtttcggaccggtgaaatgattatatatgaggatcaccactcaccagtgagtacaatttcgaaattgtgacgtggcacaaatccagtcgcccgcgagcctcgcacaattttctgttccacgacaagtatgtaatgggaatacttagagaggaaaaaaaaggcttcaagcaacattttagaagataaaatataagattgtaatttttttttttagtgatctaaagatttttgacacatttagaaggaggagatgctattgtcaattggtgtagtttagagtaaattgctgtaaaatccttacaagttttacttccttagcaattaaccttaaaatttatttttttgttagcaagatccctccaaaacttgtgttttctttttatttatttttaattgttaacgtgatgatagactgtccatgtgcacattatgtacacatggtacaatttaattagtcaacgtaaataaatatttaaaataaaattaaaaataaatcataaaaaaaatcaatttttttcttatttctaaaaccaattagaaattaaaattaaaacaa

SEQ ID NO: 19749 - DNA, 1983 bp, Cannabis sativa
attcgtactaagaatgtcagcgaatatggtgtcggacaaaaagatgaccttcgtttggtagcatacacagtctaccactatgatcaggaccgactctgatttgaaatggccgataggcaaaaaaaaattaggcccttactataaagatatatggtatttttaaaaattatttaaaaaaatatgtatatttctaaaaatgtattttttttgtttgggccccttaaatgggtgggccttatgtgcgggcctagtccgcctatgcctagggccgaccctgagtctgatatgaggaaaaaattctgacactttggggtcctgtgtctagagggttccgtgtaattggagacgtatccgaatttgtcttggcagactctttgcttctggacatgaatggtgtattccgaatcagagaggtccagtgttggtaggtcagcgagttggactcatgtccaaataagaaatatatatacttggtcatctgattgaataatcaacaaagttgggtccagatttggggctgccttagctgttatgagggctttaaaattgtatacatcatcattctcgaaaactaacagttactatctagggtttaaaatattttgcaaaaagtcattatgaaggagtaagattatctctacaaaagcagtgctaaatttatatatatatatattagaataatatagttaagtggaaaaattttgtgagcttgacctagctagctgttttttcatgatcaacttgattattaattagttagttatgagaggctgagaatgctctacgtataccttgttttatatatatgattcgatcaacctagctagggccggcgcacaaagagcttcacaagtaggagagaccatacaatttgactactctactctctttcatttttacactctatattctaaattatttttttgtttctttttccataattaattataacttaatttctactcaattcctacatttcacaaacattaagaatgttcgagcaaaaaattatctaaacgtacgcctacgtaaaaatgtactatatatatatatatgtgtatatatatgtgtagcgttcatgttcatcaaccggaaaatgaaaacagacacatattatatatatatatatatatatatataccaatgaataaatgtaattatattgtaagctatggatcgatcggccccacctaaataaagttgtggcttataatatgttgtttactatatacatgacaaataataacttaaacacgaaacaaatataaataaagctttttgtatatatatttactttgccagctagaaatataagttttggtgtcatatatattagtgtatatacactaatatatatgagatctatctatggccacaacttttctgtctcgtataagttaataacgtacgtagggcatagaatcgatatatgtatgtctatatatacatctccatatattgtgtacaagcccagacgcggttacggatcgcaacaacaaatatatagttattgtactaataaacacacacatatatatatgatgtatatatatcatcaactcaacccatgtcaattttgaggaccaaattagggttaaaatttgaaagagtacgtctcaaaatagttgccctatagctatagctacgtacctataactatactccaaaacagatctcatctaactatacacattaaagctatatatatagggggaccaaggtacgtattatatttatatttagagcgtatatatatggtgttaaaaatatagtttcaaaataatttattttaaatagaattaaaaaatttgtagattaagttataataactacacgtacaatataattaaatttgaactcaaacaagttagatttaagaattgattatatattttcaagagtgtaatattttgacatttcaaattattcaaaagttgatgaaaatacataatattcatgtaaaataatttatagattataaat

SEQ ID NO: 19750 - DNA, 7132 bp, Cannabis sativa
aggcctaaccgttcgagatgcccttctaagatgaaacctcccaaaagtattttgtaatgttaaaagaatattaattttaataattgtttttacaaatgtaagtgacaactaactttcttatgttgtagcagtttagtttgataacaatcttttatggatattagttgtttatcatgtcatttttttgctttattttgtatacaatttcctctactcaaagtagtagtaatttgtattatatgtttttttggtttttttattttcctatatatttttttcctgatttaacatgtatagttttgctaatatatgctatatatatgcatttgcttctatttggatttttcattaataatgttcttaaaagaacctatttgaagtgaaagtagcaagcaaactctttctgtgttgaatgatagtgtcatctaataatcaagattgaatctttttatgctaaagaaggtgtaataacaacaaacatttcacattttgtaatggcaggaagagaaaaacatgtcaaacaagaggatttgtgccccagagaatgtagcgttgaatggggtgagaagtgaggatgaaaaggcatcatcagacgacgatagctacttaccgggtcttcctaatgagttggccttacaaatcttgacatgtctcagcagattagactacccaatattggcttgcttgaataacaagtataagtccttgattggaaatgagtacttgtataagttgaggaggcaatctggtctcactgagcaatggatttacatatcttgttctcttgggctttgggaggcattcgatccaaaaacaaggagatggaggaatttgccaaagatgccatgcgactattgtttcaattgcgctgacaaggagtctcttggtgtagggacagaattacttgtatttgggcgtgagattcctggacttgttgtgtggaagtatagctcactgagtcatgcatggtctaaaaacccgcctttaaatcaccctcgttgtttgtttggttcgagtagttataaagagattggtgttctagctggagggtgtgatccagtaggtaagattgtggattatgctgagctttacaattctgaacacggtacttggcaggttttaccgaatttgaacagagcacgaaaattgagctcaggattctacatggatgggaagtttcatgtgattggaggcatgtcagcggagggaaagaacttgaattgtggcgaagtgtatgacatgaaaaaggagaaatggagtgtaattgagaacatgcaccctcgtccaatggtaggaaaggaggagtctactatgcgttctccaccattggttgcggtagtaaaaaacgagttgtattatgcggatctagttacaaacactatgatgaagtacaaaaagagtgacaacacatggaaaatggtgaagattttgcccctgagggcaaatgctgtcgaaggttggggcgtggcattcagaggttgcgggaacaagctagtagtgattggaggagcgaaccacgcaaatcacgacaacaaaatgattttaatgtactcttgggaaccagatagggatgaggattggagcatggattgtataaggtatggtgtaggatcttttgtgtacaattgtgctattatgggatgttaaaacaagtatgttagtacttgttggtactttgttttctatttctattgtttaagtaagttaataaacacatagacatagtatgtcgtttcctttagttttccttgttagaggcttttagaaagccataaacccaagagttgttgccctctaatttcaagaggctctttatttctttctttttaataattatgaagtgttagtttttgtttaattactatgattatcattgttgttgttattgaaattaaactcttattaacaacaatcagaatttaatacatcaataaaaaagacgaaaaattcttaatctaaactaatttaccatcaatcttaagtgaatgtagtgctaattcatggacaatcttaataaacagtaaaatatttttacttattagtactccattcatgtgttgtgtgttttgaaaaatagtaaaaaccctaaaccttatttggtcaaaccattttttcataaggtaaaatattcaaaaatcttttaagaaaagtttatatatataaatgtatatttttttacaacactaaagttcaaaaattaagataatatttgatttgttgtaatagaatcctaatagtaatggtcatgtttgttttgaaaattgattacaatgtttattttgttatcgaaaagaatattagaatcaaaattattttgttttattttgtgtgtgtaataaaatatgcagtaaatcgataaaaatatacctatgttaatttagtaaaagtaaatatataagatattaaagttatttgatttgatttaactattattgtttaaattacattttttttttaaatttgtggtttaatgaccattacattaatttatcattgtaataagaattacaatgtgtattgtaattctcaatacactgaaaaaacattacatactcaaaatgacaaaccaaacattgtaatggtgactttgattttattacaaagtccgttacaagaaaccaaacactacttaaattacattgtattttacttttatattttttattttaatttttatatttcttttattactttttaatttatattcaattttataaatcatattcctattatatgtgttagaaactctaattttaataaattacctaaagttatatttagtacttaagttataaaagagattatttatcaattaaaattattttatgttttatatatgattaatatgtaataaaaaataataattctaacttatctcaattacataaatagtgccaaatttatataaaccacatatattatacacataaataattagtacagtacatggtttccatacatacacaaattaaggttattttttctcaaaactcaagacaaagtctcttttgtttgtttattttactttggtagcaaatttacatgaaggaaatccatatggaatagttgccactaatcctctaaacatttacaattattacacacatatgaacttataataaaaaaaataacaacaaaagtactttatcttatgattttattacaatcgtacctttttttgaactatgtattataaataagcaaaacaaatatatctccacgtgtttttgaactaacacttaacaaccaaaaaagagtacaactgcaataaaatcgtaaaataaattatttttactataattttttttattaaagtcatatgtgtaacaattacaaatattatataagtttcgctgcaaatatctcaatccatatctttaatataactctttttttgtatagatttaatcctatcaaaatagcatttatccaattactaaaaaccgagttatgaagaaaatccatatcattacacatatttatacataataacagtcttttacaaacagcaagaacacgaaacgcaataggccgccctaccctaaagacgggcataacacaaaacaatccttcttaatattcaacaacacaactcctagttcattcccatatactcactcaaacacaacattttgaaaaattggaacttgaaatcttactaaaactctctactgtaatctgtaatatttacaattggctgacttaataatacacaaaattaacaacagggatggtaataattggctcaccagtttgttttgtttcactttccacgtacaaaaaaagggaaatttatagatcaaatccttaaaacactggactaatagacaatgacataaacataagtttcattcggttttgatctatttaaagattggatcggatgcactcaccggaaattacatcaatgtgagtaccagcataatttccatatgcctgcaaacacaatttaacatggggttaaattcgagcaagatattattaaattggaaaagagttccgttgttacatacttggacactgaattgaatcgtgttagctaatcaatagggtgtttatcagcttgtcgagatgtgtagtgtgcggaaagtagaagtattgaaaggaaagcactagctacgaagattgcatcaaaccaccggtgatagaagtcaaattgaatatcgccacccagtacatccgttattatgatcctgccaagagatgaaggtttaggattaaatcaatacaatacaactaaatattctagaaaaaaactacttgcatttatgagaacattatgaacaatactactggtcaaacagctaaacaggatgaaagagaaagaactttcttcagtctctttcattttcaaataaatattgtattcatgaatcacatactcataacgaatttcatgcctataagtttgccaaataagaatttgttatctggttttgtgttctttttctctctttaattgctatgtaggtactcaagagagactcgaacttcagactttgtaggaacgaaccacatgtttggtaaacttgatatcgcaagtgttcagcagtttgcagcttaaaaaaatgtattttgcttaaaatcgcaagtagaaaaggcaagaactgtttttattataaggattttttttaggtacccaactcaccaaaagaaaatacttaacacagcaagaaactactaggtaatcaatcatacgggaggaaagatgacaaaaatcaacaactgtttcaatgtttacacataccgataatcagttgccaagcttttccttatcaaaagaatggaggacacaaagtacatccccataatttcagataaaaatagtacaacattacttgaagatccactcccgactcgggaaactgcaaaaaagaactacaccagaaagacaataaaattttgttgttgtaagaaggccatctgattaaatgtaataggcaaaatgtaatgcaatggacatattacatatacaacaaagataaggaataagactctattgctcaattgagagaaaatacaaagaaaatacccaaatacttctctttaggcattcgcaaatcctctaatggtaaatttacgtatgcagcaaaaggaaatgtagatgctgaattaccttcattagatttgtcaaaaatccacgtacggagataacaatcaacattccgatgaataaaagcgaaatgtactgtacgaagatgaagaagaaaaaagtgttagccaagtaagcaaccaaacaaaatcataagaatcaactgataaagttaaaatctaataaaacagtaattgaaggtcaggtaaacttatgcacattttcttggaaaatgtaagaaacaaatgtaaatgacaaaatttctagactcaagtacaatctaaagccttaattcatatgtcacacaattttattcatttatcttttatactggcaaatgcctacagaagttagataaaaaagagtcacgataactccccaagtagaattttaaagatgacctagaagagtcgatataataaataaattaaaaaaaaaaagtaatttgaagcgtaaatctctaagtttcaatcctgctcatagataaaaacctaagtttaatttttgacggtaataatacctcatttatatttctagaacttccgttagtacctgcccattaagtgtcaagtcaatatcagatcaataagaaaatgacacgtggatattgacttggtccttaacaggcaggtacctacggaagttctagaaatataacttaggtattattaccgtcaaaaattaaacttagttatttatctgtaaccgagagttaaacttagctatttacgccacaaattacccaaaaaaaaatcagtgcacaactaatacttaactaaagaaatctaattaaacccttccttttacatttatccaagactttctttgaaaatgtgatcagattcaaacaaataacaaaaacctaagaaaaaactagcattgcatcattatgatgacatagatacactaaacaaattaaatatcaaccaaactaaggagaatttgaattcaacctgtgataacaacgcggcatcaattccaatgtcaaaaaattgcaagaatatggtgattgtcctagtcacgggatcaactgaaccagcctgtaagaagaactttcaattatttgtacaaacaatatagcattgagaatgaaaattcgaagataaaattcgatagggtacatgaaactatgaatatgaataagtggaatagtggagtttgaaaaaatatacctccttaaaaacaacactttgcaaagactgcacggaaaaacagatcaatcagggaacatacttccactttgttaccaaaattaggatcaagatactagcatcaaaagacaatcttcaatagatatataagtgcatacctttatcatcttataaacacaataaaccgaacatgcatatccgagtaaattttgcatgtgacccctccaagttcgagaataagcagcagcctcctgccaaaattaaaaaaataaaataaaacagagataattttatatcatactccttttgacactggcacagcagtttccagtgaagaatgcagcaaaaagaaatcataatacaactcttctattaggcctatcacattgataacaaaatagctcctgcaacacatgcttcaagtaatacattaactatgcatggtcatagtaaactacaatgcctttaccaaaacattaacaatagcccatcgtaacaaaaagaacgtaagaacaacaataacaaacctttgcttggcgaagctcgtagatttccaagaagagttgctttgaaagctcttccaacgattgtacctctgcttccatacctttaatatctatagacaaataaaaaaggatatacttattagctaaaaaaaaaggattgtgtacatgtgagtaatattttctaaaaaattattaaatgccaaggataatttatgatgaaaaccttgctccttctggtcatcttgcacagatcggacaacagtaccaacaattcgtttgaagaaggatctagcttttaatttctgccacatattaaaatgagttagagcaggagaatatgtcctattactgaacctaacattatccgatatgaatatatgctc

SEQ ID NO: 19751 - DNA, 3715 bp, Cannabis sativa
gtttcatggtcatcctttgtctttgttccgcaggttgtcggtgcccactaacactcattctgatcattgtagattttagcgtctacaataattattgtatatcgaatatctatccttaaatcaaagttacctcaactgtttaaattttgttccattaattgatggcaaatttttcttatttaatttttctttttggtggcaaatgtatttatttaattttaaagaaaccaattttggtttctgtctttattagggcattagaatacaactgcatggatatcccaccctccacaattcacaaaggtccttttcaacaattccccatacataattcccacttgaaaatgaaatataaatttatatatattcttattaatttaaaatgctctaattaaaaacactttaaattgtaatacctaaaataaaaagcacactcaaaaacaaaaacacaaacatatgctttgcattgttttgcattcggttcttcataagacaatttcaaaatgaagaagtgaacaaaaacactttgttgttaattatggtatgggaaggtaaaaacatagcatgggccgggctgggccgatccaatcacggtctaacacctgtcctaatgggtagcccagtttaggccccattaggatttgactgcttattggggaaattgttatagttgggctttgataggcccatttctacagattcttctggggtcggcttagtgttgggcttgttcttggctcccttgtctcggtaaatgaagtataatatcagctgtgctgttccaagaccacacccaaaaccatttggcacctacaaaaacgacacaagaattattttccatataatttaataaaattgtcaaaaaaaaaaaataaatcaataaataaacaaagaacttactgcgacaaaagggtcatggcccaataagccaaaaatgaaccatgaagtaccacataagaagacaaagagagataagaaaaagggcatgaattccacacttttggtttttaccacagttctctgtaaaaaaaaaattgtgaaaatgacacaaacccagttagaagcacacagaattgtgtatatttgtgtattaaaaattgaaacttgggacttaccatgattgaaagaggagaagcatacatgatgatggaaaagatggtagcagcaagaccacagaagagctttctaggattgtgattcaaagccaaaagagataccaaagccacagttgcaaaggctgtgagaacaaaaataaagagtccaagaattttgatcttttctttctttggtgcaaatatgatgaacaacacaacgtatattgattcaatcactgctcctgtgccgttgatcgttgataccaatatgttgtttggggacacaaatggaagaccataccttttgtaaccaaaccccaccaaaaaagaagaattagtgtttgagcactttcttaaaaataccattttcagaaaactttgcaaaaatgtaacatttatttttgtttgatgatttttagcatctgggtatttcagaaaattctagagagagggagagaaagaaggttaccaagctgagaggaggcagttgagcaaagtcataacataaggaatgcctgagaattgctctgtggatttgttctgtatgattctcttaaatgttatcctgacaaattttgggaaaaaaataaataagaaaaagttagaatctttagcaccgaatcagaccaacaccagccaaaactcaagtaaaaacaaatctttatgagttcttgtcactgacttcagattcagacaaccttattttatcttatatgattaacttactatgaattattatcataatatcatgactagtgttgacacaacaagaaatgcacattttttaggctgaaaagccaattcccgtgatgagagagagagaaagagagagacttacgttggtgccaagaagaggaacagagcaaaggcatttcctgcataaacaaaataaaaaagaagaaaactttaatccattaaaataaagtaaagaaatgaaaaactcagagtagagaagaagaagaaagagagtgacccaccaaagacaccaaaaatgaaatgcagaacatccatggcagagagagtaaaaagttgttagaagaaatgaaaaatattctagagaaagaacatatatcaaaaagaaagatgggtaatgagttttgaaggaggagagaaaagatgttcaaaacttgtaaactcaaggggtttatatagaaaactaaactcccaaagctaaattctctccatatttttttttctttttaattaattaaaaacaaaaataaaaaatgaaaaatttgcccttatccgtgaagacctgtcttcttcttaggaactctctctctctctctctctctctctgtgccaacatatgaggtatcagcttttttgcccatacgtactttttttgtttatattttcaggggtcaaactgcaaatatgaaaacttggtgggtcattctataaaattttattgaaattacctattggtttccaaacaaaaaagactgaagtaaaaaaaaacgtcatttgttttttaagaaaaaaaaaaccgtcttttttttctttgaaggaaaaaaaacgtcattttcttaatcagtcaacaaattgttatttataagatgaagaaaaagaagagaaacattaattactactttccatgtatattttgtttagtaaaataatgtaatatttgttttgttggcttttttatttttatattttaaaataatttttttgtattgttataaaaatttacataataatttatgtaataattattggagcaacttaaataaatataacaactcacattaaaattatcagagcaactactaaagtaactcaaactgtaaaaataaaaataaaaattaatatatatatatataaagtaattctcatttttttaaagatgagattttatttttatcaataaatatctatctcgagctagataattgtaataaaaaaacgttaataataaagataataaccatgcaaatgcaaatatgcaaagtatgctttttgggtgaatttggtggaattactacctcctctaatatatattatattatcatattttaaattaatataatagtattttatctcaaaaatatatttatttggaggaaattatacttctattttttttttctttttctgttttctgtttttttttttaaaaaaaaaaaaattctaagagagaatcctactttaatttgtttgactgaaatattgataagagactctctctctaacaaaaaatactttcctatacttacatttttaccataaggatctttccttgtaaataatttttctttaatgttttctaagttttttacttatttggtcaaataaatttattgcaatctgtagatctcgttctcacatttttaagttttttttttccaaaaaatttcttacctagaatggcaaagtgagacaactcacatgtaaattgttgattttaggtcagctagggtcaatataatagtattttaaatattaataaaaggatatcaatgtatatttataggctgttctacaagaattttcctaaattgatgttttgatatatgaataattataattataatactatttagaattaacttttggaaaataaagaataatatatcgtatcaaaataagatcaactattagaaaaaaaaaaaaaaaaa

SEQ ID NO: 19752 - DNA, 4513 bp, Cannabis sativa
tagtgctaattgccttttctaattcatattactagagcggtcattacaaaaaaagtcatcacttatgaaattttcttgtaaatccatgagattgcgagccttagtcgttggatccatcatgagcttcttccccttctcttggataaatttctgctgcttcatagacaaatcgaggattgggggatcgacaacatcactcttcctcttctgaggaggattcgtagaggacagagtcgcaaggtctttgttggtctttgacttgcgattaaggatcaaatcactcttcatgaaagtcatgtctacaaaaaaaatatattaagtacaagaaaaatcatataacctcacagaaaattgtcaacataagcaagctcatgttatctgagatttgctttagagtctgcttagaaagatgcctgtcaatttttaccttttggttctcaaaagactctttatatactggttctcgctgaattctggtttcaggtcaaatcaatttatgttctcgcaagttggcaacgtgtagagaagacgctaatcaagatccctaactggaagactacttaagaattttgcaatttccacacgatcgagctggcctatttacaaatataaacaaatgttatagtttataaaatagataggagaaaaagactttatataaataaacgacatatgagggaaacagttaaagtctatcctaattcctagcaatgagaatgcatagagctacttcgatttctgatctcccattttagaaaccatgtattctcctccattgacatcacattagcccatttactagaacaatagaaactattttcgtgggcaacattctttatggttcttgatagtgggttccccttgcgtgtattccatataaatcgcatagaatccaaggatgatcctatagcggtaaggagtaagctagaaaggagatacatcgtagcatctcaaaatatctttcacaaaaggatgtaaaggaactgcgactccacagcaaaaaatagggattgaaaccatgtccaccttgaatcgaataatcgctagatgtgtgcaaggatgatgaggacggtgaattgatattgatttcctacacccagtattgatcaacttcagtttctagaacgtcattaagttagatttcctaacccacaaaacaaggtcctcacaggaaatggttcatccaaaggtatgtccttagcagtgtttgtatggacttcatcgtttcccctttcgtccccacgagtaggtcaatcaaagtcttatcctattttctcaacttttgcatctacgatagcccttgggcaaatgaagatcccctaagcaaatatagtggactcgttccctcgtatcttcatagcgacagctgcctctagctcctaaaccatacgacgtatctcgccagttgaccacgagccctctcggtctacgctctcacgaacttcatctttagataaagacgtagggataaagctatcacttttttgaggatcacccacggaagcttcaccttcagatccgtacatctggctgtccgagagatcgctcatttgaaagatagaagatcttttcaacgtgaagtgagtgcaatttaagagagaagtgtcctcacatgggtaatatattcaaattcaacaaaaacaacaaaactaacactcgagcctcaaaaagtggttggattttttctagtgtcttaagggtcacgcgggtatatgaaacttaaatcattgtgaaccacccaaccacttcaaaactctattagttttttatcatggttcaacaaagcgaactctaaaatagagaagaattattgagtgtatcacagtgacctaaggattatacgagataataaatattaaatctcagtgatacaacaaccactgcaaaatctttagtttgaagctagtcataactaaatatacgaatattcaaaatgttctaaccaaaagttctagtattcaaagttagtcacaaagcggatgcaagtattcaagttacaagcaagaatttttccagaaaaaatccatatatttcatttcccaaatctatcttattattttcatgtaatttctacccctaaataccaagaaggtgcgtggttatgtaaggaaaacacattaatagagaagttatgtgagaaataccaaccattgattcaaacgcttattcttctagacacgattatcactttgaaaaataccctggccttcgaaaatagcttctggcaaaagaagatttaaaattttgaaaattttgaatggtgagttttttagaaagaagaacttcaataaaagctaagaatagaagagaaaatgaagtgagatcaatttgtatctgaggggttttaatacaaatcatccctagtcattaggatataggcatgtgccaagtaaacaccaaaggtcacccaatccaacggttaccttagagcatgcctacataaaccccatagggtctaatgacatggattcttcaggaaataaagaaataaatgcagtcgtctcttcaaaaccctcgacaagacaatcaaaagtcgtcgtcatgtgacaaaaaaacttgcttgtctctcataagtagttttgttatttgacaaacaattgtgattgagaaactaggggcatgtgttatactgtaaatttttttttctagaagtacgagtatagccttgtataaaattgacatgtggacccaattcccaacggaaagaatgatgtcttaatagatagctcccatagagataacctcgcttgaagagaactcgcgagatgatgcgactgaaacatggtctagtcgcatgctatgcctcgtatagcataaggaataagtagggtcaagaagatttgatactagtcacgtatatatcgattttatgcgatgaccaagtagatctctcctacaattagtaaatattgattctttatataggagtagtctaagtgacgaatgtgtttgataactcgttaagaattcacatgtttcatgttgtcaacacatgagatgtttgtttatacgatcaaagtagaacacaaacatctaaaagttaggtcagcaagccatcctgcaaatataaatacacctaaagtctgcgagccaatgtgttagaatatgaacaggaaactcgcgactcatcaagtcgcatacgttgctgccactactacaaatctaggctttagatgtagtatttaaggccattgaacgtcggttttggagaaattcgttaccgatgctgatccaagcgatgctgtaggattgaaaataaccgacgctaaatgataccttatggcgtcagttattattaaagaactgatgccatatgtatcctatggcctcggttattcacaaataattgatgctatttgccaaaataaccgacgtgtagggataaaaaccgacgttgtagggttaaaataatatatttattaataattattattttcagttcaaaacctcaaatttaatttatttaaattatattaaatattatttagtttaaatataaattaaatattttgaaaaatctaaattaaatatttttaaatttaattttatgattggtcaatatacttaatctcatttcatagaagcaattaaataaattacaattatagattacacaaatattataaaattagtccaagtatagacaagttaataaatctaattacaagttaacctaaaaaaataagctagggaagaaattttttttagcctttcagcatcatttgtgcaagccttcgtgaatcaccgccatcaaccgttttatccactgtcgttgtaatggtaataatttggtttttgaatcgtatgtctgcttttctccaaatggtaaaaagaattaaaaatttatattaatttatatatattattatttcttaatataataaatactataattaataattaaaacttacaggtttttgatcttgtatgtaacggttggggtttgcacgtgcaacgatgtcagtcatgtatttcaaaacataaaaactacattcttagttttttggttgtcttggacaatttgctagtgcaatttctggccacggcccaagatacgcatttgttgtccctataatctggtatgctctgttttaaaaattatattaacatttcaattcattagttaattaaaactttaccaatgttgtaaaactttactattattgataatcttaattttttacaatcatcgaatagggatttatctgcatcacttaaaaattatcgaattttttaggatcattaagaaatttctcctattcttcatcaagcaagtcgaatggatgatcatcgaaatcattaccctcaatatcatctacccctgctcccctaatggatatggatcatcagctaaatgtttaccatgccaataccaagtagtataacttctattaaaacctcctaaatacacatggttaggggcggagccagggtaaaaatttaaggggggccaaactatattatatattaagcgacaaataatttaaaatatattattaaaattaaaatatag

SEQ ID NO: 19753 - DNA, 2705 bp, Cannabis sativa
atattttagatccaattcaatatgtgaaaatgcagattaaattaattactttggattgattattttttaatattaagttatttaatatttagtaaaaatattttttttaaagcacccttaactctaacattgtcgagcatcctttccacaagatagtgcttacaaaatattcataaactttaggtaatgaactaagcaatgacagattcaaaatttaaagtgagaaggatgtaattttttttctgtaaggcatggataaaagtaaaattaaaaagaagaaaaaagtgttcatagtagaagttgaacccttgaaatttatcatatatgcaatttagcttaatcattacaacaaagctaatatattatatttataaatatcattttttattataaatatatgtcgtaactaactaaaatatttatacattttttctcgattttttttttcaggggggcaactgccccctctcgcttctatgtgggtctgcccctgaaactaagtaaccttgatcctcattttcaatcttgactctatgttgttgagatccaagatgatcttgttaaattcttctaaatgcttttcgagttccttgttttcatccatgttaagagtgtagaatttcttcttgagataaagcttattggtaagtgatttcttcatatagattgttgcgaatttctcccatagctagaccaacaatagtgtcttcactcgacacttccctcaaaccctatctccaagactaagaagtattgccctatgtgccttatctcctccaccttcttcttgtcatatcccaagactctcaagctcttctttgtctatagcttcagaaattccttgatgatcaaataatgtcttcatcattttgattctcataagctaaagtcattaacttttatgaatttattcacttcaaaccttgctgaagccatttgatgagatcatgtcccgatgactctcgaacctaaactctaaaggcacttgttgtaaccataatctcaaacaagaacaaacacacatcacaaaccagaaagtaataattaataatcaatcataaaatcaaaattgattcaatcaagccaaaactaaaacaaaaatgaaaaatagggagcccaatcacatatgtggttcaagtcaatgttggctagacaccactttactccacgacgaaaaccagccactagggccttgtaatctctttattaacaagagtttctattagagaatattgtcccacatggattaaatgtaaaagtattgagctatatataagagcttgtgctactccactcatcaccaattggtttgagatggaatctcatgattctcatcagtttcaaatatgtacaacaatggagtcttgctctgagaatcaactctcaacagtggacatagttctctctaggctctctctatttctctctctggtatatttacaataaattttgttatttatgagtcccaggtagccgttgttgtccaaagagcattttaccaattctaacaatttccacaatttgttttttctttttctttttaatcaaatcaacaatatatataactcaatattttatagtgattataaaaatagcctaatcattctacacttcttctcataaagaggaggttccaaattcaaatcctcctccctcgatataaaaaaaacctcaatagttcacatcttattcttttagttaatatatataataaacatacatttgggaaggtgttctagccaatggaatttatagtattcatcaaacttattcattgatgaaaagagaaaaaataaaggaatttttataccacatactgaaatacttttaattttttatttttttattatggggcagattttttttaaaaaaaagaatattgtgtaagttttatactgtgtgctatgttaagttttcacggttgttccacggttgttttttagttgttctactgttgttttaattattgtattttgttgttttataaaaaagatagtatttttgtaataaattccttgtgacagtaaaattataaagttttgttcaaaatctagtaattttgtaaaaatcccaaaataaaaaataaaatgaaacgtttaggaagaacaagaagaattgggccgaacgtgtacatattagaggctcaacataaagtaaaattatggggcatccaatccaatgttcgtaacattttatatgtttgtaaatataaaaatgttatttttcctaaagctacataaataatgtcattttaaatatattaggccccaaggcctaggcctttcctctctacaacctaagacatgaatgatttaggatatattcttaaataataataataataattataataataagaaaacaaataaattagtttttatatttagggacataaaatttagaaaaatgtaaaagatattgtcaatattattaggataaacactattttggactctgtgttttgtaaaagttaccaattggaccctttgttttgttaaatgacaaaattgaccatgtattttttaaaatagtacaaataagatcctgaactaattttctgtcaaaataaaatttaataataatccaatctaaatgtgtttatgacaaaactgtttacattttctaaatctttttgtgttagaaattgtcttcgagttggttatattaaaaaaatagttatgaaaattaagctcaggggtcttatt

SEQ ID NO: 19754 - DNA, 3107 bp, Cannabis sativa
taaagacactgacaatctaaaatggatatgtatatggagaatgttaactaacctggcactcgggatctccaaaccgaacattgtattcaattagttttggtaagccagatttcttctcaatcatgagaccagcatataataccccaacaaacttacaaccttcagctgccatccctttcacagtggggagaattatagacttcatcacgacatcctcgagttcttttgttagtacaaggggccggtgagtaagcccccataccgccagtattgggccctgtatcttcatctccaactcgtttatggtcctgagcagattccaatgcgatagcattctctccatctaccaaagcaaagaaagatgcctcttctccttctagatactcctcaacaatcacacgacaaccagctgacccgaaaaccgcatctacaagcattgaatccacagcttcgtatgcctcttcgagtgtcatggctacggtaactccctttcctgcagctagcccgtccgctttgataactatcggtgcaccttgctcttttatgtattgcttagcagcagatgggtcggtgaatgtttgatactgcatcgataataaaatttcattacaaaatgaaaaagaataaagcaaaaacaatggaaacagagattgcatactaataatgcatattgtttgctctcacaccttatgaggttcgagtctgttttgaacatcaaatattgaggattaagtggatagcctagttcaaccaaaagaacatgtgaacatttgtattattctttgcattattttaagaaataccaaatgagtagaataatataaagtcctatattcacactactcatatctacacccaccaagatttcaaatagaattactatctctaattataaagctcaaaaatttatcaagaaaagtagtaagcaggcaagaaaaaagacaaaccttatcaagtctacacccaccaagatttcgaattgaattgctctctctaagtgaaaagctcaaaactttatcaagaaaaatagtaaacaagcaagaaaaaaacaaactttatcaagtctacacccaccaagattttgaattgatttgcaatctctaagcgaaaagctcaaaactttatcgggaaagatagtaaacaagcaagaaagaaaacaaaccttatcaagtctacacccaccaagattttaaattgaattgctaagtgaaaagctcataactttaacaagaaaaatagtaagcaagcaagaaaaaaacttatcaagtttacactacaaccactaagatttcgaattgaattgccaagtgaaaagctcaaaactttaccctactcatatctacatctaccaagattccaaattgaattgttatctctaagtgaaaagctcaaagttttatcaagtaaagtagtaatacaagtaagtgctttctggtatctatctagtatgagtgagagagcctccaccaaacaagcaagaaaaaaataaacaaaccttagcagtgggaatgccatacttatcacacaaagacttcatgaaattcttagagccctccaaagcagcagcctcctttgtgggtccaaaagctgggattccagccatgcccagatcattaactaacccagcaactagaggagcctcaggtccaaccacaacaagtcccacattccacttttggcagaatgagaccacagccgagctatcagagatatcaaggtcggaaatacaagtggcatcatcggagttggaaatccctgcattgccaggagcacagaaaacagtgtcgcatgaaggtgaccgcttcaacgcgtggcaaagcgcgtgttcccttcctcctccaccaatcaccaaaaccacaactctctcagctgttgaaaaaagaaatacaaaatttcaaaaagaaataaaaaataaaaattggaatttggaagttggattttggtggggaaagaaaaaagtaaagaaaagtttggagctttggtttacattttccttacctttttctttccccactaaaatccaatttccaaacacagccttagataaaaggtaaataaaagtttggagctttggtttaggaatgaattaccttgagaaggggttgttgttgaggttatcttggctttgacagaaaaggagcagtgggatttaagagtaaagcagttgaagttgttggagtgaagagagtttggagatgtccgacaagagagggaggagattgaacggagtggagcttgaaaaagagagtttttgagtctgagggtggcagctccgccgagattgaaggtggcacatgccattattgagaagagagcctaaaaagaaagccttttttagtgttgtttctttaagggtggcagctcctcttgaagttgacatgacacaatataggataaatatgagaccaaaatttagtataagagaaagcaatgcaactactcctgtatgaatgtatgcatacaataagaaaagaaaccttactcttaggtggaataatagcatagtttattggactcaagggttgaattcttagattagtactaatttgagttcacctagtttgggtttacaacccattggaaatcttcccatttatgttagaatttgggacaaggtgaatggggttccatctcaaaaccaattgataatgagaagagtaccccattcatcttatatatcacattttatttctacacattagcaatttcttatagaaatttataagaaatttggctactgctgccattgttgagattagataatgatgggaatttaaggatttatagctctgctaagggcaatggtactaaaactgagagatgagctgcagttattgatcagtgtcaagtttttgtagttataatcagtcttttccagtttgtagtgtgcccttgtcagaattttgaactagttgatgctaatgatagtagaaaatggtgtaagagaaaagttgagatttctgattgtcctggtaatgttatttatgctaattaaaaaagagacctttaatcaaacaaatcaagaacataaggattctgactaaatgactaaaagggttttcatctatagtagagaaatagctaaattgtatgacatgcatgacaat

SEQ ID NO: 19755 - DNA, 3447 bp, Cannabis sativa
ataaatttattagttatattgttttagatatataaacttatttacttattttattgtttaaaaaaattaattaaatatatttttaaataaataaatttaaaactagattaaattttatattttatgtattttaagaaatataattaaattgtattagatttaattttattattattatttaaattataattaagtaataacaactttatgttattaatacttaatatatatgaactaattaatatgttgaaataatgtttcaactatctatatatatgtcttgttaaaaaaaaactatctatatatatgtcttgatcatagaaaagatatataaatgatatttcatcaaatattttaattacaaacaatataaatttaattagatcaatcatcattttattttattttatactttttaaggaaaattatcattttttcttttcattttgaaattaatgagggttttcctttcttctttttctaatcataattggtgtgagaaaggaaaagagctatatagataagttattattagttaataatactgtcattatatttatgtatctgtcattgtattatagatatataaaaatgggacaagggtattttttttttgagagtgctttaatgaagaggtaataaatatttttacttgagtcataatgagagaagataaagtttaaaagaaataaatggagggttttgggattcaaatacaaaagaagaaaaagtcataaaaggaagaaatgaatgttgctttgaaagtccctttcaaaaataataataatagacaaataaataacaaagaaagaaaggagtttaagtgttgagagagatacttaaaatgacccatattagagatatgataataagcattgctatcgaaaaggcttaatttgggttaacatagttccatttttattaaatttacactagcatttaatattatcacgagataataataatattcaaacaataaaattagggtttctcgtttttaattttatagctataggaagctgttttttttctccgactatgtctgtcgccttcccagggcataggagcggcttggtcggagttatgttttactattgcgattcaatttttgctactgcgattagtcttgtatctctatgatatggcttgagtgttttagtcttatctctgtgacatagttttgctttattttgtttagttgttagttcttttttgttttttgttggctcgccataaatcactattaatgattgtgaataacaagttctctacgacaaaaggggttattagtagtgcaactacttatcttgcacaatagttgagtgctcatgctaagaggttgaatagacatgttctaacaatttctactgttgtttcttctgagcagtagataaaattgaatataggtgttcttaaggtactttatgatgctgcaatctttttcaatgttttttttatcaaatgatctaggaattagacgattgattatttgatttgtttttctaattctaattttatttgtgtcttcaacggaagatgtactttaattgaattgcatactaatattttaactgattgttattaataaaattatctcatttattaaaaaaaaaattaaaattagactaaaaataacactttagaaagtgttaaagatattttgatagcaattctcttgagaataagttgaaaaagtgaagagaatcacagtaaatccatgtgggtgtgttttactatgatatgtctcaacctaattttatgggacaaaaggagtatcatcaattattattattattgctattattatatatgggtccattccatgcatttcaatgcaaaatttcagtctttaaattttcaaaaatatttatatatctttaatatatatatatatatgtatgtagtgaacatataatacacttgctttcatggatgtgactaagcactgtagtatttgtctggtgtttaatataatttattttgggttatattattatttgttttcatttaggtctctaaattgttgtctttatgtgcaacacaagaacaagaaataatcccacattatattattgttattttcctcttatatactaaacaactcaacaacaagtgaatatataactcacatttctcttcttttattactaggaatataataatataggaaaatggattttgtccttttttattataagattgtttgatgtacttatttgattaaggtgggatatactctggcctcggtattatgtaatttggtttttaaccgttagatcaactcaatcttaattcaataattttcaggattacgaaatacatactctcacggaacaaaattcactccctataataatatagctattgagaatatattacatgttacccaaaattatatgttgtcttattatgtgcagtaagattctaagtgggttgtgactaaagatgaaatatcattttcatcttattttcagtactgaaaaaaaaattatatgttatgataaaagtgtcattctttttgtgataaagatgagtttcaaccaaagaggaaataatgtaagagaaaagagttagtgatttctgtaaaaggcaatctttctaactataaagttcataatagagatgaggagatgagaagagctttaaatatagtttctctatttaaggatacacaaaacttaagcttcttctgaattgggattttcttcctttgtaaatttagttaaaatctcctcacaacatttatagtgatattccccaaaatgtcaattattactaagtagtgagtgagtgagtgacatagttatataagagggaaagtgatatgaatcattaatgatatataatcatttatgtttataccaaatccactacctgagctagtttttctctttctcttttttccaaacaaaaaatgagtatctagattgactagaaactggatttagaagtgtttgccttatccaatctcataagcctaataaacacaaatttgggcccaatatatcttggatctaagaccattcatttggcccattagatattgattttatatttgcatccatgattcatatagaataatgtgagttttaaaattattttgtagttatatttgattaatgtgcaataaaaaagagtaatttttaatttatcttaaataatttataacataaatatttaagcttaactctcttgtaaacaaatatttaagtttgatttttgatggtaagaatatttaaattatattttccaaacttctacaagtatctcactgttaagtgtaaagttaatgaccacgtgacaatttttaattagtccagactactaattttttatttttatttaaaaattaattaaaatataccaataaaaaaacgacatgtagataatgactagacatctaacggctaggtggtacttatagaaattctagaaatataacttatg

SEQ ID NO: 19756 - DNA, 6243 bp, Cannabis sativa
  modified_base (6162)..(6164): a, c, t, g, unknown or other
cattctttacaaaattagtgggagaaattttctctttcttttctttcttatttaatcaagttctatctttcctaattttaataatctaagtaaacaaaggtaagagaatgattaccttattgattctcattacttattaataaacatgcctaaatgaaaatactaattagttcttcgattggatgttggatgtattattggatttttagacacctcatccaacatcagatctgatccgatctaattagatatttaaaaataacatctaatctgatctgatcccaatgtttggtggtcggttgtaattggatcggtcaattgtcattgaattggatgatttatggacacctctatctctacatgtcaatatcattattgatctaactaagtgtcgagttgtttaatgaaataattttcgaaaggctatacgtctccaataacaatgcccttttaacttattatttttgaatgaaaacggcgtcgtagtggtatgagtttccatcttcgtcttcttcattttacaatcagaaactgtaactgagagagctctgaactcatctctctcagactccgaatgagaagcatgagcaacaaaggtcggccattgggtgcccacaaccacttccaatgcacacgcacgcaccagatcggagctctcctcctagtcctctccaccttcttcttcaccagcctcttccgccgtccacgctctcacgattcaactaccttctcccccgatctcatccgtacacctggcgaaactccgcttttcaccgacggtggagatctctcgtggcctcaccgtggctacgggcctaacctcgacctcaaaatctacgtctacgatgaagacgaggtcgatggcttgaaggccctaatgtatggccgcgatggaagaatcacgcctaaggattgcttgaaaggccagtggggaactcaggtgtgattgaatatatcttttctttgttttgattttagtggaagttgtttgtttggttactaagaaaatgcgcagaacagaacagaaggaatggagagattaaaactttgctttgattaattttgaaggtgaattttagtatgttatggaaaatttaggtttgtaggtatcctaagttagagtatgtgattctatggtttgtaggtaaaggaattttgctgatacaaaaatgaaactcttaaatagaaagaaattctagaattgttgatcaatgagccaaaaagaccatttgtgattgagccatacatagccaccatctttaggtgatgttagatagaaacttaataccatatataagatgaatatactactccattgctaattggttttgaaacgaaatcttggaacctcgtacatgttaccatatgcctcactcaatcctactttcacttactttcttaaccaaaaagaattttgaagatacaaaattaaatgttaaatagaaagaattttttcagtgaaatttgagaaatgttgattagtgagccaaaaaaaagcgatttgtgatcgagccaccgcacgggaatgttagagagttctttgataatgtgtgaaaatgtattaccatacataggatgcatgagctacttcactcattgtcgtacatcttacaattgcacctcactatatcctattttcactacttctaaaccacactttcacattcttaacaattagtaacttttttttggattatatttggctatgaatcctcgacaatgaagggaacaatttgttgatttttttatttttttggtaggttaaaatacataagctacttctgcaatctagatttcggacaaggaagaaggaggaagctgatctgttctttgtgccagcttatgtaaaatgtgttcgaatgatgggtggtcttaaggataaagagattactgagacttatgtgaaggtcagtttttcaatttgttgcttaaaatttctatattgtttaaactttgtgaccggctttggttctttgcaatgtcgctgtatgtagttgtgtttgctagctatcgagcagaagggcaagctaaactcatcttatcttatttaattgtaggtcttaagtcaactgccttattttcggctatctggtggccgcgatcacatatttgtctttccaaggtacaaattttttagttcactgtgtaattgtgttccttttttttgtttttcatttgatatttcctctaggagatagaaattatgtctaataatcaggatttttatggagtaaattttattggtaagtttacatgttgcaaatccatgtttgttcttatgattagattggatacttaaattgtgtctcacatgataaaataggtgttaaaggatagtaatccaagggatgaaacaaaagatggttagaaatacttgtgcttgtttgtaagtttgatgggaaatgggaatttttggttgctttattcttaaatcaaatgagtgttaaaattgaaagggctagttgagaatttcaaaacttccaatagcactgtagttattcactttttatgaatcaaggcaaatttggattctcattcctatacttttagctgcaaaaatcaatccaggaaccaattttttatatatattatgtataaatgatttttcaaatatttcaattggatacttatgttttctttttaaaccctttttgcagtggtgctggagcacacttatttaagtcatgggagacatatattaatcgatccataattctcacccccgaggtacggtatcattagaatacattttgtgttacatttaacataaatggaataattcacccagttgactaaaatcctctataaggcattgttaactctgctaatatactgcatgtgagagacggttattagtctgagtaggattgatgttgattcgatctctaacacatgtatttaatatacttacaaatcaaactaaaagcaagtgaagttaaagtttaattgtatgatgacattacttattcagttgttaaatcttttctgagagaaagtacttccatggtttctgacttattgtactctgtttagtagccatgtaaattgtatatccatttttctgcaagaatataatttgacatatgagattgtcaaattatgtgatagtgcagggggatcgaactgataagaaagatactagtgcctttaatacttggaaagatataatcattcctggcaatgttgatgattcaatgactacaaataaggcaagggttgtcaagccattgcctctatcaaagcggaaataccttgcaaattatctaggtcgtgcacaaggaaaagctggccgtttgaagttgatagagctctcaaaacaatttccagacaaggtacatattcttctacgacttagtttaaatgaaattttcttggttatgaaattcattgtttatgtgaaatgtgaactaaggtccatttagtagtaatcctttttttttgtatctgcgctctcacactctcggttcttttcacttgaataatatctgaaattgtttaaacaaaacgaaaaaagatagtggttgaacaccaatgtacaacttcaaatttccattctttgaatcgctcggttcgtgaattcttaatttagtaatgtttgtcaagtttagtctattatttagtaattcattatatttccgatttgtcaaatttactgtttaactgattaccatgttttcccatctcttttttgggggaattatctgtttcaatgatttgattgcaacattttatttcaaagaaacatgttttcattatttagatgtcccaaaacacccttattgatgttatgaacagttggaatctccagagttgaagtttagtggcccagaaaaattaggaagagcagaatatttcgagcacctccgcaatgcgaaattctgtctcgctccacgtggggaatcatcctggactcttcgcttctacgagtcattctttgtggtcagtctctctctccctcacactctctctcactaggatttgccaagctgatgaaactgacatgtttatgatgttcaggaatgtgtcccagtgatattatcagatcaaatagaattgccatttcaaaacgtaattgattacagccaaatatcaatcaaatggccatcgaaccgaatagggccggagctcttggagtacctagagtcaattccaggtcaaattttacactcaaaacacattcacatagctcaattttccttcatttttcttttcttaaatgtaattatttcgtgtatggtttcggtgcagatgaagatatcgagaatatgttaagccgcagtagaaaagtgaggtgcttatgggtttatgctcccgactcgtctccatgttcagccatggaagcgattttgtgggaacttcaaagaaaagtaaggcagtttcaccactcaactgaaaccttctggcttcacaatggaacttttacaaatagggatttggtcaaattttcggattggaaatctccattgcctttgccttaaaattttcatttcaggtggtgctcttcttctattaattcaccctctgcatatttttgtagatcattatgttattaatttttctttttttttttcatttatttagttgcatcaagatcctctctcttcctccaataattttgtagtttatatatgagaaatatactataatgggttcacctcaaatctaaaaaagtagaaaggaaaaggaaaaaggacaaaaggactcaaagttgaaacttgtatcaatatgcaacatttagtgaaatatgacttaatgagttaccaaaaaagtgtattttgttatgttttacttttttttttgtacactactatcctaaacaactttttttcttagaaaataaaataaagaaattgataaaagaaaaattacgtttctaaaataacttttaagactgtatactacatgataaatttttaatatgaaatagtaataatatgtatacatcaggataaatcatgggggaattataattcatttttggttcatcaaatagaaaattaacttaaattatatttttgaaattgttataggtatttaactgttacgtttttagttattacccacttattatttttttattggtatatttaaattaatttttaataaaaaataaaaatttaataatttagatcaagtgtctgcaatgtggtcatttatttcacacttaatgattaggtaattataaaaaagttaaatttaaatatttatttgagaaattactcataaaataataactaaaatttacttttacttgagattatgctgacactataaaaaagatgatgatttaggaggaatggatggttaaattttgctcctcttgaaatgattgttccaaatcataccttctctggccttgaaatggccagagttggttggaaattgcaatcaaattcatgcctttggcgacttcgatagacatatctattcatgtccaacaatttttgttgacggtgattggcaagtgtattgattttgtgagagcgtcaacaatgcaacctattgtgtcttgctctaggagtccttgttaatattttctatgaaatttagccaattaggatttaaagaaaaaataaaccaagcatggttgcccactgttagcaatgaagcttgtctctttttgttaaaaatggtatcttagcaaggtcaatcttgagattggatggacataaggaaaaagaaaaattattgggttctttatttaaaaaatatatagtattttcgaagactattaaaatattttatgtataattttatatagaaaatatatttttaggccattgggttgggtggacccaaggtacgagcctagtcccggctcgaccctgcatctaaggactctacttgacggagtatattagaaaatatctttttttatttatcaattaaccaaatttacctctaatttatatttaattgaaacatacctctttttatatgtattgtatctaaaatatcctaacagtcacatggagagtatcttgaagtgacatgggcaaaattaataaagtgtttgaaaaaaaaaaaagtaaaaataataagactttaaaaaataaggtaaaaataaaagggaacaatataaaaaggaaaacttacaaaaatactagaatttgggttaacttttacaaaaatactgttacacgaaaatcttttcaaaaatannntgtttttataaaacaccagtaaaacacaaaataactcaaaataacagtagttaataccagtaaaacaccagtagaacac

SEQ ID NO: 19757 - DNA, 2428 bp, Cannabis sativa
tcctcatggagtcagccacacacattggatccttgcttgccatcatggtaaacatatcaaccccaagcctatagcttatggtagccctctgatccaataggtctgccataaatgatgacacatcgatcccaacatgaggacaaagcttctccgtcaactcaactctattcacaagaggaggggcagcttcgttccacctatcatagttagtgaactcaggattacgcctggagaagatgatagtggactacttcttcatctgctcaacttcataaccatgcctcttatggtagaactaatacatcgcttccaagtaagcttcatacccttctgtcaactgtaaaggcctaacaggaagtgtgtaaggtgctggaggcagtggaggtagcttagtcctttccctagatagttaagtcgaggtggttggcataactttgggcactgggggaggtggaggatcctgattgtccttggatatgtctgggtgctgtgcctaggttgccttttgacatcaagagcggtagaccccctccaagaatgagtatctgttgcttacctcctcaaggctgccaattgcaagacattctctttggtctccacccttgcctttttgttggtgccaccgtcaaatgaaccagcttgcttcttatttatcactataggccaatcatagtttgagttgtcccctcagagctttccaaaggaacctaattcaagggtttcatgaacaaggtaagttcagtcaggtctacgatgacagtagatgtagcctccgtacctggagccttaggagtagcttttggatttgaagccagaggtgctggctcttgagatctgcttctggaggcctggttcctctttctgccatcaccccgcctttgggctatctcccacatcttgttagatcgagtcttgacgctacccaagaatttgtttaatagccccatctgaagagtggctggttgatctgcacaaaaaaaaaaaaaaaaaccaaaaatccatcaaacaaaactataataatagctatggtacttattacatatcatcatgcaagacattaagagggtccaaaccattaatcctagcataattgacttttctcctagcaaacacggtaacgtcctcttgacctaaattaatttcatactggaagaatcctaggaagtaaatttcactaaatgcatttactctgacatgatgggtaataggaggaatgaaatggttaggacaccggatgatacaatctactatatctttatatctacagcatgaatacttatgacggtctaaactcaaaaaatatagatgaaatccacattgattgacagtctcaaaatcagacatagtgggagccctaattatatgaaaaggtgtatcaccactaccggaagtgctcgctcttagagctccctcgttatgcaccacctccttaagcagatggcaagttcttcggcctcgctcaggctttctgggaattgtctcctccaatcctccaatcgttgctcatcggccttcactacctttaaggcctcttcagcagtaataacggcggtttcctctttagcttcctctgggttcccccgtaaggcatcttggacaacatccttcatggaaaggtgatccacatcctgaagtggtgcaacaagacccacttctcgaaggttctttacggtcaccagtttttccacctgcagctccttcggtgagaaggacttgtaaaaatttatcctctattctagctccagagtaagaggcgactagggaaggtagtctagcaagtataacaagttatggatcagaatacagcagattgaaggaaaatcagaacttttaaaaactagagaaggggtggagtagttgtttagagaagtgtcaagcaatccataatatcatactctactatggaggccgaatacatagctgctgatgaggctgctaagcaactggtttggctaagaaagttcttcacagaacttggtcttgttcctagaatggaaaaaccactggttttactttgtgataatactggtgccatagccaacagtaaagagccttgaagccacaagaaaagcaaacacattgagaggaatatgtggcaagagggacgtactggtggagaaagttgatattgaagacaacttagttgatccattcaccaagattttgatagtcactacatttgaaaaccacagaacgaatctttgattaattgaaatatacagattgttttatgttagtgcaattaggaatttgttgggttttgtgccctaaataaaactttgtaatcttttatattcatttatctataaagaaacaattttttttcattacttattaaatgtgttatttggttcatgtaatcacttgtttgatttataaattcatccaaatcctcatcacattgatattcttatttattgtattgtca

SEQ ID NO: 19758 - DNA, 5450 bp, Cannabis sativa
  modified_base (4781)..(4782): a, c, t, g, unknown or other
aagtaaaatatgacactagcacagatttagctgacagttacatggtcactcaatttattaaaatatcatccttctaaacgacttgttagcaagtactctaaccttgttaggaaaaagtaggaaaagatattagtcctgaaaactctctcaagtcttgcctcatcaatctcttcgatagagcttgttacatactgctcggcagcattattgattagtatgtcaatacgtccgtacgcattgatcacctcgtccacaactctcttacaattctcatcataacccaaatcaactgggattgccataggttccttggcatccgaggtcttcactttcttaatctctcgaagtgtgtcctgagcatctttgtcctcttgacccttcacaaatgtgaatgccacggttgctccctctaaagcaaagcagtgagacacagctcggccgatcccagagtcaccaccgctcacaagtgctatcttcccctgcaatgtttgacaagtcagttaattataatattaatgcgtggctttaaaattaataatcagtttcttaaatgacatacttgaagcttattagaaggcttgtattctggggctgtgaactgagggttggggtccatagcatgctcttttcctggctgagtagattgtttctgaggcgggaattgctggccatgtgaagccattctctcaaaaaccctagttggacacttctgggcaacagggaaagtttctggacagagggaattcaagtgtgttatggttggataagctctgattgtcaagactctggaggaaaacaatcccctgtaaaacatatatataggatacaaataacttgtgtaataagaaaattgagtgggaacgagttattatgtagtgaatcggaactggacagagcttgtgaggtggcaagagagttggtgtccacgtgccatgttactatgttggagcagacacgtccagttttagcttctgggttcatcttattgagaatttctcttggaaagagtctgggcttagccaaatggaagatcacatatacggagaattcagagcctactagaaaaaacatcacgattagttgttattagttgcaatcaaagttttctttttgtatttccgattgaaaaaacggtgaagtttaaaattaagataaaccttccaagatatgtgttgttgcatggtttgcatggcagccacgtgtcttaccaagcacggtgatacctgtctctcttttcctgttgtctaaaccagcacacaaacacttggaaactccttcacaacgcggtgtcaatagtaataaatgtaagccaattcattaaataagctctcaatgtctctgttttctttacgtggttacagattctgaatctccttttgataacggttctctgtccttttagcattgatataactcgatggcattctccaaacttagtttcatcttcgtgcttgttcatgtctctctcttattttccagcttggtgctcagtaatggtactcacttctctctatttctcatcattttatttttttggtatattgaagataacatgtataaactataggatgttagatgattatgcctgcaaatctcagtttttccagtgttaacataataaccaacgtaacttgatttctaaaagttgacttaatatgaaattccatctttccatatgtttgacattttacatcttcaagatctgcatgcaaacaactaacaagtatgccagttgagttctggtatgatttagtggctttttctgaaacttgcttcactaatttacgtacagatgatgaagacaatcttcttcaagggatcaacagttacaggcaatcagtaaatttaccccagttcgtaaagaatggcaaagcagagtgcctagctgataaaatagccagtgaattagaggaccaaccttgcaccaccataaccacaggttccaccattgtgccagccacccagacccaactggccaactaccctaagctcttgaacaagtgcaaaatcgatatgaacaccacatcagatggggtgatactcccagtttgcgtccccaaaatggtcccaacccttgttctcacaaactacacgcattcttcttatgcaaagtacctcaacaattccaagtatactggggttggtgttggatctgaggaggattggatggtggttattttgacaactagtacttctactggaagcttttcaaaggctgtgtctttagtttcccagatgggttttggtcattacttacttcccatcgctttagggggattgtcaatgtttgttttaagctgaagtacacaagttgggttttttgtctttcttttctattgtgtattgtagtgtgcatctttaagcaactttcatctctgtactgtaaattatgcttttttaacatcagaaaagacgtgattcactagagctttcttcagtgtttttttctttctacaatttctattgatttaattttggtgtagatgtagataatgtcaaaaagtaaaaaaattcatttacaagagatgattttcccccattgaaatccaccttttgtgatcaaaaggttggtacagtctggcatacagagtcatattattcttgtaacaaatagtgtaacgagcaaatatggcatatggaatcgcctccactgccaagataacttaaagtaagcaaagtattaaagaagaatatttaatttgagagcaaagaagtcttcaagtacaagaggtttttttttcttcttatatatattggtcacatatccaaaggctcttcacacctaatgatatatatcttccaattaaattgaacacataaaccaaaggaaggatcttcagatacttatcaatggccttctccaacatgagcctagttctttttgcacttgctagtactttgctcttgtattctcatccagtggaatgtaatggtaaacctcctccttttgtcaacttattatcttttctaatgctttagtagttaatgttttctaggctaaattgctctcttgataagattttactaggaaggctcttgaaatcacttcacttgtcccaatccccaatttgttcagcatattctgtagtttttttaacagctcttatttatctaatttttatgatgatgtttaatgttttaaaatgtaacataaatttcggttatttaaagataattgtagcattttttttagattggcggtacgaaaatattatataaaattatatcattttcaagaagactcaaattcactgtcgacgttccatgtcttcaatcaataaacaacatgattagcattgctataaggcactagtggtacctaacactttcttgacatgtcacgttgcgatagtccttaaaaactattatattaaattatgtgcgactcaatacttcgctagaccaataacaatactgacatacataagagagtgctaggcaccaccggtgtcttagcaattttcaaaaaaataatatatttgttaattgtataatattttgttaaaaattaattatatttactaattagaacttcaactcctcctaagtagaccgttttacacttcttcataaatattaattatatcaaatctgtacaatttattgttatgttataattcaaaattcaaatcattttcagagaaagaagatgatatattcaacgcgatcaacgattaccggcaatcgcataacgtatcggctctgaagaggaacaacccagcagattgccttgccgacgaaatcgccgatgatcttgccgatcaagactgcactggtaacgaagctttcgccaaagatccatatcgcacggttcccatgctcgtcaatttccctaagctcgccaagaagtgcgatatcgaagtaaactccaccatggacggtatcattttgccggtctgtgtccacaaactggtcagagatgtcgttctcaataacttcaccaagactgcctacacgaagttcctcaaagataagaagtacaccggcgccggcgtcggctccgagaacgactggcttgttatgattctgagcaccgataagcccagcgggagcttttcgggtgctacttctttggttgcgtttgggattgttcagttctttgttatgtcgttttctggattgcttcttgctattacgctgtcgttttgatattctcgggcgaattttctcattttttatgtcgtttgattgattgattgtggtttgtgaattttaattttctcaagtgtgaagtaaagaataaatgattttgtgatgacatatgtgaattttttttttttaaaaaaaggggatatatctgttaccattagttaaagcaaaatattttaactgaatcttatttaacggtctcaaatatgtcaacaagatttaaagggagattagactttaaaaaatacgatcaatatataaataagatcctataactataaggtcatcaattagtaaattgtttgacaaaaacgtatatatatattactagaaaaagataaaagttgtttacaatctttaacgacaccactaaatatggatgacaaaatatttaattttctaacagtttatagtaaaattagacaatcagattccataatactaacacccgagaaatcaaccttcaacctctaaagcacttgtctaatttccaatctcgaaatctcagccacgactcgaccctagtgaccgaacaatgttgagatttatgctctaaaagcaagtaattaataaataatatattatagaatatatgatatacaattataagataaataaatacattaattatnnaagtataattaataaatatctaaaaattccttattcatatagagaatgtataatcttgtaagggcagggttggccctaggcatatgcgagctaggctcgtgcctagggcccatacatttcgggggcccaaaataaaaaaacaaaaagttttattaggcttttatttaagaaaaattaaatgtattataaacaataaatatttattgtttagttagttggggtatatgatatattgtataatgtcatgggtttgaatcccatgacactcatttttaatattttttatatatttttgagagtgaggacccaaaaatataattcgtcttaggctcatatattctcagagctggccctgtgtaaggatgtacaagagaattaagattatacaatataaataaaactagtcagtaatgtatcaaagtaaatgaatttttaatatataactactaagtatgatttactatgcactatactctagtgtgtgtaattttgatttgaatcatatatgtggatagacatgtagtaaatgtgttgtgtataatttgattatacatgactggactaatatgtaataacatctttcattaacatgtcgtttaccaagaattattcatatcacaaagatgatcattattagattagcttgaattctgagtatacatgaactc

SEQ ID NO: 19759 - DNA, 3683 bp, Cannabis sativa
ttttttttttttctattattaattaataagaaaaatgttagaaataggacgaccaaagacttttcttttgtttctttctccattcaccgattcgaaacgtcatccatacgaaacggcagatctcttcttcttcttcttcttcaaacccaaaaacaaacaaagaacacagagcttttttcaatgcttttttgggtctgacattcatcttcaattctaatggcccgaactcgatcttcctcttccaaattgaggtactgtaaccctgcttattacctcaagaggcctaaacgattggctttcctcttcattgcttttgtctgtctcagtttcctcgtttgggatcgtcagactctcgttcgggaacacgaggtaaccaacctcctttttttcatttttttttcaatttcatttccaccagttttgttgctgagaaaaattctagacgggaaagattcaaattaaattaaaagtttgaattttggactcggtggcttcactttttctcggatctgattcgtttttacggttgggcttgttgaatgtgtttctttctctcttatttttgaattataattgaatgggaaggattgacagtgttttgtttggattgtttgaacttcagattctctacatattggttttgatattcgttgaaataatgtcttggattgttttatgatgtgatagttctagaggcttacttgttttctactttaatggaaaaaaaccattctcaattgcaggtagagcttgcaaagttaagtgaggacgtggctcacttgcagaatttggtaagagattgatctttcttctactatgcaatctttaatggttgatttgccttgataagatttgggattattaggcatgatatttctacaagttcttataagattttgaaaagaaaagtatatgttgacattagtgttgctctttgagattggtgttgttcactgtccatttggtcaattttcttcaattctagttttatgtgagctattattatttctcttcaaaagtgaaaatgaaggttatgttttcaatttttgaaaataaaaacagaagataaaagtattctcagtatgtgcacagtggtattagatggtttcaataattgcaatttaccctttaatgcgtaccccgttcaattattgcaatttaacttggtgaatgctttgttgtctttaaatatatgaggtttgaggtttcaattctctgtaacttgggaggaggttactcatggacatttgacctttgtaattggaaataattagataagtcctcacaaaataattaactggtggtaaaaatagttaacatagctactttgatgggttctctgttgcgacttaattgtgaattctaaatgaatgttgcaattatgttgtcaaggaaaagagtaataagaacccagcttttgttaaatatgggatgttttctctcaacacaccagttttttttttttgctcattagtgctcagcattttgcattttaagctcaatgtttagcagtgatttcttaatccaattttgacttgtaccttcagcttgaagagataaagactgatggcagtgctgtcagaaagacactgaaagatgttccagatgatccaattgatgttcaacgaagagaaaaagtaaaagatgctatgcttcatgcgtggaattcatatgtcaagtatgcatggggccaagatgaacttcaggtaccaagtacacttgtaaaatatatctgctgtattagtggttgtttccctgagtttgtatatttctaacatataaacatataactgtgacaggaagaaaataattgttcttgtgtatgggtctaaattgatgttttctcctctttttcaagttctcttgtctgaatttttactgttgggtattttgatttaatgaagcaccaggactaacttgtgtttttcattttaccagcctcagtctaagagtggtgtcaatagctttggtggtcttggagcaacattagtagattctcttgatacgttatatatcatgggtcttcatgaacagtttcagaaagcaagagagtgagttgatattttcatctttattgttttgatgatctcatttagatgcctagaatagacattctgcattccacttttggtgataacacgattatttggaaatgagttctgctcgctgtaagcttctttcttcatatagttgtatatatttgctcaagtcaatcttaatgtcctcaactttggtccaatttcaactctggtttctgtgattgtcattttatattattattttaatcttcttttatggtactttaattcaaaagtttacattttattttacatgcttgcgtgaaatgttgatattcttttcttgtttatccatttgatatccaattcataattatgtgatactttttgcaggtgggttgcaaattcattggattttaacaagaattacgaggctagtgtctttgagacaaccataaggttgcattataaggtttaaaatgttgttggtcttgattgttttcttcatgcgaatgaattatcattggatcttagttttctaaggctttcaatagttatcgcagagacaactttagatgctctttctgacatcttttttatttttttggactcttttcaccgagatccagagttgtaggtggtcttcttagtgcatatgatctgtccaacgatcaacttttccttgataaggctaaagacattgcagacaggttgctgccagcatgggatacacctagtggaattccttacaacattatcaacttggctcaaggaaggccacataacccgggatggactggggtaagtcgttacatctccaattacttgaagtttgatcttgtatttttgttgaattgatttgttaatatttgatagagaagtgcttcatagtaatattgtcaatagaccaagtgagtcgtgctctaaatatactgatatcatttagcaatgtctttgtagctaatatatgttttgtactttatttgtttccattactggcaaagacttttaagagttcaattaacaaacgattattgtttgctcttagggtgaaagtatcttggcagattctggcacagagcagttggaattcattgctctttctcaaagaactggagatcctaagtaccaagaaaaggttaatgctttttcccaattcatttacggttgtgaataaatggatgtgagtaatgtgacaaaacatgtttgttaactcgttatggttggtatctagcaaactgtaactttgatgatgttataagtttaaaaattgttctaggagtttagagaactaagacctctgaaatatctctggaaatctatttaatgacacctaaatgattaacaaatctaacggcatatatataaatttgctaatcctagcctcgctgagtcctaattcaaataaaaatgcaaatagtacgattaagcactgcagattatttctccttatttattttcctctcgatgaggattccttattctctctattgtaatttattttttcctttaacaaaagctttttgtttctaatgatgtgtgggtgtgcgctcatagaacagtgagctgaattatgtccatgttacttttccaggttgagaatgttataacacagataaaaaaaatattccctgatgatggtttgcttcccatctatcttgaccc

SEQ ID NO: 19760 - DNA, 4767 bp, Cannabis sativa
ccaacttttttggtaaaaagctggagtcatcccatccagtcctggagatttatcggggttcatatcaaacaatgatgctttaacttcttcagcagaaaccgggttaaggagctcttgattttgagaagccgagactaatggaagaacacaatcagttatctcattccaattagaataaccagatgtagaaaagatgactataaagtagttcaacaagacctgatcaaaacctcttccccattcaacccaaccaccattagcatcttgaagtttatgaataacattgttttaattatgcattatgcattgaaaattgaaataatttttttttattttaaaatagaataattgacttacaaaaatatagaataactaaaatgataaaaagatcattccattaaaataatattctaatactttaatatataaataaacaataaaataaaaattatttttttctattttattatctctaaccaaacgtcaaatattttaatgtatattttattttaattatgtatttatttttgttgcaatagtcctttaattttagaataattaatatttttgctctataaatttataacagtactaaataatgtctatatagctatgtggcttgttaaaaataaccctcaatatgatagaattgtaaaatttgcttcttctgttaaaaatccaaatttaaaataaatatcatataactaaataataaaattcgattatatccttttattttatatcatcttttaatttaaatacattatcctataatatatttaattcaaataataaaagataattatcattttattttaatttatcttattaagtaaaataatcaaaataaataaatagacttttctatgtcaccctacatgtgtggggctaagctccacatgtctgggccatattttaaaacctaaaattgatttctcaatttttttataaataagatttattatttattgtaaaataaataataattgattaattctaatcaatcttttattttattatgattaaaataaatattattttacactaaaataatatatttatctctttaaatgttatttaagaataatattatatttaactagttaatatagttttattaaataaaaataagagaatgttcaaaaatactcttcttttatgttttatttacagttttacaacctaaaaattttaattgcaaaagtatttttgtaaaattttaaaattacaaaaatacacttttctaaacaaaaaatcaactaaaaaataacgataaatcaatcctacaataactataaataaactgtaaagcaaccaaaaataatcacaaaaactaccggtccatgcttgacaagtggaagaaacatatactttttattagctttttattgtaccaatgtagttcaatttttttactaataaaattttaattctctacttaaagtatataataactgatttataatatcaaaagtctactatatgtaaagatcctcatatttcaaaataaatttgaaatataaaactacctttttgtataattgtattatacacaacaacactacaatgtaactactaaatacaaattttagatctatgactgttgtatgacattcaagccagatactagcacaatagaacattttgaaccactacaaaaggagataaactataaatatatatgtacatatggtctaggttctactcgaacttctcacagtataaagcaatggtgtccaccattaggctaatgaataggcagtgagtatcactgatgttcattaaatgggtatataattttttattcattaaaaaattggatattatactttttttcttaagtattagtaaaataaattaaaacagtgcattctggtacctttaacgttctattagtgttgaggagataaagactagacatcctcgtgtttttgtgggtaataaaagcaatgtgattggtttgaagggtaagtttctttgtttaaggattcatcctctgcaagttcaactttttcgacgaatcctgcgagccagggttgccagtgtaatagtcagggtcgtcatggtggaaatactcttcttagtttgcaaggtcagtcgtcgtttcaggaaatagctaaagtaacgtactcgcaaatattgtgtaggtatgagactacacaagtaaaaggagggtgttacaaatgatattagagccttgactcaactggaattgataaaaattattaaaaaaataaaaaacttaaaattatataaatatttataagataatacttaaaatcatgcaaatctttataaaattacaaaattattataatttttcttaataggaaagaatttattcaacccatcaaagaaaattacacaaaggaaacttcaactacaacaacaagtcaagaaagaaattttttaaaccaacactgaaataagtcatgcttataggccatggaaataatcaggtaaacaaacttattacaacaaataggagaaagaaaaaataagacaaaataaagatgaataaatatttaaatatgagagatgataaaaccacaattctctataaaaaaatactcactaattataatcatcaacatgaatgtgtatatcaagatagagagctttgcaaatagcaatgttaactttaaatcgaaggaagccttgcataattatttgagtaggtgactcaagaaaactaaatttagaatctggccaacatgcatgaaagaaaattttgaggatgttcttggcagtgaggcgattaatagaaatgtcataagtccaaataaaaaagaaaagaaaaccatatttatgttcacaagattttggacaattaatagtaaattcaaaaataatcccacaaaaattcatgaacgagggtatacctcatcttataaaaaaaatacaatgcttaatatcatgcaaatatttataaaataataaattttatataaaattacaaaattattataattttttttgttattttaaggaaaaaaatttattcaaattaccaaaaaaaattacacaaaagaagctacagctgcatctactaaccagaaggaaaaaaatataaaccaacactaagataaattatatatgtttgaaggtcatagaaataatcaaatgaacaaacttattgcagcaattaaaagaaagaaagcaaaaaaaaagacacaataaagaacaaatatatcaaatatgggagatgataaaactataatctcttaaacatataaaaggtattcattgtttagtctcttctattctttgattgtgtgactaggtggagttctacatttttaatgcttagcacaatgttgaatgtgtaagactacgtgagttgcgattgaggtgtgtccatttagaagttgtttgccaaaattctcaacaattatgtgagaagttagaagtatttatgaagtggcagaattattttttagagcaaagtatcatattgctaacatttttttgcccaaaatatgtcaaattaagaaaaaaaaaataaattatagatgtcataagatgtgccttttattaaggatatgacaattaaaatgatgtttaagttccaaaaatattgaaaaaagaaattataggtttatgtgtgtggcggttgttttagaccccaggtataagtttatgttgctcgaatattatttcactgcaatttatggtgacggacaatatgaaactgaaagtgaaaatgtccatgagctttgttataagctattggaggagtacgagtataagtttctttttttgagagaaagaagggtttgggtagaaaatgtatcaacatctttttcgacgaatagatgacctttctcactttgacatatttattagagttgtctatcaagtaaaaaatgtgaagtctgaattggatttatatttagaggataatttgttacataggtttgaaaagttttttgatgtatgcaattattgaaaggtaacaggccttaaataccctttgttgaatatgattgccaaagatgtattttatgtgcctattaacactgttacttatgaatctacattcagcactggtggtagacatgtgagtccacatcaatcgaacaaatatattaaatagggcagatgataaaactataatctcttaaacatattaaaaggtattcattgtttgtaattattcacacgaatgtgtatatcaagaccgaaaattttaccaatatcagtgctaactttgaatcaaaagaagcctctcattattgttgaagtatgtgactcaagaactaaatttagaatatggccaacatgaagaaattttttgatggtgttcttgacagtgagacgattaacaagaacgttataagtccaaatctaaatcaaaagagaacaaaatttatgtttccaatattttggacaattaatagtatattcaagaatgagcacaccaaaattcatgaactagagcatctcatttattgtagagcttataatcttattaaattggaaagaaaagagcaatacttaaaatcatgcaaatatttataaaataataaattttatataaaattacaaaattattataattttctttttttgaaaggaaaataatttattcaagtcaccaaaaaagaattggggttctttttagagcttggtattgaaaatttatggatgtagaaattcattttgacacaaaagaaatttccaaccgcatctacaagccaagaagaaatttttttaaaccaacactgaaatatttttgtaacgccccaatattttgccttattttac

SEQ ID NO: 19761 - DNA, 2463 bp, Cannabis sativa
aaaacagttgcaaacctgttgtagtagcactgtattgtccccttcaaatgtctggaaaatgtcatgatcattcctcagcataccaaagcgattaacagcagcatacccatggcctccacaagcttccctacaaacactcaatgactttgccgtgtaagatgtcacataagccttgaggcctgctgaaagtgcatgaacatcagcaatcaattgttcatcatgggactttttcatctcggcatacttttccactaaatatactgttgagaaatggaatgcataagtcgaagcgagcattggcataagcttatgctggtgagattgataatcaagtatactgacttcaggctgcttgggaggaccaaactgctgccgaagtaatgaataccgtattgcaattgtggaggaaagcttgaggacacttactgaagaatatgccagaccaactcttccaccaacaagttcacctaatgttgcagcaaatcttctgtttatcgtggggaggctacttgtgtatttaccatccctagagacatctccaaaacggttaagaagattgtcacgaggtatcctgactgagcggaatctcagtgctccattatctacaccattaagaccaaccttgtgaccacaatcatgtatttcaatgcctggaagagtttggtgggtcttcaaatcccttattggcacaatgaaggcatggacacccatatcagcaactcctttcgaatcgtgagttggcaacaacagcttagcaaaaacagaagcaaactttccatgaacagcagcattaccaatccaccatttgatggccccatcatttggggtgttaattataaattcatctgttattggatcaaatgttgctgttgtttggaggccttgaacatttgaaccttttatccatgccataggaaagaaaagggtgttatttctagcatgaatgcagattatttagttcttatttgtggcgcacaatttcgtggaatttgggcattctatttcaaattctcggcatcaagttttatgcttaacaacagtgtgcaagacacaggagaaatataacatacaaaaggaagaaaatctgaagcaacatcataaatgacctaacaaattaaaaacaaaagcaaagtaatccataaactgttctcaactattcaacctttagccttaaaaatataatcaaattattataactgctttactataattgtcactttattttgaggacttaggtaggtgcctactcaagcacatgaaaagaactaacttcagccccaacaggataaccctcccttttgtcaatgtcataacatttcaagccattgtgttgtagcaagttgcatactttctgaatgcagtgtacttcctaatgactaatgagactatttgtatgaagtttcgacttcagctataccaatacaggttagatcttctttatcaagcgcttgacctaaaatttaaccaactcaaggaaacagaacaaatgatactagagatgccaggccaatgaagtataaacattcaattcttgacactgacatgtttagaaaaatgcagagaaaaagtttctcaaagagtagtagaagacttaccatgatggagctcagtcatagcaaaacagcctacatattccaaattgtcaataccatcaaagtacttatccctgtgcttcttggttcctaaattaataacagatcctccccaaaggctgcccaaaatggaaaagaaaaagttaatgcaacatatgataataagaactgtagaaatgctgtagactaagcaaagctagatacagacaccaaaagaattacatttttcaaatttgaacacacaaaagtttgaatttgaagaaagtacattttggaataccacggattgtcaggagcaaagagtgaacacataatgtcagtaatcttgaacgatgagaaaagagaatggagaatcgcagtttgtgttttatttctttcaaattttaattttgtttttactatagtaaatttcaaaagtctcataaccataaattatactccctacctcaacaaaactacaagaaatctcacacctggacttctatatactattaaattaattgaagtttcctgtgagctatacattattaaaatagttgagaggcatctctttcactttaccatcctttatagttgtacctcatccacttccaattttaaaacactttcgcggcattttaaacacattatcttaatttctctatgtttatctgttagtttttcatgatggtccttactagttttttaatactttaagtatgtttcacttactctaatagatagccatcactccacaaaatcaaactacccacctacctaacttttaccaataatttaccccaaaaataaaaaacaataataatgcgaaaataggaacaacagtgtttagctctcagaacccaacataagaaatttatgtgcgagccagcca

SEQ ID NO: 19762 - DNA, 4565 bp, Cannabis sativa
aaaattagactaaaaaatttttctgaatgccaaaacaagttaagaatgcatcaatacatcccttttaaggggtgcattatagaatcacccataattttattatgtaattggtgtttgtattatatcaaaactttattttatttcttttccatgaaaacaaaaatggatagctttctttctttctttttttttttcgaaagaagaaatggacagctttcatcattaccttaaaaatcttttctttaacatcaacgatcacaatcaacggcccaaaaccatccactaaatttaaatttaaatcaaaattatgactcttatctctgtttctcacttacttcaaggcaaatacaaatactatttcaatttctaataaaaaaagaaagtacatgtcatatttaaaaattaaaaaaattaacaaagaatatataaatatttccccaaaatagaaaatatccacataaataatattttgaagggattgccttactatatccacatacactagattacaaccatattataaatctgaacattttttttttttgggcatgtgaaagaaagacagaacagaatcatagtcctcttactaaaatataataataaattataaacccttcttagattccaattaacattttttatttcttaatttaatttttctaattcctataataaacaaaaaaacaagatttgacattggcttttcctttgtgtattttcttttgtcattggctaaggttttcattatagaaacaacaacaagaagaagaggataaatattgttgtctctgtctctcttctctctctctaaactcaagatcttccttgctttcggtgcttttttaatttcagagtcctctgtttctttctctctctctctctctgcccttattactcgatctagtctttctgtaatctctgaatcgaaaacagacctcaaagttccatatatttacaggtttagttatcttctagcttggtttttcttcattgagtttaatgctttggttatcaagataagctaagttaagctaagctttcatttgggttgcttcttctacaagatcttatcccaactctgcttacaatttaagctgaaaaaaaaaagagagaactttaaaaattttctcaggaaagtgaaagaagcaaaaaagaaaaaaattcccagaattttatgggaaagatagaaagagggtacgtcttcaaatactggcacgagctcgtatagattttaagcttaaccctttatagagagaggaaagtaaaaatcaaaggaagaagctttcatggattctagtcatcaacaacatcagaatcatcaacccaattcagggttgttgagatatcgttcagctccgagttctctctttgtgaatttcaatgataataataagaacagtttttcaatggagggttctgaatcagagagattgttctctggattcgttaattatagtggaagcaatggtagtgaatcttgtccgccgagttttcgagatttggacgataagtcttcggttatgggaggtggccaacagaaccagaggtataataatagtgggcttcctcctcattatccaagacaaagctctaatatgagtagctctgttttggataatggttcctatggattaatgggttcaatggctatggattcccataatactcagcctaataagtctctcaactccaatcttcttaggcaaagtagctcccctgctggccttttttctcatatctctctcccaaatggtatggttctctcttctcattattctcttcatctctttctctcaatatatatagatgaactagttaagaagctcgtttgaaaattaagtgatacaagagattttctgaattttgtgttttctaacaaactaagtacaatttgtgagaatttgaccaatgaatattggaggtaaatagtccctttcaaaaattgaaaataataatatttataaagttatagagttgttaagttgattattgtatgtgtagtggttgtatttggatctattgagttgactttgtagtttagtttatgtttttcattttttttggatccacttgattgagatgttattttgctgtgattattagcattagagagtagaatcaaaatcagttactgaaatgatttcagagaaattgcaggctatgccaccattaaaggctctggaaactatggtggactgaataataataatagtaatggtactgctagtcaaggggaaatgagtccaccaacaaacagattgaagagtcagcttagtttctcaccaagaattccttcattgggtatgttatctcagatttcagaggttgaaagtgagaacaaccttgaggcaaatacacttgatgaagaaaataagcttggaaataataatgacaatcatactagtgatgttcaattctatggctctggattctcatttggttcttggaatgattcatcaaatttctcagatagttatggtggtttaagaagagaccaagataaggtaattaagaaaaaaaaactcccataaatttcttcttttttctttcagatttttattattggtttttgtgattagaataatgaagagatgggaaaccgaattcagttgctgtcacaccacttgagtttgccaaaatcttctgcagcagaaattagtatggaaaagttcttgcattttcaagatgctgttccttgcaaagttagagcaaagcgtggttgtgctactcatccaagaagtattgctgaaagagtatgttgtgttgtgttatgttattttcaattcattatctttttttggttagaactcttgaagctaaacatgaacacatttgatctgtgcttaggtaagaagaacccgaatcagtgaacgaatgagaaaactgcaagagcttgtcccaaacatggataaggtacaacttgttcattcacatatgcactcctaattgttttttcgctttttcttcaccccacttgtcgagtaatgaaatggaatcaatttttattacattcctcggtttaattaccgttttaaaacattagaatgttctaatgatttaaaacataaccaaaaatgaaaattttattcaatttcatttcattacttccaaccgaacgtaattaagttaacattttttcttatttgcagcaaacaaacactgcagacatgttggacttggctgtagagtacatcaaagaccttcaaaaacagtttaaggtaaagaagttagtaaaacaagagaacaaaccttcaatttctaatgagtaacttcttcttactctgattgtactgtttttcgcagactctcagcgataaacgggcgaattgcaagtgtttaaatatgcagaaggcaatcccaaatcaagttatttgatttagttccaagcagataaaagaatctgataatgaagtagtagtgaatagaaactacatcttattttttttctttaatgcactaaaaagtccaaagtagaaagagagttacaagagttttactaccctttttagctggtgtgaaggagaaggttaaattgtctttcaagatcacacaagctaacaagtgtttctagttacttcaatataatgcaaaaagaaatgggaaaagggaaaaaagttgtatatgacatgtcctaataatgcattttcatttttatgtttttgcttttcttgatactttttagcccaatctagcatgaaaatatgattgaaaatatagaatgtgcttgactaagtgtaaaaatttagatgaatattacttacctaaagatccttaaacactatagattctttttatacgtagtgtacttacaatatttaaagaaagccaatcattatatttgtacaaattttgaaacccaacttattttttttagtacataaactcctaagatgattttatctttttggctttgtctttctgtaaatagtggaggtgaagatgaaccttatcttcattccacttttgcaggggacaccactaaataaagtaccaatcatctaacttggtatgcttgctaaaccaattttcatactcttttcttaaaaggaaaaagggtcttatttctttgcttttgtttactttttgtagctacaaatataagttgtcttactggtcatgaagcactaataaattattacttttaagttggtatttctttactctcacaatacattttaacttaacttaatgctatatataaagtagtatttatatactggtgccaattagcatgcaaagattgtaaaattattgtattaaataaagtggtgattgtttctctctattgtttgcacccacctatcatttctagtaccactaagaactagtttgttgttataaataaagtagtatttataacagctaactttttttgttctgacgttaacaactagctttaatagctttgtgtgcaaaaatggacctattattgagaaaataaaataaaatttaagcaaaaaaagaaaaatttaggggctttcatggactaaaaggccttgggcaaaggttctcaactgtcccactcattaatactttgttgctcggtattactaatactaatttct

SEQ ID NO: 19763 - DNA, 2314 bp, Cannabis sativa
gtacaacaaaactctataaccagtcatgataactgtttatctggattatcgttatatatgaggtggttcatgagtttctgtaatggggtaaggtttctactggaaaataatatatttctaagatggatatatataagaaagccattgtaaacaaacgatctctgacataatggaaaaacatatggatcttcataaaaacctcaacaagaaaaacaagcaaaacgcctatattttataagcaggtgaattattagacagtcagtcctaagtcatcttattcttattatatggattaacatatggaaccaatacatttaattgactcattcatcaatatcgtcataaaaacctcaacaacagaaacgaaaaaaaaacgcttatattttacaagcagatgaattaaactgtcctaaagttcatcatattcttatgcagagaaacgtataagaaagaacactctatgtttgtgatgtgtacccacagttgaagagattcattaaatacttacagggacatgagagtctctggcgcttctcttggcatcagtagcagagaaaacagtgtagacaagaacgaaagtacccacaatctcagcaccaaggccatcgcccttggtgtagccagcattgacaacgttggctccaccaccttgaatcttgtactgagaactctcgaaccccttcacaactgcagccccacagattgctcctaggcattgcatcaccatgtagtatatggatcttgttaaggagagctttcttgctaggaaaagcccaaaagtcactgctgggttaatgtgcccacctgatcagaacggatcgacaaggtcagattaataaaggtttatgataagattaataaacaacaatatatataggccaggcatatcatcatcaaccgcagcaaaatgagtaagatctttctaggaaattagccaaacagagccacaaaaagttcccattcattcaaatacataaacaagattatcttgagctttcgttgttttgctctctctatcatcaactttatttcctccacagaccacaatgcaagataaaatgtttaataagttaaaactcagtaacagatagccagccaagccccaatttcttctcagaaataagaatatcatcacaatgaaaacccaaacaacttattctagtttccatatgagtttttcattttcctatcttcattattttagttaccaaacaacttaaacgagaaataaacaatagatcaaacagatcaagcaaagatgaagatcaatatatacctgagattccagcagtacagtagacaagggcaaagatcattccaccgaaagcccaagcaataccctgaatacccacagaagcacacttgtttggagctctagagactcccatgacggtcaaaacagtgatgtacagaaacagaaaggtagccacgaactcagcaatccctgctctccagaaggaccatgacttgagctcaccgggctcgaagagcggcgccggaggtggctccttgtagtccttgtccgtctgagctgaggtcccaatgggttgcctctcggagtacttgttggctcccagcctcacatcttcttctttaccctccattgttagatgctgaagctctctctctctaaaaagcagaaaccctttttttctctctctaaaaagtaaagcaactataataaaacaagtgaacttttgctgagtttctatctggtttgagaagaagaataaaacaatttatagacaaaaatagtaagtatgagtacactggacgtagcacaccttagctgttttagttaaagttaagtaattattaattattaattaaaaattaaacagagtgattttaataacggcctttacattacttattttatacttaatacaaatagtctggaatattaagataatatagaaaaatatatatattttttagaagtacgattttgggatgataatggtaaagtgaaaaaggattttagtaatttttgttagggactataataaagttacttgagttttggattaattaattaattagtttaaatagtaagaagtttctggaatttgtccaaagtaggaataacgcatagacacgtgtcagtgggttagtcagtccttatcctttttcaaccctactacttacaattattccaagcccccaaacaaacattgaataatgataacatattttcaataaaagttttttatttatttattttgtaacgttccaattcttttttcttttttttttttggctgaaagtaacgttccaattcttgcaaaagttagtttaagcattttacttaact

SEQ ID NO: 19764 - DNA, 3206 bp, Cannabis sativa
cagactaaaaatacaaacttggggatcatgattcatgctactggtccaaataatagttttactaataaatttaagatttgtgattaaaactcaatccccattcatgaataatcaacctgaaccacactaaaaatacaatcttgaaccatgattcatgctcctggtccataataaaaataaaacatctaaggtttatgatgaaactctatccacatccatgcaaatcaacctaaaccggactaaacacacaaagttggagaaaactcatcaagatttattaggaaaaaaccctcaaaacttatcaccttccattttttgacaatgaaaaacaaaaacatagtaataataatacatctaagatttgtgatgaaactcaatccccattcatgaataatcaacctgaacaagactaaaaatacaaccttggatcatgattcatgctcctggtccatattaataaaaataaaataataaaagaacgtctaagatttgtgacgaaactcaatccccattcatgcaaatcaacctaaaccagactaaagcacaaacttggagaaaccccatcaagatttattaggaaaaaccctcaaaacctatcaacttccactttttgaccaagacaaataaacacattattaaagaaaagaagtaccttgaagagcgcctactaggtccagaaggtcgcgaagggggagtggcaggagagcttttgagacgggaatggtttttaggagcacgagtttgatgaatgttggagttgactttgagagagaggtcaaatatgccaagcttttgcatcttctgaaggttttgtttgattctttcttctctggtctgctcgtagtctgaaatggtatcatttttctgggtttgagagtgttcatagttagaacggggaggaacattgagtggggtttgagggcttagacgagacatttgagaaagcattctctcaagtctcaaactttttgttgtcttctcaagtttctttctactctgtgatggtttgactgtccaactccaacggtcgaattttgaggatgaagcaaatggtgggtttattgtaatgtaaactacataagggaaatcttttgttagtatggaagggagagctcagtggccaaatgagctgtactgtttaaatgaaagaaaaaaaaaaccaataattatgtggaaacaattttttaatatttaacttcaattgttgcaagaccgcaacatggtgcttggcgctgggttagtaagtacggctaatttggatttttttttggatgttttgtgcggcgaggcgagacggtatttgtttggcgtttgataatatatggcaaagctgtaaggttacaaatttatcattatggaaagtaagtttaggatagtgatcaattttcttttgtcgagtgattgagaattatttttcattttgttataggcttttcatttattttgttggttgtatgttttcttagaatcttgtaattttgctatttataaatgtgattagtggacttttactcgtagatagttcgaatgtattattcatttcagtacatatattttgtaatgattgtgaggtcaaatttgtatttcaataaacatttttaatttaaaaaaaaaaactaaaattattttattaaagtaaagattaatattttttttttttaatgtttcagctatatagtatgtaatctatagttaataagcttgttaagctagatttttattaacaataaataaagttttgtaaataaaaaataaatacttataattaataaataaatatatgtaaaatacatagttttttacgtagttttataattaaatttacatacttcacgagtcaatattatttttgaatatttcttgaaaaaatattttgtgttatcccaaatcttgtttggatgacgtgtcatgtttctttaagtgacacgtaccgtgacattaatatttggacgaaggaaagatccttatagaatcttcgcccaaggcatatgctcagtctgatgtaataagagacgagcaatgtaaaactcactgcacagacgaaacgtaggttgacctggttggagagaagaggtcgaaaactcgtatgatctgacaaagggaaaaatacgtgacagaatgcatcaaagatagtttcctattttaaatgtaatcaagtcataatataaaagaatttccatatatatttctcatgatttaagaaagtcatgtattccctattttcgtagcttgatagcttttgggaaactaatttttatattgtaaacctcttctataaatagtggagcgatttcattgtgaaagaatctgaaatcatttgtttgagagagttattacgctgttcattttttttgtaaagcacatataaaatctttccgagtagctaagaaaatcacatataaaatagaaggttgggagatcttcatatttaaattatatcgtgtagaacaaaccatctttcctttccaacttcatttttcgctttaaaggttgatcaactcgaactgaaacccgaacacgaaaatagtctccccacactcatataaaattctttaggtcttttccgataaaggttcctatatagttcgcaatgtcttgaactacttttttatatatatatatatatatataaaataaaacccactttcatctcatgcaatagcaaattcaactcgatcaaatggggatcctttccttgtttgactcgctcaaagatcaaaggaaggcgatcaaacgtccatggactatcttctaccaccctagtaatattaatgtcatgataaaactgaaataaaaaatggttatgattcaattctttcacatacagcgtgtgccctagttgccacgaagatgtcattttatgttgcatagtttggagaatattaaatgtccgatttgtgagaaatcatccaaccaaacaccattcctcatcaataacagatagttcttttcatatcgcaacactgcttcctcttcgtcctccatggcaaaaccctcctacctttcctcaatccctatagtgcctcgatcatttaaagccatacgacaaaaaagaacagtcttaaacagtaaacaaataatcacatagaactcatacaacaatactctcataaaagaagacacattaatatgacctacatagggtaattttgttgtagtcaaataattaattggttgtattctgaaatctcaaataaataataata

SEQ ID NO: 19765 - DNA, 5597 bp, Cannabis sativa
gtggtgcaggtaaaggcaaagaaaagctagatcaaccatgaggtgacagtcttctccagcaatgtacatattgacctcgccggcctgcgttctaggttgtcaggagttgttttgagctgtatctattgtgtattttgcttttatgtttttgaggcatcattgtatgtagttcttttgtaaaattttttataacatggattcccagaacacgcttttttatgtcattttaatgtttgcttttagtgctttattttagtcaatttttttaatattatcacggttttagaataaaaaagggacttcttgggattgaggaaaccagatataaagctggattagtggctaaggggttcattcagagagaaggcataaatttcaatgaaatcttcacaccaatagtcaaacaagcttccattagggtcattatgtcactggctaatgttcaagattttaaggcggaacagatggatgtgaagacaacctttcttcatggtgaactagtagaacaaatctacatgaagaaaccaaaagaaagtagtgacaaacaccaattatgtttgcttaagtctctatatggtttgaaataagctccaagacaatagaacttgaaaattttgatgaatttatgtacaaaattggtttcaccaaaagttcctatgatccatgtgtgtattacaatagtaagctctacctctttctttatttggatgatgtatcattagttgggaaaaacaagagtgatatagatgaaataaaactcactttgatattagagtttgacatgaaggacttaggtctagtaaaaaaagatattaggaatagaaattgaaggaacagaccaagatcattgatcctcacttaggtcctgtaaaactaatttctacacctttagctggacatttaaagttatcaaaagatcaatgccctaagacagagaaagaaagagttgaaatggatggaaagccccatgctagtggagtaggaagcttgatgtatgcaatggtttgcactagacctgacatagcctatgccatgagcatagtgagtagattcttagatgacccaagtgaagagcattgggatactctttaatggatcgtgaggtacattgttggaactttagatgttggactgatatacagctacaaattcaaaactggaaatgatgtggtgggatatgtggactcagattatgatggctctattgatactagaaggtctctaacaggttatgtctttagaattcaaggtggatgtgttagttggaagggaaacctgtagaaggttgttgctctatcctcagtaaggcagagtttatgaaagacatagaggaaattaagaaagaaatttggctaaaaggatttaattcaagcaacatcacaatttattgtgataatcaaagtgtcatgcacttgatgaaaaatcccatgttccagaaatccaagcacattgacataaagcttcacttcattagagatgtgatcaattattaagagatgaatgtcaagaacatcaagatagatcataatccagaagatatgttcaccatgttcaccaaactagttactcaagctaagttcaagcattgcttgaatttggtgaacattggaagagatggttatgcctctttatgattcattcatggagaattttagattagaacaattattcaactcacccaaagtgtcaagctacacgatcaaggtagattttttgatgatgtgatcaagtcacttgccacctaagcaaccaactcatcaatcggataagaagacagttgagttagttgtcttagctgaatttctctcttattttcacattgtattgatgcctatataaaattttgtcaaaataattgtaagggttaatcccatcattgaaaaatagagagagattgagaggtgtcgagtgtgacaattgagctccaaaaactctaagtttgattgtaaagttcttggacaaactttttaatgctctattaaaattgaacaaagatattcaaaacttgtgtggctttgaaactattcatacaatagactgaatgagggttgcaaaacttatggtggaaccacttaaaatttcttgtgtttcatcttttttagttcttagttttcaatttttgtttcttagtttttaatttagattggtgtattattttagtcttaatgtttggtgaagtttttcactacaattatgatggataatttgtgttgctgcaataaaaattctattatattgtggttggagatgattttttaaggattaatgaaaaatatcatataaaaaaaatacatggaaattttttaatttgttaaaataattttgacaaaattaaatatatctctctcatattaaatgtggctatctaacgaaaattgttggtttaacgagttttttttttattttttttcgttaaagttaactgttaaaattaatacagttaaatcaatcaattaattattttatttaagaaaaaatacttttaaatatttaaattcaattagtatcaacaaaattaaataatcattttttatataaatcttaatttaaatgtaaattagattttaattcaattaactaatcatactttaaaacaaatttattagttatattattaaaaatattcagatttatttacttattttattatttaataaaattagttagatatattttattataaataaatttaaaactagattgatttaaaataatataattgaattgtattagatttaattttattattattatttaaattaataattaagtaataacaactctaatacaattttaaaaaatatatatattatgttactaatacttagtataaatatatatatatatatatatatgtatatatattttgttaattcatataaaataagtatttaacaacttattatctttttgtgtgcaattcatataaaaaaaaatatatatctggtatgttagttataaaatttttgtaccttataaggtataagtgtaatatttatgctatattaaacgtggcaatataatataaagtattttttattttatttatttaaatattagaattcaaatttaaacttgttacacatatctttcttatcttttatcacaacgttacaatttaaatttaaacttactatatattcctcttatttttatcttatattatcggatgtccccgaagggacttttatcttatattaaatgtagttatataatataaagtattttttttaatattgtgatttaaatttaaacccattgcgcatatttaaaaatatctttctattatcatttttttttacctaatttacatatctaaaaaaaatatttttctattattttttaaaaaaataacaaaataagaaagtatttatgtgtcttaaataatcactattttgatgtcgttacctattacatttaccaaaaaaatatctttctattattattttcttttaaaaaaaaaatgtatgatatttctaaaaaaaaaatgaaaaaatattataaaattaaaaatgttatggctaaattaaaattataattaacaacaaaatttgaatattgttatgtttgtttttcttataaataacacttaaattaaattttttaataaaaaataatattgtttattgaatcacccaaaaaattaaaaaaaaaaaaaaagctaattatacaacaaagaatatacataactaaaatacaactaagtataatattaatctagtaatgttaataggagtcttattttgtacaagtaaattacttttataatcagctaatacttcattcttttggtgtggcatcatagattatgatatttaaaaggatattgacaccacatttattttgtgattttcttttcattggtgttttcattactattcttaaatttgatcctacaaaagtttagtctattggattagaatctctttgtgatcaaacaatttactcacattccaatttagttaaattatttgttagattcatttagtaattataaaaaattgaaatttcaatatattttcagtagttatatgtttaattttgtgttgttgcttaagttatttctttttgaaagtaacgagttaataaaatattttgaaaaattaattttaaaaagtatatgatgtttatgctattttcaaaaataaatatgaaccaaaactttttttctttttcgaaacacaatttaattgaaaaatattattaacataaacattcataaaattacacacaacaaaaacacaaattggtaagaaaattatgaattttttaaatttaaacaatgtattatttgtggtcatagatataacgaaattacactacatatcttttaatttgatgtttttaatttttaccctcttttttaaaatctattatggttacctatttttcaatcattctacaaattttaccgctatcacttcacgataatttttattcttctttaatcaaaaaaatttctcaacttttccataaacttatacatccatatacaaagaatacaaatctagaatgtttgaaattatgtcttagttatgtgagtgtgtaaggataatttgggtacaaaaaaaggtatctttgaattaaatttaatttgaaggtaaatttagtttgtgtataaaaaaacaatattcttcaacttctccccatagatatagactaacagaattactatatggtgttaaagtttaaaaaatgagtagaatggtccatattcttatagatggtgttaaattttcacatactatcaatatgagactctcttacattttctccattattgataattaggcagcataactgcgcgaagcgcagccattatattaattaataaatatctttttaattaatgattttttttgttttaataatttacagtcactacattaagttatgccgcaaatatctttttattgtattataaaagtaaattaatttttatattaattttaaagtagtaacgaacaatgattagtttggcaggatttaaaaattttattaataattataaatttcatattgtattataaaaaaatatacttatatatgtgtattaattttaaagaaaaacaattataatttgtaaaaaacttaattattaaagatgtaattatttatcaaaataggaacatattatttatttttatatattaaataaaaacttaaaatttattgggtaagacataagtcaattacccttaaaagaaaaatatttcttagacaaatgaaagtagcataataatagtgttatttataatctacacggataacaccttaaggttacgtttggtttgaggtaataaaatggaatggaatgaaaagaaaataaattttattcaatttctttgtttgatttttttttaaagtattggaatgtcatttttattctggatatgtttttattatttccaacaacataatggggtatttattatgtgagtttgagtttgagaggatagagtcggaaagagtagactttgagaaaatatgaaacctagaggggaataatattaccactgttgaccgagattttcggcaactactaaaatataattataatattgagctataagaaagtgagagaaggatttttacgt

SEQ ID NO: 19766 - DNA, 5572 bp, Cannabis sativa
acttgattgaagtctcatgggataagattcgtgaatataaaccacaacctgtttctagttgtggtgttatgaaggttatacttgaatatcaagaagaggatcgacttcttgagtttctagttggattaaataattctttcagcaatgtcagatcttagattctaatgagagatcctcttcccactaataacaaagcctatgcttcagtcgatcaagaagaaagacaaaggaacctaacatttggatttgttggatcaggtgtgtctagtgatgctgaaaattcatccaacaactctactggacaatttgttggtgttgtacagccttttcgatccaagtacaattgcacacattgtggtatggatggacatccttcttgtgtaaaaattcacccattaaataaagatttgagttttcattctaattccaattctttattccattgctcaatctgtcactatgctaaagaaaggaagttaccattcatttctaatcgtaacatttccaagaattgttttgatcttattcatgttgacatctggggtccctacagtactttgacaacttagggctataaatatttcatcgcaattgttgatgattgttttaggtataccttgatcaatctcatcaaatagaaatttgatgcacaatctatcattttcccagtttattcaacttgttcaaactcagtttggcaaagttattaaaggatttagatctgataatgctaaggaactgcaatttaatgaattgttttgtaaactagggattgtgcatcatcactcatgtgtccaaagaccacagcaaaattctgtggttgaaaagaagcatcaacatcttctcagtgttgctagggctctcttgtttcaatctcttgtttcaatcaataggacacccacacgtaatctcaaaagtaaatcaccttgtgccattgttcattccaaacaatatccatataatcatttaaaggcatttggccgtcttgcctgtgcatttaccttgagtcaatcaagatctaagtttgcccctagagctgctccttgcatttttcttggttatccatcaggaatgaaagcctacaagttacttccttgaacacaaacatcaggaatgaaagcttttccatcccagagatgttcaattcatgaacatatctttccttttgttacttctaaacatcttcctactgcatatgataactttttctcccaggttcatgtcctttctcattatacccctaactatcctgaacctgaatttgcacataattctacaccagcgcaggatcctgcccatgttattttacctgaacaggtttctaatccagtaactcctactgaccaagttcctgctgctgttattgagtctgaacaagtccctggtccttttgttgttactagaacaggaagatcaactcataagccatcatacttaaatgactatctttgtttcttggctgctaatgcttttactccatcttttcagggcaaatctgttactctttatatatcccttgtctgaggttgtgtcttatcataggttgtcacctactttcagagctactgtcttggccatttcgagtttgtttgagcctcaactttttagccaagcacatggtatccctgagtgggataatgccatggatactaagatagatgctcttgaaaacaatgatacttggattgtggtttctttacctgaaggatagcatgttattggttgtatgtgtgtatacaaaatcaagctgaatactaatgggagtgttgagagactcaaggctcggttggttgctaaagggtccaaccaacaggaggggattgactacgctaatacttttgcaccatttactaagcttgtgactgtcaaacgtgttattgcttttgctgcaattaaaggctggtatgtacataagttggatgtaaacaatgcatttttgcatggtgatctcatagaatatgtgtacatgactcttcctcaaggttataaacctaagggggagcttccacacaaccctgtttgcaagctaaagaagtcattgtatggtttaaaataagctttgagagagtggtttgcaaagttttccactaccttgtttgatgagggctttcatcactcagctactgatcactcattgtttataaagcaatacatccaatcacttcatattctttttggtctatgttgatgatgtcattattgttagcaatgatctacaacagttggaggcattgaaaatcgggttaaatgcccgattcaaactaagaaatttagggaatcttaagttctttttgggctggaaataactagattagagaaagtcattttttgtatcacagagactatatgccttacaacttcttgaggacttgggacaccttggatgtatacctatgaacacacctatggaagccaattttaagcttggataagataaaaaggaaaagttggcagatccaactttatacagaagaatcgtgggaaaacttcagtgtttcaccataacaaggctaggcatttcatactcagtaaatacactgagtcaattccttgctgtccctcgtgctactcacatgaatgcagcagttagagtccttcaatatgtgaaagcaaatcctggacgaggaatttattttgctcctgattctgaagtaaaactaagagcctacacagacttggattgggctgcttgcccagacacgaaaagatcaacaacaggtttttctattttcataggggattcaatcatatcacggagaagtaagaaataacacacgatttcaagttcttctgcagaggcagagtatagggcaatggcaaatacaacttgtgaaattgtgtggctcttgtctattctaaaagaactcaaggttgatcacaatggaccaacattgttgtattgtgataacaaatcagcacagcatattgcaacaaacccggttttccatgaaaggacaaagcacgtagagatagaccgacatttggtgagagaaaggtccaagaagggattattaagattgttcatgtggcttccaaggagcaactagcagatatatactaactaaatctctattccctacgcagttcaagtatattaaagacaaaatgggattgaagaatacatattgcccatcttgaggaggagtatatcaagttagttaagctttgtattagctagttattagtgagttggtatcatagagttggttagttgtgattgactaactaaagctactataattaagtaactcatttgtatgctgtaacagatttgaacattaataaaaattctgttccatttttttcttcctctgttttcttgttttctctctctcgatggattgctaatactaagatgtattctctctatttttctctcaagagcctcacactttatttttggaataacttgtggtagttgtgatgggatgaacaaatgcaaatgagtgagttctattttataagcttccttgaatgtataaacaatacacaaaacatcattgaatgcatcgtatatttatactttttaagtcaaaaaatgacttgtaatttttcacatgattgaaaaacaacctcctttcatagaaaaaagaaaaaacaattgcacataatttttgttttaaaatagggtagggtaggatgtgatgtatggacaatatatacatatattgtttttttaagaaaattatcttcatattaattaagaaagctattgctaataaaaagaatagccagtatttgagaaggtattaatgaagccttttccaaaacacaaatcaagaatttcttgcaagaaaatatacaatttgattttgcatatcattttatacttacagtcggtatcaactttctaattcctgaagattgaaaagtgtattatatacgtacgaaaaacaaaaacttatatactgattaaaataaattaaaattattcaataaattcagaaaactggcgcaatgtttaatttggtatactagattataattttagtgctataaagacaaaaataatgacgccataatctattgattaaaaataatataatatataaaaatttccgatgtttatatatatttactgtagccaacagcaaagtttttgtgagtaagaaattatatggaaacctcaattctattatccttcaatttatttatttattttactgtttttgctattgccccttgtgagggaattttacttaaatattctgatatcaaaaaacttttacattcataatttcatatatatatgataaaagaagataatgatacaacaatttatccaaactattcatttagaaaaatatggaaaggcgcgcttatgatactaccataattaatgagagctccaaacacacacacatatatatatatatgtatattaattagtttgatataaaaagataaggaattatttagtgtaagggtttatttggtggactttagttgacaagactgatattaagaaaattttaaactcaaacacgtatttaaattagttataaaccatatataaaagttgaattacctctcatgcatttagtttaaatatatacaaggatataaatcttcctgaaaaaaacttaggtttacatgattgtcatttgcaaaaatccaaaccagataataaattcctcataagagtttgaattacctctgtgtacgtcgaaggtgttcaactttttctttcagctttagatactcttgataggtactctgtatgtatgataatgaccacttgaaattggggtgttataaataaatagcattaatttctaaattctgataatagtacagcatacgggtacatatatatagagacaataataaatatcataaagttaacttatcaaaaaaaaaaatatatatatcataaagttatactacctcacgaaaacgatacatatatatattaacaaattataggatcgggttagaaggaataatgatgtgtgtacctataaattatacacaaatatagagatccagtctaaataaaaataataacttatataattaccattatgtgcacatatccctactattattattatatcacagatgtataagtacatattgtatatattaagttagagaatcttttttatatatatatatataaatatatattttattgaatacatctctaacttatatttgatgagtagaaaaaattaggctctcgttaatacaataaaagctgttctaatgttatttttgccaccataaattttttgaaactttcctaaaattaatagtatgtttagaaaaatatttcactgattaattaggggaaaggaatactctagctattttttttttgaaaaaaaaatacatatgcatgtaagtatatgtacgtacctctatgtcctttcctgatagtagtttgctttcctgttctgcatagcagcatttttcatacctctcaagtgtcttggtgatgctgaaaaatatttaataaaataatacacgttataaattagtttaaaactagcataattaagctatatgttgctgtccatggactcatactaaaatgataatagtagacagatatttatatatatatata

SEQ ID NO: 19767 - DNA, 1433 bp, Cannabis sativa
ggtgcttgtggatatgcctatacaagataaacccccttcaagcattagtttcttcaatgagaggaaacaactcactgaacaacaaattgaatatgaatggcttccaacctcttgtgcagcttgtgggttacttggtcacaacattagcacttgtgctaaagataaagggctgacttgggtgaaaaagaataaaacagttcaagaaaagaagggaaaagaggtaaacaaaataactaatgatcataattttgctctgtctacagagaagactttagagaaagagggaaaaatggctaagactatacagggggatataaaagaaggatcaacattggctgaatgtgaaggtcaatggattacaccccgaagaaagggtaacaaaaaacagacagcgggtaatggagaaacaactgagatgcagaaagccacatcaagcaacacttatgaggtcctccaagaacctttggatgagattgatccgttaaacaactctatgctggatggagtggtgtaacataatgtgttggaatgttcatggattaaataaagtcaataaacaaaaatccattttggatgtttgtcggttgaataaggtgggtattgtagcgttgttagaaacgaagatacgagggggaaaaataaaaaaaaatgattagtaataactttcccaactgggatcactatacaagttcgattgtagagggtcgcatccttcttctttggcaaagaaagtttgttcagattgaagtgatagatgaagatgatcagttgctccatagtaaagttaaaattcatggtcttgatacgggatttattttcacagcaatctatggcaagaattccattagtgagaggaagcttttatgggataagttggctggttttgggatggtaaatcacccttggctcataatgggtgattttaatgcaatgtttcattttggggacagatcaggtggcagattggtgaagcgcaatgagattaatgatgctcaaacttggctatctataggccaggtcactcctatgaaaagctctggggctgagtttacgtggtccaacaaacatgatcccggtattagaattcattctaagcttgatagagccttcaaaaatgatagttgggtatctttgtttccttcaacagaggctttatttcaatgggaaacttactcagatcattgtttttgtttaatcaagaacttggaaataaggaaggtgggcataaaaccttttaggttttttaaccattggttggatcatagtcggttcaaagaggagatgcttcttaattggaacaagccggttaaaggagagggtctttcaagaataatgggcaagcttaatcgtctgaagcactgcctgaaaagatttaacaatgctgagattggtagtattaccttgacattcaatgatgccaaaaacaagtacaa

SEQ ID NO: 19768 - DNA, 2570 bp, Cannabis sativa
aactgaaaatgaagatgagaaagaaagaaaagttacctgtaagagagtggaaagagagaagcaagcgatgtagtgaggaagagaggttgtggggaaaactgagttgaaatcggagatgatgtgattgagaggtcgttggtcggctctgagaaaagtgtaaagcgttttcgattcgtcggcggtgagaaccatcatcttcttcttccgattgaaattgaagttggaattcatggctgatttcttctgcaacaaatccgaaatccctaatcgaaattcccaaattcccaaatctcaaatctttatgaaccccaacaggaactggtcttttcagtttttccccctttatttattttgatccaaattcccaaattaatttaattaaattaaataaagtttttcttttatttattttttgaagaaaaataaaggttggttttttatgaaacaaaatcaaagataattaatatcaatatcaccttttgtagattatataaaatctaaatattaattaattgccttttaacatatattctttaaattttgttgttagatacagtatcatatcatatacaccttttatttttttttggaagaaaaattaataatatatgttggaaaaagaaaaaggttttaatactataaaaactacaaattgtatatgttagtgtataatttttttttggttaagaaaataaatgaggtacaattaaattataagatgtattatattttaatttctttgttatatatccacatagaaaaagatgtttttttcttaagaaaagaaaaagatgttagaataatatgaatttaaataatgactaaatgagagaataattgtagtaagatttaattattaaatattttaattatttaatataattttttgagctaattgttaaaatattttaataatcaaacattaataaagtattttacctataaatataatgtttattctgattttaagtaacttgatctaaaagagtaaagaacttaaaaatttgaatactcattctaattttcaatctaaagttgtctcataattaatagttaaaggtattttaatccttttatcaattttatatgtatgtttaatataaattttaatttcatttataaatttttaacaaaaagaggtttgatgaggttaataatgagtatgagcttagtaatagtaatttagtaaattagttaaagtgttcaactcaactcaagaatcactacatagtgagatgagctcacttgtgttgtaagagaatgttatatattgtaaagtcaactaattttttctttttttctttttaaaaaaaaaacataataattatataaaaatggggcatatgtaatatattcattgcggcactttgaagcaaagccaattcatttcatttagtaaataataataataataataataataatgcctgccattttggttacattattacatatatttcattgtgattttcaacaaaaaaaactcactccttggccttgcacgccagctatgataatcatcatcatcatcaatttactatttattttttattataatttaattattttaataaaagaataagatgcttaattaatataagtatatttaatccaacattactagattacaatttacatgtggtatgtatgtatagataataagcataggtagattattactttacatgtgtttgacaacaaaaatgaaacatgtctaatttgtcttttttttggtcatgtcatattgtcatgtgccttagtataagtacaatcataaaagtaaacataaagaaagaatgaaaaagaagaagaaggtttcttcttgtatgttgtttgttgttatttgttttgaataaataaataaaattcagtttgtttttggaaaatgattgtataattaaatttgtgtgtaatttgaagtaattatacaattttatatgttttgtgttaccatgtaattacattgtaactgtgtaattgaaattaattgagaggaattttaactactgtcttcaattttgatcactcatgaaaattgaatgtaattactaaaaaaaatatattttttatataattactaactattttattaaacaagaaatattataaattcataagtaattaccaactcaaattatattttaaaatctaatgggtatatttagaagcaactatctaattattagaatggtagtaattacattatattgtgtttggatatgagataattatatatgaatttttaatattttgtttgataaaatactttatacgataatatttttagtagataatgtttaatatagaaagtttttaataattagacttaatttttatggagctataaaaattggagaattggagagttaaatggaagccctcaattacttttaattacacaattacagtgtaattacataatcaaacaatcattctaaattgtataattatctcggattacacactaatacaattatatcttgagtttctaaacatccctaattactagactgtataattaagactctaataattaaactaggtagtaattaggctaattaggatttttg

SEQ ID NO: 19769 - DNA, 4877 bp, Cannabis sativa
aacatggcgacagtaggagctcaaaacaatggcgattcatcgaacctgggaaatacagcaaccgttaatcctgctactcgtggaaatcgcaatcgtgcgacagatgagttctcccctgtgcatttctcacataatctttcagttaagcttaacgatcacaatttcttgctttggaaacagcaggttctagcagcgattcgtggaaatcgtctgctaaaattcatccaagatgttccccctcctccacagttcttgaccgatgcagatcgtgcctcaaacacatacaatcccgagattcttgactgggatgttcaagaccagctgctggtgtcgtggattttgtcctcaatgtctgaaagtttgctcacacgaatggtgggatgtcaaacagctcgccagatctggtctactcttgagaagcactttactttgcaagtatcatccaagatacttgaattcagaaccaaattgcaaaatctcaagaaaggtactcaatctctcaatgattatttgcttaaagtaaagcagcatgtggatttgctggcatctgttggagaagtcttgagtgatagagatcacatagcagccatttttaaggggcttccgagtgcttatgacacctttgtcatatccaccaatactcggattgaggggtacacagttggagagattgaagcattacttcttgcctcggagtcacgaatagagaagacggatcaagaacctgaactaaatgctaatcttgttgtttctgatgcggaccagcaacccgaagcaaatgttgcttttcaaaatcggtcaagaaatggctttccttccagaaattcttttcagtttggcacctatgtaccaaattttcccaatcacagaggcatctctccctctcgaggagctcaacacttttatccaaacaactttagtccaaggggatttcactaccaaatgccccagtacaacccatctcagcctcctcaatttaatcgaagcagtaccaataccagtaccaatagaggaggcaaattcgtccctgcttcaggtcgccccacatgtcaactttgtcataaaattggccacacagtagtggactgcttctaccggttcgacagaagctttactggtgctcaatcgaacaatactgcagctcctcaagcaaatctgatgcaaactttcagccacagtgacagtaattggtaccccgactcaggagccacaaatcattgtacaccagatgctcaaaatcttgcttcaagttccacttatgagggttctgaacagctctttgttggcgacggtacaggtttgtctatcaagcacattggccattcatttctgtccaatccatctatcccctctcctcttttattgagcaatttacttcatgttcctgcattaaccaaaaatctattaagtgtatctaaatttgctagggataataatgtgttttttgaatttcaccctgatgtttgttttgtcaaagatcaggttcatcacaaggtattattgactgggacttaccagaatggcctgtattcctttgattcctcacaactaaaattgatggactctcccatttcatcaactgatccaagcagctcccttccctcccaacatgagcagccccaaactcttactgccactgcctctatttcatcttcacatactgatttcagacatttacaaacaacaacacatatgtctcattttgatatttggcacaatagacttggtcatccttctgaaaaggttgtcaagtctgtgcttcatgcttgtaatctttcaaatatcaataaaagtaccaattctatatgttcagcttgttgtttaggtaaaatccacaaatttcccttcccaaaagcatctcaaaccatgtacacaactcctcttgaattggttgtttcggatttgtggggaccctcctatatcccctcccaaaatggatatagatattatattcattttgtagatgcttattctaggtttacctagatctacatgcttaaaaccaaagatgaggcactaaaaacctttcaccactttaaggcagaagcagagttacaacttggcaccaaaatgaaagcccttcaaactgattggggtggggagtataggtcatttaccaacactcttagagaagcaggaatcattcatagacatccatgtcccaccacacatgaacaaaatggcctagctgagcgcaaacatagacatatacttgaaaatggccttaccttgcttgctcaggcctctatgcctttaaagctttgggatgaggcttttcggacagcagtgtatatccacaataggctgcctacacccgtgcttaaaggaaaatccccaattgacactctttttcacatagcaccagattacacctcatttaaaacgtttggttgtgcttgctatcctaacatacgaccttacaataagcataaacttcagtttcgatcttccccttgtactttcattgggtatagtctaaatcataaaggatacaagtgcatggattcctctggtcgtgtctatatttcacgtgatgtcatttttgatgagcacacattcccctatgcatcacacaatcatcctcctatcactactgatataatagcatctttttatccatctgctatcatacctactgtgcaaacacataagtatcactcatcatataaccatactcctggtagttcatctcattctatgcaggaacaaggtattgtgcttgatacacaacctgacccgatcccaccaacaattgctactccaagtctgcaacatggtataaatgctactggtgttacaaataacagcaacaacaatgacactgacactcctactgctgtgcctcctgctgttattagccattccaatgaagctgacattcctaccgtgcctactgtcccagagttgtctactgctattcacactggcactggtacttctcataccagcaatgtacctgctgctactatcccagtcaattcccacaagatgcaaactcgtgcaaagtcaggcatccggaaattaaaagcatatctggtttttcaggaaccagttactttgaagcaagctcttcaaagtgctcattggaatcgtgcaatgtcggatgaaatggtcgctttaaagaaaaataaaacatggacatatgttgttctaccggaaggaagagaggcatttggttgtaaatgggtttacagaaagaaagaaaatcctgatggaagcacttcaaagtttaaagctcggcttgtggcaaaaggattccatcaacagcccgggtttgactttactgaaacctttagtccagtagtcaaaccagttaccattcgggttgtactctctctagctgtctcacggggttggatcatcaaacaattagatgttaacaatgccttcctcaatggcgatttgcatgaggaagtatacatgcaacaacctccgggatttgaactcccttctgctccacatttggtttgtaaactacacaaagccttgtatggtctcaaacaagctcctcgggcttggtttgataagttgcatacaagtctacttggtcttgggttcacttcatctaaatcggacaggtctcttttcactctacatacatctacatccactactctcatattagtgtatgtagatgacattattgtcacggggagtgactcagaactcattaccaaacttgtgcagtcattaaattctcaatttgctctcaaggatctaggagacttgaattattttcttggcattgaggtacaatccactccacaagggctgcacctatctcaatccaaatacattcgagatcttctaatcaagtcgcaaatggaggatgccaaacctcttccaacccccatggtcagtggtttaaaactctcagctcatggctatgaaccgtttgacaatcctcaactatatcggtcgattgtgggtgccttacaatatcttctcattactcggccagagcttgcctacagtgtaaaagtttgtcagttcatgaaaaccccattacaaccacattggcaagccgtcaaacgaattcttcgatatcttagtggaaccatagactatggtctccatattcattggtccatgtccactgatcttgttgccttttgtgacgctgattgggcttccgatccggatgacagacgctcaacttcaggctttgccatttttcttggaggcaatctcatcacttggcaatgtaaaaagcagcaaactataagtcgatcaagtacagaagccgaataccgcagcttagctaatgttgtatctgaactcacttggctgcactctctctttactgagcttcagatacctcaatctcagccccctactgtttggtgtgacaaccttagtactgtcttactcgctgccaatccggttctccatgctcgcaccaaacacatcgagcttgatctgtactttgttcgggaaaaagttcttcgtaaacaagttcaagtaaagcatgtccctgccacagaccaactggctgatggtcttacaaagtcaatttccagtatcagctttcccatttttcgaaccaaactcacaattgcaagtccttccaattatgagtttgcggggaggtattagggatgtgtattctaagagttagttacaagttgttctggttgttacagagtctgttgagtctgttatttttctcttctttagctctgtatatactgggtataaatactctctcttgtactttgaacttgtgtaataacaatcaacacgattgatctttttcctctatctttctgttcctttcactctccttctctctactctttcttcttcatctttctctgcctttctattgcttttctccattgttgcagatatgagcagaagaactaataatcgtaata

SEQ ID NO: 19770 - DNA, 9216 bp, Cannabis sativa
  modified_base (51)..(55): a, c, t, g, unknown or other
  modified_base (8703)..(8706): a, c, t, g, unknown or other
  modified_base (8829)..(8833): a, c, t, g, unknown or other
  modified_base (9149)..(9164): a, c, t, g, unknown or other
atattgtatgttatggtccttacattcctatgcatgttgtagatggtgtannnnntataaagaaatatgatgcatatgatgaaaatgataaaaatatgatgtctaagaatgctatggctaagtatgctttaatatgtggatatgatagagatatatttaaaaattatgcagggacaggtggagccgagtctgaagttgcgagatcgggattgccaaagtctggaccggtctcagcatcagcatgctggccggcctagtgaccaatatcctgcccgaccaccccctcagtaggtgtgctagccagctcctcgtcatgatctcctgataaagacccgtcttgataggaagaaagcttatccgcttccgactgactctcaaagagcactcttcctcgtgccaatgtaagctccacaaaagacttatttcccatgtatgatagtttggccttgagattatgcagcttgaacttaacatactcctccttgatggcctactggccctctatagtcactttcagtttcttcttattctcagcaaggtcagactacaatctagagataatggcagcttgggtggtattctccttgttcctggcaccgagcatggtctcttgaccagaaatcatattctgtctctcagtaagggaggcctctaggttcttcacctgctctcaaagggcatccaaggacccccaggagctatcacatactaaactcagcttcataaagccctgaaaacaaaagaagataagatcagtgtcaaaactatagcaatggtcagccatctcttctttgggactgctatggctggctagcccctcatacgaacatctaatgccaaccaagcacatgcaataatccccatggccgccagcttatacattgccagaaaatgaacgaagctaaaagtacaacttaccagggaaatgtcctaaaggccagtagagtagagctagagcctgtatgtatcaccatcaccaagctcctttagctccccatccataaagggaagagctctctcaatctgtctatgggatgcctcaatagccctttcccctgcagccaaccctgctcctctattgagcctttgtacaccgtggcctgtggcccatatcacatgctacttagcaggtgcgagccctggaggaggaggaggaggcagtgacaaccgagtagtgtccctactgcaagaagtacaggccaccttggccctcactcgtcctgcaggctcatctaaaggtccccgataagacctctcatcttggaagacatattgcaaaaaaaagtagcaaagtcaaaaagaaagcataaacattcaatgcaagacaaaaatatggtgttatcacttatcaaataccatcatcatcaaagagggactatcagagtcctcgacaaccgccttgcccttgcctctagatgtaggcatggggcgagtaggtcccgcagaagcttggcttgtaggcctgatccagagagaagtgtcaccaactgaacccctgctagagccctctccttcctctctagattttgccctatgcgagataaaggcaactcatcatctaagtcaccctttccaataaccgagactcctgcaacttcgagagcatgaggatataaaccatacttccaaaaattggccacactggtcaactggattaaatttctctgctttgcgagagagataggatgtggttggccttatccgtaaattgcaaagtagggatagagcatcgaaagaatggcaccgaccagaattcatactcccgatcccatggagaccataggcgataaagtacttcttggcgtatccactgacctttgacatgggtgcgcaattagtgtcacccaaccattggtgactgatctaactgaagtaaaaatacctagttctattctgctttggggctaacttcaaatcaaagtagtatccgatctcatagggagtacgctgagaccagcctagctccctttataaggcaaacatcgccgagagatacttaatgctttttggcatgagttgtgtcaaacacatcccaaagtatgcagtaatgtccaggaaatattggtgaagcgatagcactgccccattcttaaggtggtgccctgaccacgccgacaaatctaaagggaggcatgcgcccaataacttctatggtttatctcataatggagacccctcactaagacacgaccaagaatcttgctaaaggcctcatcgaaaagagtagaagcaagagagacccaactgtctccctatgatctcgtatctagtatcttcgattcaaaagactattctaagacatggtccaatcaaagctctgaaggctcaccaagcctatttagcggcttaccattggtgtcataatgacccaatggacattttgggaggaaaaaacaagttatgtacctccccctcctcactagtacaacctcctcaaggttggactctgcattgggactctcagccccctaatctacctctggaccaacattaactcagggttgagaagtttcctcaacgatcttgactcgacctcttgtggctgcttgagcaacctaagggtcacacataggcactctatgaccagtctgctttgtgctggccataatcacataaaactagcacaaccaccacctctcctattcaatacccagtgtgacctgcatggaaggaataagggtagatgagaaacctgacaaagcttcaaacatattctaatcaacaataatcaatgatatcttctaggtaaagcacaatgtacaaggtctatcatcgactaagtactgtcttaagtgcacttactaagacatgtagtaagttttaagttgtataattgactataatggactcactacctagccttatatagagtttccaagagaaaccacgcataaggccacagttgtatattcctccaaggccgtcgtgagatcttaaccgaggtcaaaagagggagaaaaactagctgcccacttggagccttggccttggctagccagggttccaagccttagtggccagccagaccctaagatctagtctagtggctggccaggaaccctaattctaggcataggccagccagcctagggggtacaatcccttggctgaccagaccccttgatagcctcccttggccagccaggcctcaaataaggcctccttggttgaccaatatctgcgtggattagaactcatattttttcaagaactcaaacttgttcttcgtgttctccgtgactcaaagagctaagaatcacaaagaaggtcagatttagatctttttcatctaggaatcacaaattatgtatcctaaggctatcatgtagatcaaaataccaaaaggataacaatctaatgtaagaattaaagcatgttccaagaaaggaataatgttcatgcatccatggaaaaatcaaccaaatcatgtgaaatagtgagaatagaaagcttacccactataagatgtcaatggggaagaaggtgggaagctcggaccgtcaaaacgatgcaaaaatcctaggaagatgacgcttgtgggtttggcactctagagataaggagaagctttttctaatgcaaatttatagtgagagaaagtgaaaagtaaaaagtgagaagtgaaaaaggttttccctccaaaaagctcttatgtagtacatgtgtgaccatttcttcacttacttcacgtacacattaagaagacaactaaagcagttatttttctacagcaatgagatcaaacagtcaagacaaagtatttcaaaaggctaaaaaggcatcaacttttattcagcaaaggctaaaatagtcctgaccgcacttacatagctagtaaagtccctatcagtacatacatccacacagggacttaggggcaaatattatcctaatttttgacctcctgacgtggcatgcttacatggacaaaattagtgccatatgacagtacaactcaccaataacaaggccaagtcagcacctaagcaaatggagacaccaacactcaaacaagcatcaagtgacagactagctccctcacaagtactggccggccctatggccagccagtcttgggattgcaccatggctggccaacttatcgtccacaagggcatgctgggcaagaggtgttttgcagggtttcatgtgtacttctacacgtggataacaacctttagactacaaattgagccctaaaagcccaatgagatagctaaataatatccaagttcaagggtatttgggtattttgtaattaactaatataatattcaaatatctagggtttcaagttgtaatctagtgtttaggcttcttatataaaggccttaactctaacctagaaaacctaagctaagttaagcctaatacttgcctccaaactctaagtctaagtttgataacttatctcttattcacttcttctctcacacgcccatacaagcactatcacttgagatttgtcattcttgattcatacattgtatcattcaaggtgctatagtagatcctatttatagtgatatggattgtataaaccctcagtattaatacaactaaaagagaagtaggtccttacacactatcacaggtggccgaacctctataacaaatctgtgtgtttactattttttttgttctatttgtttaacaagttgtaagcatcagatgcatatgatcccgctatcggttgatcactttttgaggtcaacaataagtattctttactttagaattttgaaacttaaatatttaattaatatgagttaattaattactcaagaatcaaatatttttagtaagtgttagttaattccaggactttttaaacttaaatacttagttaacccgaattaattaattatttaggaaacctgaacgactaagttaaattaacttgagttaattatgaagcctaaacttctaagttaaattaacctgagttaattacgaagcctgaacttctaagttatataaacacaagttaattacgaagcctaaaattccaagtcaaattaacctgatttaatatgaattatgctaaattaatgtttaagtataataaggcaacggcttacctccggtttcttggagctccagttttaggtgatacttcctacttttatacttatagcaaatttagttatgttttatggaagaggtataacgctataatgatataatgtatactacccctaagtgattaagagtttaggcttttgatcacttgttttaagataaaactttgaaaagcagaaaatgaaatgaaaaattccttctttattcaaatggttcctgccttgaggcgtacatggaaattgaacataaaaaaaaatgtaaaaggaagctggccacccccagtctattgatagtatcagtgtaggtggtcaacattccatgctcttggaatttatgttccatctagccttctcaagtgataggtgccataaccaattttaccttgaactacatatggaccttcccagtttggtcctaagacccccactcctggctcctgagaggctggaaatacccttctcaaaactagatcaccaatttaaaatcttctacttttgactttggaattaaaatttttggcgatcttgtttttgtacatctggagttggacttgagactgctctcaaagttcttcaattagatccaaagattcttgaagtaaagcatggtttcgagtagggtcgtaagtttctctcctatgtgaatgcactatggaatcaactaggattactgcttcgtatctatatgtcatagagtatggagtgtagcctgttgaagttcttttggttgttctgtaggcccaaagaactcttgtaagttcttctggccattgtgctttgcaagcttgaagcttctttttcaaggttgtcttcaaaatcatatttacagcttctacttgtccattttcttaaggtctggccacaagtgaaaaacttttgatgattccgtgcttgacacaaaagttggtgaattgatcactatcaaactgctttcccttatcgaacactattttgtgtggaagtccatatctgcacataatgctcttgattacaaagtccaagcccttttcagaagttaatatattcacgggttcggcttcctcccatttaatgaagtattcaataactacaatggcgaatttgactcctttcccaattagaaatgatcccactaaatctattacctaaacagcaaagggccaaggactgttcatgaggattatctttgttggctgagctcttagaattttggaataacactagaattgttcacatttacaaacatattcagtgtaatccttcttcatggttggccaaaaatatccttggcgaatgattttcttggaaagacttggtccagatgtgtgatctttataaaatccttcatgtattttatgcaaaatagtgcttatctcaattccagcaatgcaccttaagtatggaatcaataatcctcttctatatagctttccatccatgattacatattcgggggcttgagaatggatcttttgtgaagcggttctgtcttccgagagtgttcctgattctagatacttaagtattggggccacccaagaagttgagtgatcaattgctaacacccccagtgtctccgttcttgtagtaagtaggtatgcaatgggaactagtccgtatctctccacttctggttctgtttcaaattcagctagcatgtctacaaaggaatttttatccttggggatttgtttcacagaatagtgcttaaaattttaaaatagctctctagtttttgctacgtaactagccatcttctctcttttcgtctggtactctctagacagttgattgacaaccagcagagaatcactgtacagctcaattttcttggcaccaacctttttagccaactgtaagccatcaatcataacttcatgttcagcttcattgttggaagctttgaattcaaattgaagtgcactttggagttgaagtttttgtggataaattacaataattttggctccaaaaccttttccatttcatgcttcatctacatatattttctagacttctagctcctaaattggtgtgtcaagttcgtcatttatccatgtgcattccataataaaattcgctacgacttgacctttaattgaaattcttggttgatactgtatatgtcaaattttcttggctccattgcccactttaaaagtcttcctgacgactctggcttttgcaatacttgacagagagggtggttggtcaatatcctgatagcatgagcttgaaagtatggtcttaacttctataaagcaattagtaagcgaaagaaaagcttttcaatcataggatatctggactccgcgcccaacaatcttttgctcatgtaataaactggaagttgtaccttttcttcttctcgtactaaggtgacacttatagcatgatctgaaacttctaggtacaggcacaatgactctccctgatcaattggcttggacaatattcgaacctttgttaggtgtgctttgagttgctagaaggcctctttgcactcagttgtccattcaaatttgttatttcctcaaagtacattgaagaaaggtatgcacttatttgtagatttggaaacaaatgttctaagtgctttaatccttctagctaactgttaaacattctttgtgttttctaggtgaaggcatgtctagaaggtctttgatcttctctgggtttgcctcaatgcctcgagaactaagtatgaaacctaagaagttccctaaagaaactctgaaagagcatttctttaggcttagtttcattccattcttctagataattgaaatagactattctaaatctttgtgatggctcatggaagttgaagatttcaccagcatgtcatcgacataaacttccatgttcttcttcagtacattcttgaacattttgttaaccattcactggtaggtagttctaacattcttttatccaaagggcatgaccttgtagcaacagattcctttgtcaatttgaaagcttgtatgcctttggtcaaccgcatgcattttgatttgattgtaactgaagtatgcatccatgaagcttaagatttcataccccaaggttgtgtcgaccatctgatcaatttgcaaaagtggaaagtagtcttttggacaagtcttgtttagatctgtgaaatctatacacattctccatgtataatcaggctttgggaccactagtggacacaactagttataactttaccattttatttcagtaacttatatttttttttctcaaattccatattttaagtttaaacctttaaatgttaaatttatttatttaataattataattaattatgaaataaaattaatatttaacttatttattaattaggccttacaaagtctcttaattaacaaataaaccctaaacactcttttattctcaattaagcccttgcttagtgaaaattcataaatgagacatagtctaatttagaattctaattagttaattaaaaaaaattaactgagtctacaagccaatattatctcaactagtgtggtgaccatgggcctatataatcaagcttctaataagtagatctagaatttaccgagtaaattttgtaacttattaattcctcatgattccacgatagattcaaaattgcactcttaannnnatagaatgctctatatgttccaaatatagataagctattaattatctattgttataatccaaaaaatcaaagatcctctatagataatttacattgagtaaggacaaatttaccgttctaccnnnnnatgtattttatccttaaaacattgcactccttgtaaatgatatttcaataaactaatataattactgaaataagtactacaccatttaatcttatttagccaagctcaaagaaaattattattttacttctatgcatttatagaaactatagattccatatctatgattagcgttcccactcaactgtactaccatgttctcaagatgtaagtattgggcaaatctaattggtaaactttaatgaacaactcgaaaagcacaaataacacagttgagattgaacctaaccatctcaggattaagatcttttgatcnnnnnnnnnnnnnnnnatattgacttagaaagatataactgtatgtttatgatatctttaccaagttc

SEQ ID NO: 19771 - DNA, 7743 bp, Cannabis sativa
tccaatcaagatatttccccttttggagacacaactaagattagaattaaaaaaaaacgaatcaaataatcagctatttaattcctgaatcgtttgacaaaatagaatcataaataaaatcaaatgagaaatattgcagcatcacaattaactttaagaacacatagtctgtttcatccaccattcagaaaatacaacagtagaaactattgcagcaagttcattcaacctcgtagcttaagcacctaactattgtgtaaggtaggtaattgcagtactaacaacacctttagtcgcagagaacttgttattctcaaccactaataataattagatggcgagctatcgaagaacaaagaagaaccaactacgaaaaaaaaaccatatgtcacacaacaagactaaaacgcttaaaccatgtcacacagacaagactaaaacgctcaaaccatgtcacatagacaggactaaacgcagtagcaaaacacaatcccaaccaagccgcgcctaagtccaaggaaggtcggcaagcctggccagagaaaaaaaacaacctccgagagatttaggaaccaaaaaccctattattgtgatatctataataataataattttggtaaattggtactaagattgttagcattacctatttgtgagtgtaggaggagcttgtgggtacgacgatgtggtgaacaaagggtacggtttagagacagtagctttgagtgaagctttgttcaacaagggtgagtcatgcggttcatgttacgaactcaaatgtgcgaacgactcgaaatggtgcaagcctggatctcttcatgtcaccgcaactaatcattgtcctccaaattactaccaatcagctgaaaacggaggatggtgcaacccgcctcgtcaccatttcgacattgctaagccggtcttcactcagattgctgattacacagctggcattgttccagttcaataccgcaggttaataaaaatctttgtttgtataaccaagcaaaagggatggttcagaaaattagacaataaggctaaaataagtgaaagaaaatcgtgttttgatttttatgtgggtttttgtttttgcagggttccatgccaaaagaaaggaggaattcgattcaccataacaggaaatccttactacaacgaagtgtcagtatggaacgtggctggagctggtgatgtagtgagcttgcaagtgaagggtaacaaaaatctcaaatggacacaaatgaagcgcgagtggggtcagaaatgggtgactgatgctaagttggtaggtgaatcactcactttcagagttagagcaagtgatggcagatactcaacagcttggcatgttgccccgaagaattggcaatttggccagactttcgaaggaaagaacttcaaatgaaaataagtgataataatcttccaaacttgtcaaccctattttggttgagtttgattgatatcattactaatattaggcttgtcatgaaaaataaagtatgattggctatacttcggtgtgcaagtacaagaaattcattatatatattattttttttaacctttattttaatgtaacaatagcagaagtaattgtaggttaaggttgtatcatgaaccttgagataccaaacttccatgtttgaatcaatgactacatgtttatgcaagatttaatgaaaatattgggtacattgtaaaccaacttttctttctttctttgtcgaaaagggaaccaacttcttaaaaagccctaaaagattagatactcttggtaacggtctcaattatcagtaaatacaggtaaaagtaaattaaatcgtactgtaaacaagtttacactcaacaataatctatgagctacaaaattggaacaagccctatataccttcaccacattgatcgtccacaaagtttgtttggtaacgagtcacctatacaaatgtcttaaagactaataaaggccagtgtgcatgatgatgaatatttagaggcttgacatttaaaaaaggacatactagtacatccatgatccatctcaatgggaaggtgagtgatgcccttaagggcgcacaacatgctcgagtccgtattctacgaagcagagaagctcgactaactaaatctgccaaaaaacccatcttgccgatcagaaagaatcgtcctatctttgttctggtgaacattctcttgcataatgtgggaatgtcacttcatttcttgttttttttctttctttgtttttcttctcttgtctctgttcttgcttccagacgttttgaatgctgagaacggatttcctgtaatttagattttgcatctttgaagagtgcatctgatcttgaagacatcatttgctgaaacattcaatggaaaattgttacaaattaataaaaaggaagaataatgtttaccaggaaaaaaccaggagattcacttatgtaccttgagatgatccattgctgcaaggttgaaaccgagggtgtctttgcattcctgacacagacccaaatcctcatcagcaacttaagcattcccatagatatttaaaataacttaaagtgaaaccaaagcccataactttttttctaggaagcgaaaaattaaaagccacattctttcataggataccaaaaagtaaagacgagaaatagaactaccttgattctagcataaaggagctctttgaggacagtcagtactggtcttgcagctggagtagtaatcaactgattataatgagtctgcaacagcacagtagatatcctgcatacgagttcaacctgaaaaacaaagaaatcatcacattttaacaaacaatttgaagaaatgaccattcttcctagcataaaagtattaagcagatgcatcttcagttcctactatttcaaaataccttgtcggaatttgaagtccactgctttaagtaagttagaagctgtaatgcatctgagaatggtaaagcctgcacattagtacaagtgtcattagaatttcattgtttacagtatgaaccgaaaatgatttgtcgagtacgatacatcaacataataagtgtcaccttgaaggaaggtttcaaaacatttgatgcaatatagtttaaaaacagaaaaagtttatcatagacaatcatgcccaaccaaaacataaatgtaatcgcaacataagcaatgcataccagtagagtttgttctagatcacttgtctgaactttagaaattgctcgtaggatatactcagatggagacaacccaagcaaaagaacatttggctggaacggagcaacttttccctttgctttctcctcctgaaatttacaaggcaaagcaactaaattgaattgcataaacaacagcctaaaataataaaccctcaaaatcatctataattatatttgagacaatgtgaatcatagacatacctcataatcagtaagtcgcttcaattctacctccgcaatgtccaatgcatcaataattgtatcggttgcagaaagtgtttccttagatttcttccctgctaaagcaacagctccctcctctgggacttcctccttgggagcatatctgttctcaaatgcattgtcgagatcggtttctaactcctcttccaaccttttttctttctcttcctgtacatccaaatataccatttttctagaattaacattctctgtagattaatcatggcttggtgcaaccataaaaaagaaacttacctcaatgaagaatggctcttcagtacggtcccagcgacgtatagaacgatcatgggatcccgtgacaacaaagtcaccacggttactgacagcaagacaccaaacatcagcatggtgtccttcgagagttaagagacactcaaacttatccacatcccaatattttactagattatctttcccaacgctgaacaggtaatgggtccgctgtacaaatttcactgctgtaatgctgttcaaataaaaaaggttgtcagataatatttcagaacaccaataaagccaatagtcttttataactcaaactatgaaagcatcacctctctttatgagcaaagagggatttgtgacagtcaccaaaatctaaaccccaaattttcaaatctttatctgcagagccagttacaatcagatctccatctgacgaaatatccatacatagcacaggcaatttgtggccatacaaggaaaggaaaaatttgagtgaatcgaaatagaaaacctgaaaaatgaaatacaagtatcagaagattagcaataacatcataacgcaactgacactcaaccaaaaataatcaggtccagcaaaagctattagcctattgccaaaggaaactttgatgcattttaataaaactttgttttactactctaataagttctccctgaaatgccaaactaacaatgtgaaataataaatttgccaaataacctcacttaatttactctatgcgaccatgatggtcgcacagtttaagtctatggtcgaacagtgtaattcatggtcgtttctgcaaccatacaagttattttgctaataaaatttttggtaaagttattttgctaataaaaaatttcataaaggctatcttttcaaaacactcattttcccttagcctattctactaagcatcttgaacttgtactatgatttttcagtccagataaaaattaattatgattgcttacagccaatgaagactttaaattagtattcatcaaagtaaattgtgtggacaacgaatgaatctgaaaaaaaaaaaagtgacatggcaaatcagccttaccttcactgtattgtccaacaaagcaacagcaatatacttggagtcaggactaacagcgacagcaagaacttcgtcatccatcttcatagtccttacatttgatgccttaaggtgcttagagccctgcaaataagatagctgaagtgttacttacccatcaaatatgaaaattgcaactgtagcagcttacatgtcagacataaattctgaaatgaagaatgggagaaacaaaaagcttcaataataacgatcaacatatgatataaacatttgacaaagtaggatggtacaaaattttgaagattattattaagagcattgctataaggcaccaatagtgtctagcaccacctagaggtgacgccatgtaaattgtaattgtttagcgatattctataatagttattaaattaaattatatttaattagatcaatattgatatgacacctctaggtagtgttaggcaccacaagtgccatttagtatttctctattattaattattaagatatacattcaaaaatattcatatatatttttgtaattgttggccctgcagtttcaccaaagaacctcccattggcccaaggtattttgagtccatgggggttcaaacttggaacaaatgcctaccagaactttcgaatactccttaccactagaccacccgttggggatattgtaaaatattaagattaatattgtgaagacagttttatgaagaacctacttgagtagattccgcttgatactcccagaacttaacatcgtgatccgcacttcctgttacaaaaccgttttcatggggaatggccacaatggagcgaatagagccaccatgggcttcaacagcttcaatgcaagtcccactgccaatgtcaacaatctccaattttccacctttagttccaactagtccgtacctattctgaggaagaatataaccacacagcccgaattcagaatcaatagtccggaggcaagaaccagtacttggattccaaatcttcacagcattgtgactagttgacatcaaaagtgtgttgtctgagctaagcgtaacacttcttacatcagagcggtgcccttgaagatcaatagcaagtgttttatttgctgcatcactatcaatagaatagaattccaaaagattattgttcaatgacaaagctattgtagccaatgagctctttggggtgattggggagaatgaaattgaagaaatctttttgccagctctaatagtttgaatgagcttgaaaacatctggaattgtaactacagggctatgtttttctcctgttacatgacttatttctccattttctgtcacctctgcctcttctttagcagatttcttctccttccggtgaagcctacgttttgctttacgcttagattcagcctcgtccaacacacggaaaatttctacaatcttccctgcaacttggcaagccagcaaatttccagacttgttgaatcttagggttccaactctatccttgctttggcgctgaagttcaccaaactgcttcagaacactccatttatcttgggatgacgaattaccattattcaccacttcattcccatctacattatctacggactgctcagcctccgtctcatgcttaacagaataaaaccgaagctccgggtccgcagacccagtgaccaaaaatctctcctctggatcaacgtctatggaccaaatctcactatgatgaccaccaacaatttgcatacaatgctgtgtttcaagatcccacaccctcaaaaacttgtctttggaagaactaaccagtttcttaccggaatctaagaagacaacatcagtcacctacaaaacaaagtaacaacaaacaaaaataaaagaaatgaaatgaaatgggtgggaaaatatatacttatactgtatatacatatatatctccattaagaatctgcataaaacatacctggtctcgatgacccctgaggcgaaatagaccagtctctccaactacatcccacagtataacatcattatctttactcccagatgcaagcaaagacccaagcttgttgtaccgaagaacagtcacagcccctttatgcccattcaatgtagtttcacaggatcctttctcaaaatcccaaattcgaatacttccatctgcatacccaatcgctacctgcaattaaaccctaacttcactcccggaagcatacagaacagcagataacattaagaagctaaaatcaaaaggttaccagagatgagtgcgatgcatcgacagcgattgcggtgacaccgagggaaggaccacgagaagacgcagatgggtctaggtttttgatgcgaacgccttgtcgtacatgccaaaccccgaccttctcgagggccggggcaaggaggtgcttcccagagctgtcgtaggcgatgtttgatccgatggaagcgatgacgccaaaggcagaagctggctcgtacctcaagtaggatttcaccatggctttgctgctttgcttctctgctatggcggtagccggagaaaatagtgttctttctttatcgttgaagggtttaagggttttaggacgtaattcgggtacgggtcagattatgggcctaattggtccatagaacttgggatttcagcccatttaatgcccaatttttttttggaaaaacttacaaaactactggaatttgggttagcttttacaaaaatactgtcacacgaaaatcttttcaaaaatactttgtttttataaaataagagtaaaacacaaaacagaacaactaaaaacaaccgtagaacaacagtgaaaacttaacacagtacacagtataaaacttactcagttattttgaaaaaaaatttcgtcccacagtataaaagtaaaaaaattaaaaaatttcagtatgtggtgtaattattcctttttttttaggggggtttaacacc

SEQ ID NO: 19772 - DNA, 3369 bp, Cannabis sativa
attcataagtaacagtctaaaagttattgatgaacttgaaacttcaataacaagcacaaaataaacaaagcatactaattaaagccctgaagcatatcaaataaaactttgtgaacaatacctccgaaattgggtaaattatcacttgtagccatgtttttgagctatgaacaatactctctctaaatttgctctccaaccacacccagtttcattaagtgtaaggattttctaacacccattttgtgtaaaaaaaaattcaccttgttttccaaacatgtaaagatcaattaatttagagtgtatccatgagctttgagtgcacttagtaaattatgtccatcccattatgatcattagttaatacatacataattaactacatagatattgtaacaggtatatctataagaactacttagcatagtgaatcacaacttttacccaagtatacacaattaaataattatgcaaagtccccaactgttactaatatatactagaataaacctacaagaatcaacagattacttttggaaattcaacattttttttagttctctaattcaagaatgtccaccttctcaaaacattttttttttgtgataatgatcactttttgtgacaaatctaattaattattactccgagagaaagtttgtatttaatgataaggaccttccactaatgtaaaagtgggaaaaaaattaacaagtgtttcaactaaagctaaatttagagataatgatgacaactattaatctagtgacaaccatcaaaactttggtaaaattggcaacttaatccatttaccaataatctattctatgctgttaatgcaattgggaatctcatatattagatcccttttcaaagaaacaataaagttattgcatgaaatttggaagttgaaataacaaatacataattgattgagtcttctacacaaaacttttaaaataagaaacaatttatacaaccaacaattatggtatgcataaaagacaaaaagttgcttgaatatctcaaatagagggaaaacaatagttttatattattatcataaatacttggtcatcttttctctcatgggttccaccaaaaagaaaggagaaaaatccaaaagaaagtataatgatatttttacataaacatataattagatgtatttgataacttcaaaataacaagattgggaaaacaaattaagataggaccaagctggtaaaggaagctagcaaccataattagtgaatcataatcatgagtataaaagttttaaactaaacacacccaaaaagtaaaacacataattaaaaatttattaagcacaaatctcaaaagctaaaacaagtttaagaaattgagttatcaaaaagaccttctcagttgtagatgttgaagcttgaagttgctcattcctctcttcaagtctcctctgcaatttacaaatctggtcttccatgtttttagcctttgtctctgcctcctattaacaaaaattgaaaagatccaaaaactaagtcccaaacaaaaaactccacatgacccttaaaccaaaacccaaaatagaaaaaaaaatataatgatagtccaaccaaaaaaactacacaaaatacaaaaagaaccaaaacccacaaaagacatgcctgtcttgttgttgtttctttagcaaaaatttgctcttgagatgccaagcggctccgaacttcctttagttcagctgccaaagacaccacgtttcgccgaaaactctgctttctctcattcaaatccttgagcaaaggatcaatatcaggggctgatattgaacataaggatgatgaagatgatgagactttggaatttgacatcagaaagtagagaacttgatccaatggtggcagtgaatttggtgcaaaacgatctggtgatgtttgtataacctgaattaagctccaatggtcgaagaataagtcgttatatggtctttaaaatgaaagttatcatctcatgccttacctgtgaaaaaatggtagatgggcatttaatataaagggtctccaagaaactgataataaagaaaacggtaacttaaaatttaaatcttgctattgaataaacagaaaattttctaccccatcctcattttctcaggaaaatttagtccaagaggggtttgccttgttttttatttattttgtacatataattgattatacaccacctctctcccaccttaacccaatctattaatgaagagtaagaaagagaagacatttctagagagagaaatcatgtcactctcaacaaataattattttcagatagagagagagaaagaagaatcaaaatgatttcatgggcagtaaacttttgatgaaaaaaaataataaaaataaaaaatttagataaaattcactctttttaagctggtctgaaaaaatctacctctttcattatatattgacctacatatctgaaaacacaagaagatttaaacaaactccattgacccacaaataaaaatctctctgaaacaagaacaaagcaaagctatgcatctgcaaatcttcaaataacccaaataaataataataaataaatataaatctcaccctccctcacatgcagatcgttttaaatttaaatgggtccaacaaccataaaaatatatcaaataagaagaagactgaactaaataaatataaaaattaaagtttcaaacttttctcaaaaatctaaccttttcattactgcatgtactaaaagctgaaagctaaaccaaaatccaagccatggaaacatagatggtttccacagaggtaagaaaaagagagagaaaccaagttctgagcagaacccacttggcaatcacactgttttgctctaaaaaaactcttctttctcttaacgtgacaaaaaaatctctttttttctttttcccatggaaaatgaacaagtgttttcaaatgaacggtgtcgattaatcgtctgacgccatcaaatggctgagatggaatccagatcaatataccaataaagcccgtaaatttaggatatttttatttaattacagaaaaattatgaataaaaactttgtcttttattgtatgtgttgtgagagagagtagctgtgtttgagggaaatgtcctttattagtccactccgaagcaatgttgttttttggttcggagaatccgagccttgtgttttgtaaaatctgacgaattccgaagctaacgtttggatcttcaggtttgagtttgacccaatgcgcggcaaatccaaatttttggtttctgcctctgagatttggccacgtggtttaattatgaccgttcgatgatgtttctgtgcctcgtggagggttcctttttatttattat

SEQ ID NO: 19773 - DNA, 3536 bp, Cannabis sativa
aacgtacttaactccactccctgtgggatcgacctcactcctggtgagtctaatacttgaaacgatacgtacacttgcgtgtgctaaatatcgcaacatctatccagaccatgcttttcttttgtggtaagaaagctgacttcttattgcatcaaagtacaaaccaatcaaattggctatttatacaactgccaataggcttcaaatctctttctgcaaaatatagaagagacaatccataagtgattcaattttaaaggagcgtagtgaggacgattcttgaacttctttcttaaagagactgtagccatcaacctagaaaagtattccatgccaagtataaatagcaaatgtgacatggggtcccttacctaagacctcttctagaagagaaatagccataaagagtactattaatcaataaggaaaactttgacctagatacacagtccatgaccaaatctacaaaaagaaagaggaatatttaaagcctctaacatctccccaatgaatctccatttcacagtgtcataagttttttaaaaatccattttgaccctacaagaaggagaattattatgccaaccataatgcttgaccaaatcttgaaaattaaaatattttgagcaatatacactatcatgcacaaaactcccttgattagatgcaatcaaggtaggaagaatcaatcttaaccgagcacaaatgaacttagttattattttttagatcacactgcaacacacaatgggtctaaaatcactaacactacttgggtacttaattaatagccttaggaataagagttaaggttgtagtatttacctcctaaagcaactttctagtattaagcacataaagaaccgcaatgtgaaatcttcgcctgtcaagttccaagatttttttttaaaaaaaaagccactactaaaaccatctgaccccgtcgccttaaagtcaggaattgagaacagtgcagctctaacttcctctgtgtacgattgtctaagaaaagaatctttgttatctactataattggtccctcgcaaacaataccagaaataccagctcttctattagctaatattgagcccaataattgtgtataatattctaggaaggtctttttaaccgcttctggtttatctacccaagtaccgaagctgtcataaatagcatacactctatttctcatctttcttatttttatactttgatgaaaaagtttataattattattaccatatttcacatagacaatttatcttaacactttactgtcaaaagttgttgaatctcttgaccatgcttgaattgaaaaacaatgaaaacagagcaagaaagagagaaagaaggattgaaagaaagttacgaagagacagcagaaagaaagtaaaggaagattgatgaaacaacgagcaatctcattgatttagtgttgatgatacacggttatatagtgacaaagattagagttagaaataaggaattagttacaacagaacacagctaacaactgatctaacagaattgttgtaacagacaaactgttacaactgtcactaacggtcacaatcgtatacccctaacattgcccctcaagattacaattcgagtcgtctgtggcagaagcaagatcttgaattgtaagcttggatcgaaagtgaggaaatcgttgattggagattgctttagttaggccatcagcaagctgatccacagctggaacatgtttgacatgaaccagattttgcataacctttcacgcacaaagtacagatcaagttctatatgtttggttcgtgcgtgaagaaccggattgcctgtcagaaggatggtgcttgagttgtcacaccacatagtgggaggtcttggaagctgaatgtgaagctctgtaaatagagagtgaatccatgtaagttcagccaccgtgcttgccaagctttggtattcagcttcagtgcttgaacgggagattgtttgttgctttttgcactaccaagcaactagattatcacctattaaatatgatgaaacctgatgtggaccgtcgatcatcaagatctgtggcccaatcagcatcacaaaatgcaactacgtcatgatctgtgggtcttttcagatgcaaactgtgagagattctgccactaagatatcttaatattcgtttcacagctagccagtgagtgagtaaaggattgtgcataaactgacaaaccttattcacactaaaggacagatcgggtcttgtgatgagtaagtactgtaatgctccaacaatcgaatgataaagttgaggatctgacattggttcactgccatgagctgagagacgcacggtcataggaattggagatggctttgcttcttgcatttgggctttgacaagcgaatctcgagcatattttgcttgagataggtgtaaaccagatggtgtggaatcgatctctattcccaaaaaataatgaagatcaccaagatcatttagagagaacctgtcattgagagcaacaatgatattggagacaactttcgagtcacttccagttacaagaattccatccacatagacaagaatcaatgttgtgtatgtggatgtatgttgaatgaatagagtatgatctaattttgatggaaagaaccccagttgaagaagacagtgatgcaatttatcgaaccatgcccgaggagcctgcttgagtccatataatgctttgtgaagcttgcatacaaggggaggagatgcttgtatttcaaagccaggaggttgtaccatgtacacttcctctttgagatcaccatttagaaacgcattattcacatctaattgctttatgcaccatccatgagacaaagctaatgtaatgacaatgtgtatggtgactggtttaaccacgggactaaatgtctctgtgaagtcaaactccggttgttggtgaaacccttttacaacaagtcgagctttaaacttgttgtgagtgccatcagagttctctttgtatctaaacatccatttgcaaccaatcggttctctaccaggtggtaatggaacccatgtataagtggcatttcgaattaagggaagcatttcatcagacattgcttgattccagtgctcatcttgtagtgcttcctttactgttttgggaattttgataaccatgtagatctttggtttgtgaattcctgactttgcccgagtctgaatggagtgagagttgaccaagtgattctgagtagcaacagcattatgggaactagtagtaacagcttgcaaaggaacagctgcagtattctgcatttcagtaatattgttcacaccagtagcattgtaattttcatcaagagaaactggtgttgcagggttgggattttgagagccaggagtctcatgcataggagcagtatcactagctgtagttgtgggaattagtgatgagtgtgcagctggtggatttataacctcagtaatagttgccggtgcaatggaatgggaactagaatcttgcacaggcacagaactgttggaaattatttt

SEQ ID NO: 19774 - DNA, 7758 bp, Cannabis sativa
  modified_base (7691)..(7710): a, c, t, g, unknown or other
taaattgtatagagcagtaggacaatctaatgttgtatcttggcattgcttgttttctacagatatattacaagaatgtggctcatccaaagcttgcagcattcattaagaaacatagttgggtgatggaatctggggagtatctgactttcccccaaaaccaatctgaattcaagggtggagttcttcactaccttgactccattgaagaggtgattttttacttatttttaagattttgtattacatacgaaacttgtatgtaatttcttaattcgctcctattatcgtgaaaagaagttagtctgttattgatgatgatcgaaatctaagcattcttccctctctatctaacatgtaaacttagaaagaagctaaagggtgatgtaccttgtatttctttagctgaattctagaacactgatagttaagactatttattgttaacaattaggtttaactcttgttgaattgaaaccatcaagtttttcttgcacttgtctacaaatgacttatttatcaatagtaatgttgattttttaatgatatttagcagttttagattaattacctgtgtattgtgatagacggtgccagacattgaatggggaaagaatattcgggtagtgctggacattggtgttaaggattcaagttttggagcttctttatttaataaggaagtattaacattgtcattgggcttgaaagatgacctagtcgacctagctcaagttgctctcgagcgtggtttccctaccattgtgagcttttttggtagtaggaggcttccttttcctagtggtgtttttgatactattcattgtggcggatgcaccataaattggcattcgaacggtttgttgtttactcaactttgtatattattcttttgtttttttcctctcttaactttttatatgaatatatttgttttcataagcatttgtacatagcacccttttttattttgctgcagggggaaaacatcttctagagatgaataggattctaaggccgggcggatactttattctctcaactaaacatgacaacaatattgaagatgaagaaggtttttcctatatgtttttttttgcagatactataagaaagcattatatggagggtttatgtactggacctatatctgtttacttctataagaatttatctactgttaaagtgttttttcttactgaaaatatgttttgtcttcctgtgaccccttttaagccttttttttaattgattaatttatctcgtgtttaattctttccagctatgaccactttgaccccatctatttgttggaatattctggctcataaaactgatgatgtcagcgaagtgggtgttaaaatttatcaaaagcctgagtcaaatgagatatatcaattgaggaggaggagatatccacctttgtgcaaggaaaatgaaaatccagatgcagcatggtaaatcttccttggactttccctacagtgtctatgttgccaatcttttgaaatgctgttatttgaggaagatattttcgtctggagcacagcaaagattacttctttgcttttatttaaacaagcattactctgcacaggtttcataagcatcacttcctagccttatgtagcagaaattaagcctgaactctgcacgggtttgatatgggcttacttttgctagttagtgctgcatacgtacatctgaatgaaaaccacctttatttactaattgtcaaccatgctgagatatagctaatttttgacaaaagctgcacaattctattcaccaacctatttcctattttataatattgtactgattatgtggtatttgtaacatttaccgaataggtatgttcctatgaagacttgcttgcacactgttccatcagctattgagcaacgtggaacagagtggccagatgagtggcctaagaggctggaaactcttccagactggttggaagataaagataaagataaattggctgcagacacaaagcactgggctgctattgttgaaaagtcatatcttactggaatgggaattgactggaagaatatcagaaatgtaatggacatgaaagcaatttatggagggtatgtcaaacatttgactaactaatcaacatttcttttagaaggcataaacttttttttagcaatgatggaggcagaagagggagctgcatgtcgatattaatgttcccttttttccgtttttatttttttaccgtcataggattgaccatgaagaaaattagtaatgctccttctacagatttgctgcagcccttgcaaagcagaatgtttgggtgatgaatgtggtccctgtacatgcaccagacacactttcgattatctttgaacgtggacttgttggaacctaccatgactggtgtgaatcttttagcacttatccaagatcatatgaccttctccatgctgatcatcttttttcacggctaaagaacaggttaggctaaccttgtgcagttctttttgtctctgttgttcttttgacgctaagattgtttttgccgtagaagtttactttctttgccccattcaaattcatactcggaattactggattgatcatatgttttgtaggttagaaaaaagcagatttcaattgttcttgaaggattttggggtatcccaactagggacttcaaagaataagggagataataggcaaaatcatagaagaaatttagaatagaatgcaatagaaataactaggcacgtctgatatttgatattgaaaggtaaaattgatatgaacaaacaagaacaatgaggtatacgagagacctaattctccaagagttactcctcaattattctcatcgtgtctttatcatttctccaagtttcttacttttactatcatattctagatcctcacaccccccagtatatgactcttgtacccttttcattcacattagtccaccaatgccagggtatatcattactggccacccaactttcaccttgttctcaaggtgaaggacagtggaaccaatccctaaatactcccatcccctgtcaaaaaaccaagcaagtcaccaagctcaagagccttcatactgtttatgtcaatattctcccattataagagtgactcctagcttcattccaagaccataaagatgagaagtgcgagcagtagcagtacacaacagtgccacaccaattttaaaaataatcttttagaatagagccctcagttcattttgcagcttggcaagcaactcagatcatagtaattgccaccacaaattggttcagcagaagttgaagatttatatacagaaccattagcactttccctcctaggaacctggtccaaaccacttcacttggacacaaagcttttcatcaccgtcaactatgatatcctccttgctttcgttcatgtcctagtggacttcttgtggagaaagaaaatatgtagttgggataaaagcatagtctgtactatgttttccaaagaaaacaatccaaataaacacatagcaaaaacgaagtgtgataggaccaaagccccatcttcagcatatagtcttgtatagcgtcctaagaaagcaacaaaatagaagctcccaaataataaaactaaatgctcataggcagtcacccatttaaagtataaaagttttctagagtaaaaaatagactccttttcactagcataaccatcttccatactcaacctaaaggtctagcataaattgcatacaagagtgggcatgtggggggtttgtggtttggacccatatccaatcataaacaaggttcagacctggttgcacaagtagttttgcaaagttgcatctgtcttcccctgtaaaaaatctaacaagtaaccaatgtgaacacaacctcgtggaattccattatctgctaccgatgagaggagaaagaaccataacatagaaagttgtgcagacgtatctctcttaaagcaaaaccccaaatgttggaaaaacaatctctgccgcgtacctcagtgagatctagaggtcgcaatttcactacttgtcctccatgtcggtcgttgatcttgagatggagaaggggctcatcaaatcttgaggttgagaacaatcagcttccagccttttacacaaaggagatgaagtgacaaaatggatcttaacttaatccctgcacatgaaattgggatgcgggtcgtagcttcatacttagtgggtcttagcttgaactagatcgcagtaatgggcctatagggaacaaatgaaggaagcaagtacccacaaaatagacccccgcatccatgaagcctcaaacatccctacgatgcttgggtgtataaccaacatctcccctgacgttgtcgacgatgattgacgacactgctcctctgccaataggagacaccatggttcccccaaccaactcagaaacagtatatcaaagaaggtatcatggctggtgtcatcccacggatcaaataatgtcttctttggtgtacaacgagtcttcactgtactgtgaggatccactgcgtggttatgggagaatggatcgcgatatatatggactgaaaatcttgaattctttgtagccattcacgctgaatacgaaagtaccaatttttgtgactttgctagagaatcccaatggattctatatttcctttgcctccacaatgctagacaagaggatgttttcttcaagtggaacgatctcatcaatgtgtgcaacgttttccatcatgtgcactgtctctgatgtgtgcaacattgtccatcatgcatactgcctctgatatttgtggtaatgtggctactccccatgtattgaatggagactagccttagtggtcccgatgacgactatatttctttacggagaaggagctagtcttgcatccaactgaagggatcgagctgagggagcattcattcacgtctgccaaggtcagatgggatcgagtccaatgcttgctgatattctgcaacaagaggagtcctgccaacatcgacaaggctcatgatggatcggaatgggtctgatagttccccaactaggatcttcaatgagtgtgggagatgataggaaatttcatagatgaaattgagaatggacggcaatagaattaactatgcatatctgatattagctaatggataataaatctgataagaacacacaagaacaatgaggtatttgagagacctcaactctccaagagctactgctcaattacaatatcattctcatcatgtctttctcatttcttagtttcttacttgtactatcatattttagctcctcactacccccaatataacgacccttgtacccttttatttatattattacaccaatgccagagtagttcagattcatattgctgggaatatctgcatatcccaaatcaatacctgcataagggttataaagtttggcattactttgtaaattgacaagcacaagttttaaagataagttgacaaggtaacccaatgaggtgggggcgctgccactgtgctgttgggatgaatttgtcccggtgtagctgtagctccctacactacttactggtgggtgtaatggggctcctttgataacgtgatatacatgatgtgcctcgcctttgttatatttgttgcttttgtgtgttgtatgctggcaacttttttaattgtgtttatcacttgagcttggaaattactacttgtgcaggtgtaagcagccagtgtcgattgttgttgagatggatcggatactacggccaggaggttgggtaattatacgtgataaaattgagttactagatcctttagaagggattttgaaaagtttgcagtgggacattcgaatgacttatgctaaggataaagaagggatcatttgcgtgcaaaaaactgggtggcgtccttaactttcccaagttgttctctgcttggagtcggcataacctggtgtatcatatggctggactactaattttacaagatttttgtttcttattattgaagggaaaaaggcaacgacaaaagcagagctctttttcacttgaaattcaacttttgagacatcttcttgttattgttaacaggaaaccttttatcttttggagattttaaatatatttaattagaaacacggaactgattggatagagaaatttttcattatttttttcagggtggattataatgttatagctttgtaaaggaaaaatggatttcacacttttatcacattgtcatacgattatttacgagtgatgatttgatcttctggaagttttagcatttcaaattaaggcataaaatacagagtttgacttgaaggatcaattcaaaattgtgaatgtgaatgactcgtcggaaagtctgttaaaatcgtatagtcaagttatagttgattgttgatggtctgattttcaaatatatttgtacttaatttattattagttagatagcgtttttttcaatctgtgaaatttgtagaattcgagcaattttttatatgaaaaaaaaagagaaaaaagtccatcatggtaccgtgatgctccctagaaaaacattgccttgtgatggtctagtgatggtgtcgccaaagttttgcataaaatttgataaaagttttggtgcttcataatttttcaaaaccgtgaaaagttaactctcactaaatctttttagagttttatattttatgcaacacgacattgggcatcatatttggcctctaaaattatgttttgatgagaccatggctttttttatctaaaaataagtttttatggatccttcgcaaaatgtcgtttagttatgcaaattttcagatcttgaaaaaaaaaaaagcaatcaaaattagtaaatgatgcagagatgtgctccaaaaaaataaattagtgttttaagtgaatatatatatatattttgagactgaagaatttacgatgctaacatgtattatcgacgcaagaactaccacaaaccagaatagctcattgtctaaccgatagtatatgttttcccaaaccatgagctgatgaagtgagcaagctacattagacaaaattgcctccaaaaatttagacaataaaactatatcatccttaaacaatacattaaaagaactagagcttcaatttttacgactgaaaaactacctaaaatattttaaaacaaacaccagtacataaaatgtattagattagaatgacaatctacgacgaaaaaaataaaataaaataatatatcaataagctactaaattcttagactatatcatttgattgaatcaagtaaaacaaaaactaatgaaaaaactaaaaaataacaactatcagccaaaaagtgttaccttttggctagtagcaattatttctaacccatcaaaattcaataatcataccacattaatccataaaacaagatagttttttaaattattataaaggagtacgtttcccaaaaatatatagttattttccaaaatttactaatatctctgaatttcaaaaataccaatttaacttgaaagcccaatctaatttagagaaatttacgctaacaaacaaaattttgaaattaattccataaataccacttttctttttatttaaaccataataatactgctgcatcttaatttttttgaaacatgggtatatataaagggaaatttacatggtannnnnnnnnnnnnnnnnnnnttacaaaaatactgtcaggcagtattttttacttttctactgtgtttt

SEQ ID NO: 19775 - DNA, 2716 bp, Cannabis sativa
tccttaattaataaaactaccgagctaactataagttaatataattgaaattttattttttaaaattatttcattaatatatatacctaatagactatttaattattttcatataaaaatacaacctaagattatatactaaataatacatttttagttgcatgtgttttgaacttatcctctgcttgttggttgttgttgtaggaaacttttctttagcattaatagttgcattggattggtctctcactcttggtcttcctcttcatgtggtggagttagattgcttagccttggcttcggctttcccgaagcgtttttccttttgtaatgaactaagttccttattagatgatattgctagtttgctttccagttttcttgatacatccctaattcatgttcgatataaagctgctcatgaattagctatgcatgcactaagggtggatggtgaattggcttggattgaagatttttttttttctcattgatgtattaaagtctgatcgttgtgaataagagtttaatttcaaaaaaaaaaaaaaacaattaaccattaatttaaaaatattctgaaaaaggaaaatctgtaaacagttcaaaacttttcggcctttcagattttttgaagcttggttcaatgaaccgtctagttgggatgttattaaagaagcctggactcgggatatttccagtgaagaagtgtgcagtcttgggaagaagatcaatagaactcaatgtgctcttagatggtagagcaagcatgtttatggagattgcgatatgcatatcaaggatcttgaactggagctccaaactcttcaatccaaagaagctcatgaggtagatttattggctgaggccacggttttaaatagcctgggagaattgtggaagcgcaaggaatctatgtggaaacaacggtcccgggaaatttggttggctaagggtgataggaattcttcgtttttccatgcctctactgtggttcggaggaagaggaatcatatctagaactttaaagatcctagtggcagagtcgtttcaaatgagaaagatatcggtgttatccttaatgactatttcaaagatcttttcgcctccaagggctcttcgtcctttgagggtttagattctttgattcctgattccattacccatgatgagaacttgaaacttacgacaatacatgagatggaagaaataaaagatactgttttccaaatgcatcctttaaaagccccgagaccggatggccttttgggttgtttctttagaaggtactggagtcttgtgggagaggatgtggtccattgcattcaacaattttttatcaccggggtgttggaatcgggtcttaaccatactcatatctgtcttatccctaagggcatcaatcctgacactgttgatcgattccggcctattgctttatgcaatttcacttataaagtaatagccagaatcattgcccaaaggatgaggaatgttcttcagcgtattattgctcattttcaatcagccttcctcccgggaaggtggatagcggaatcctccatcctcactcaagagattgtgaatgtgatcaagaagaaaaaaggaaaaggagggttaaaggctttaaagatggacatgaacaaagcgcatgaccgtctcgaatggagttttctcaaagaggtgctgatgaggtttggtttcaattctcactttgtcaaaatcattatgagttgtgtctccactgtgtcctactccattcttcttaacggacggcctctcaagaaattccagcctggaagaggtatccgccaaggagatcccctatctccatacctcttccttttgtgcaatgaaattttctcacagcttttatcttttgaacaagagaagggtcttttccatggtgttcgggttgctagaaatgttctagagatatctcatttaatgtttgtggatgataccatcattttctctagagctaatctcaatgaagtggaagtgcttaatagttgcatcaagaagttcaaagattggtccggtcaaaaatgcagtaaacaaaagtcgggagtccttttttctagtaattgctctcgttcgttgagagattccattgagaaaagtctgaacattggggccatccgtgatgacgagaaacacttgggtaaccctttcctgttcagccgaagtaagcgaaaggatttcaactttctcaggacaaagctacatgacaaattggagggttggagacataaaactctttccaagatggggagggcggtttatgtgaactcggtagctcttgctttatcttcgtatactatgtcaacctttcaagtccctacatcttcttgtagagagtttgatgccattgttaaaagattctagtggaatggttcccccgagtgcaagaaatattgggcagccacttcttggagttctttatgccaaccaaaacagagaggtggtttgggtttccgtcggtttgaggatatcaaccatgctcttctcaccaaactcgcttggcaactggcgagtaaaatggataaaccgtggtgctacattttcaaaggaagatactttcctagggagacttttttggagtgtcagtgagaaaaacagtgacagctttgtttggagaggtattttaaatgccaggaaaactattgctgaaggggcttgtacagttatcacttcgggggaggatattgatatttgg

SEQ ID NO: 19776 - DNA, 1669 bp, Cannabis sativa
aaaaaaaaataaagcatgataacaaacatgtgcaatacatcaagcttcacatgtgagaaataactctgaggcagcaattaaaaatattaaatttatcgtaccagtcaatatgtagaacaattccacactataattttaatagaccgtgactgtccatgcattattttttgcttacatatgaactttaatttaatcccatagtcaactgaaatacctaattaaaaatttccaatctcccctatttttaaaatagttctactgtaattatattttccaggcatgtgaatgcatgctgctgcagcacttatatatatatatataaataacaaaacccaacttgagaaaatgttagattatgctcttttaaaaataataaagccccaatcgcactcataatcacatactatattactaatttactatcctttgactaattttcttttaaaaaaaaatattagctttttgtctatatagaaaggaaagagcataagaatgtcatagtttccgcgttcacatatttttatcttttaagtttattattagagaagaagaaagataaaaaagattaaagagatcgtaaacgacatccatttcttggtgtattcgtctcacttaatgtatcttcaccgttacttggtatggaccccacatgagaggcaaggtgaaccgttggattgattataggtcaaatatagggaaaggagtgccgtgtttggctatgataacttattagtaacatgaaaataccgtgtgtcgcgtccctaatcacggacattatacaacccatccagccaagcatctgaacatcaaacgcggttcaaccaagttttattcccctacttgtgtacctactgaagcaagggcattcaggtcatttacgtaatagttttatcgacgtggcataatttcattggttgaaactatgaattccaacaatgttctggtgaattggaccctcatcaccgcatttaaggccccagcatgaacacactcatatggcattgtccaaccaacccacacttcattttccttttctagcaaaaaaaaaaaaaaatcattatcttattattatttttattcattatttttctaatattttctttgtggggcattattttgacactgtattgttttgcaagcttgacttccctcctatactgtgtagctatagcctttatataagccacagcaaatcagctcttacaaccaactaaacataaacaaaatatgtctctttctctctaaccattctttccaaactaagtacttggtatctatatatatcgaactattattctttcacctcttattctgggccacattatttgatagagtttattcattataattatctaagtatggttctaagcttagctaaagctactgtaaggaactttggtttgattgttttggtattgggtcttgtttgtgctgaagatccatacagattctttgattggaatatcacctatggtgatatatatcctcttggctttcgccaacaggttagtacattgcatatataatatatattaatataaacattctcttctagcttctatatgaatctcaatatattttttttgaaaaataagcgtaaagttatattgaataaagctagacctcatggtcattacataaaatgttttccggaacagaattgatcggg

SEQ ID NO: 19777 - DNA, 1993 bp, Cannabis sativa
ttctgtttatagatttttaaggggatatttgtctttttcatttttaattaataaaattaacattaaaataaattaagtaaggaaagggaaagatattccctataaaaataggagagaaccttttcctttattttgctcaaaaatatatttttttaatcctaaaaatcaacctttaatatttattttttgaaatatttaaatttattttatttaagaataaaaaatataaattaaaatagcaaatttaataaattaatgtgtaataacatctcattatcacctctttatattattatttcctttaaccaattacctgaacttctaatgtgggactaaaactttgttttacacccaataccctacagcctaaaagaactgcaaactaaaagaaataatcaataatcacaactaaactcaaacttaactgccataattaaaggataaaaactaaaataaacattacacttcctttttaaaaaacagttgtaacaattaacaaaccatagtacctaatcaaatttttgacatatgaaaaattcactgcgaatgattgtatcattatttggactattgcctgagaatcaatcatcccattggcacaaataactctcataccttttaaactttttgactataagtgtaaacattggacactagtgtacttggattgtcaaacccacaaaaagagaggccaagaaatatgaacatacaaaaaagtgagacgattaaaagggtttttaggtggtgcagcgttgaagttggaccaaagaaaaagaaagccagtgagataaggtcggctaacaagattttctctccaaaattgatatattatcaaatgagactataaaaagaaaactatatacaaaatgtataatggacccaattgtatccctattgtactgtggaagcttaccatttcgatgatcagatgtagtggtcactagtcaattttaatggctatggagaggagaatgattgaatgtggaactagtgcccaccttagaagggcaagaccgagccaatctctacctttgcacaacgtagttgggcaaagactaaggaccccagcaagtaaacacagcgacccattgtgctttacaaggactactatttcaacaaatttctctttctaataaataatgaccccacattgcacttaaggctcaaaaaattgcgacccaaacttatgctcatggttttgttttgttttgccctttgaaaatggtcatccaataaaaaagagaaggaaaggaatgataaaaaggataatataatgctatgctataaaaaaaaagtggtattttgtatcttataataaatgtatgtccagatatatcacatactaatatgctataaaaatgaacatacatttaaattaattttatatataacttagtaaggatttaatgagataatatatagggtggcaaaaacaaaatcattttgcaggcactcctatgtagatgtatggcttcagcaagagaagactaacaatctttctagaaattaattaagaagaaaaatgcatggcccacctaagggtatagttttattcagtgctattcctaaaaaaatgaaagtagctatggtatcaaagccaaaacattataaaagccttttaaacaacataggtggtcataggcacaacctagtggtaatatacctctcctcacaatggtccaagtttaaagaaagaaaacatagaacacgaatttaaattaaaacatgtataaatatacatacaaacaaataatagaagtataagatggacttttcaaaacagaccacaaaatagtactacagccaggtaaaacagaagcaatgatccctttttatattaaggatgagcagatatgagtatgccaagacaaataaaataatcatctctcaccaaatgttattttgtccaagttattggaaggaaaattagatgattttgaattgcaatacatcaaccaatttgaaagagatctggaacctacaccgagattga

SEQ ID NO: 19778 - DNA, 3893 bp, Cannabis sativa
  modified_base (51)..(51): a, c, t, g, unknown or other
aattaatcacgatttccataaaacctcgctgattagcaacgagctgcacantacgtttaaaaatcacgtaaacacgcctatgctagttagtgtgctacatacttactccaagcacagaaacactgggggtgtcaaccgttgatcattcaacttcctggatgaccccaatacataaggttacttttggccaaccgtgaatagggattgcattgaatatgtctgaaaaagtaagtaatgctagcattattccaaagttccaagagctctaccaacagagataaccctcatgaacagttcttggtcctttggtgtttgggaaataaacttagtgggatcacttccaactggaaaagggaggagtcatattttccattttagttgttgactacttcaataaatgggtggaagctgaacccatgaacatagtaccttccaaaaaggccttggacttcataatcaagaacatcgtgtgcgaatatgggcttccacacaaaattgtatctgataacagaaagtagtttgatagtgttcaattcaccaagttttgtgtcaaacacggaatcattaaaagcatttcagttatggtcagacctcaagcaaatggacaagtagaagttgtcaataagattttgaagacaaccttgaaaaagaagcttcaacgccaaaagaactttcaagggttctttaggcctatggaacaacagaaagaacttcaacaggcgacactccatactctatgacatatggatgcgaagcaataatcacagttgaatccatattgccttcacataggagaaaaacttatgaccccactcgaaaccatgctttacttcaagagtctttggatctaattgaagagcttcaagagtagtcacaagtccaactctagatgtaccaaaacatcgccaaaaatttcaattccaaagtcaaaagcaaaagatttgaaattggtgatctagtttgagaagggtatttctagcttctcaagagcaaggagtgggagtcttaggaccaaactgggaaggtccatgtaaagttcaacataaaattggcgatgagacctatcacttgagaaggctagatggaacaaaaattacaagagcatggaatgctgaccacttgtgccgatactctcagtagactatgggtggccagcttccttttacttttctttgatttttattcttttttttatgttcaatttcaatgtacgcctcagggaataaaccatttaaataaagaaggaatttttcatttcaatttcaacattttaaagttttgtcttataacaagtgatcaaaagtttaaactcttaatcagttggggagtagcatacattatatcattataatgttatacctcttctataaaaatataactaaattaacaacaagtataagcgtagaaagtttcacctgaaactgaagttccagggaattagaaataagccattgccttagtatactttaaattaatttagagcaattggtaattaactcacgttaatttaacttaaaagtttaggctttgtaattaactcaagttaattaactaagacattcaggtttcttaaataaactaataaattaaggttaattaagtatttaagtttgaaaagtcctgggagtaagtaacacttactaaaaagttttaattcttgagtaattaattaactcaagctaattaaatatttaagttttaaaattataaagttaaaaataattaataaattttttctaaaaataagttgttaaaataccgaggttcaggtcattggaaccatttttcctagacactcaccctcgtattagaagatcatttcaccatgtggtcaacattccattccccttagttgtgggtgcttgttctattttaatttgaatgggtcgggtctcttaaggcaacttattaaaaaggaaaaaccatgtctaaccatttaattgaaagcgcaaaggttcaggcccttagaaccagaacctcaaggagttggaaataaaattaaaatttagcaagctcaatatatatatatatatatataaaaataaatatctaaagagttaaaaaaagtatgcaaatatctaaaatacaatagcatacttaaaagccccgcaacaagggaataaaatttgtctctgtatatgcaaaagggagatctttatcccccaaatattaaaacatattaaagaaaaataagtaagagttggataaattttgtcaaggcaagattgggtcctttggtggttgagcattatcgggctgaacattagtggagaccttcgagatcacataatccgtcacacaaggagcatcaacaattggaagagttggttcttccaagttctcaccctcaagggggaaagttctagaatcgatcacctccactgccctcgctgccttcttggcttattctgctttagctagttggagaacctggggcatcaactattctctatcttcatcttccagaaaatgcatcacgaagttattgagcttctagatagtgtacaaagaatgaacaaaagcatgttttaacgcttctgatgtcctagcctcttggtcctgcttctcttgagccattttttgaatttggccctctagctttgaagtctttttcttagattcttcataggcctgagccaaagtttttttggtagagttcaattcagctacactctcctcaacctttttgagagcctccttctcagcctccttcgccttgtgctgcaaatctaaatggagtttcacctttctctctagagtggcttcggaaataattttgtcatccaggattcaagtcttcttttcatattcttgagatagaagggtgtgcttttgttttgactctttgaggtccaacttatcttgcttcagatctgcctccaagtcactgatctgaaatagagcttgagtatattcctccttgtatttgtctccacggtctctctcaatcttggtcgccttcttctcacaagcaatagccttatcaagagagtcatctactctttgcttgatgatggactccattttggcattaacttcagcagttcaagttcataggcctgctaattgagcaaggagcaggtcctctccgctatcaggctaacctgtaaaagggatcatgaatgaattggacaaataaaatgggcatattttttccttagataattttaaaaaaagttaacttatagcgttggcttgggtcctcatagtatttaccatgtagacggggtccccacttgccatcattgcaaacctgtcagtcccaagcttacaactggtggtagcactttggttcagcatatcagataggaacagagccaaatttgtcccaactctaggacaaagtatctccgtcatctctactctattaataatgtctggaacaagttcaccccacttcttgtaatcagaaaactcaccgttacatctggtagaaaatgttgctagctaattttctcatctgatcatactcgctggcatacctctttaggtaaaactgctttatggcctccatgtgtgctcttacctcatttgacattgacgtgggcctaactagaagataaaaaaattaaggaagtaacggaagccaagttgtgttctctctaaacaactgagtggaggtggctggaatgtttttgggtgctgggggtggtggaggtagatcttaattgtccttggttgttcaagtgctcctcctgacttgccttccattctcggagacattagatccattctggtattgagactcagcagcttgccacctcgtagtgaccaatgattgcattttttccttactctccaccctctcctttttattggcccctccatctgcagttctagaccgcttcttaggaacctcgtagtgactaatcatgtaacaccctaactagcat

SEQ ID NO: 19779 - DNA, 3169 bp, Cannabis sativa
  modified_base (1216)..(1218): a, c, t, g, unknown or other
cagcaggtaattataattattaatatactatagtagtagtttccttgtatttctctgtaaataaaacaaaaaatattgtatgttataagttataacttatatatctaggatttttttattcaatttttgtttcgtggttgcatgcattttctcaagggtagattgtctttttaggtgtgcagtatagttatatagaaactcttacaagtttttgtaaaattttaaataacttaggatgtcatatataggcttcaaaataaactatttttgtgttttttgtataataatggattataatcctaattttttttcttccatatgattatttctgatcgatgaagttacttttaagaaattttaaataaattatggtgctaatctcttctcgtacatatattgctaagttagtgcacaacactattttatatcacacgcatattattaagtttgacatattttaatttaaaataaaataaaaggaaattgctattcaattacacagttaaaataattttttttaaaaaaaaaagtacacaatcatgttctttaaaactatattttgaaaagttttaaatagattagttaaaattgataaatgcatatatgtataaattggccaaaattggagctagtgcggtggccaaccgacatacatgtaagttttttaatttgtttttggcattattgacctaataataattattgttaaaaatatatatatatatatatgtgcatatatctataaattaaaaatatttgtattatttttttatattcaaaaattgaattagaatattttttgcttgtgtaattttcaatttcatttttctttttgcaatatttttattatatataattcctattatacatgttagctatacatgcaatatgtattttgtcttaggtaattgtatgttgcttttcaaataatcaagcatgtacgtaggcataatttccccaatatttgggtataacaattttcgaagttgccgtcataactaatataaggtattattttatcaaaatataatgttcttggagctttcatttataagatttattcattgcataaacaatcaaatcaaaagattaatcatgtttgagtaaggaaatacaccaaaacgcttaaagattaatcaagtggccataagtagatgtgtgagtgttggaggtcctgggttcgagtcccagataaaacatgttgtaatatataaannnttaaataaaaaaaaaaaactaaatacaccaaaacattacatcatatgaaatgatagcatttcaaccaattatatttgattaaaacagaagtgcttaatttaaactatcaccatatatatgtagtgttttgttgtatattttgtgtgtactaatttgttcgcatataaatatatattctttcttgttgatcatatttgtatacatctcagttgtctggcataaatggagttttgtactacgctccccaaattttggagaaagcagggatatcagtacttctaacaaatatggggatgagtcttatttcttcgtctttgcttttaaatgcaataataacattcttgatgcttcctgccattgttgtgtgcatgcgcttgatggacatatctggtagaaggtaatcatcaactaattaaattcttccctaattattttcagcccattctcatatattaatttggtcaaaatataataaatatattttattaatatttggcataattcaaatgtgttgagatattatctaatacattcatgtttaattttgtagggtattgttgttgtacactatacctgtgcttatagtgtctcttattttactagtgattagcaattttttcaagttagggactgtagtgactgcaataatctcaaccccaagtgttgtaatctacttatgctcgtttgtgatggcttttggatcgattccaaacacactatgctcagagatctttcctactcgtgtgcgtgggttatgtattaccatatgtgcaacgacatattggtgtacaaatattctggtcacttattcttttcctatcctcttagaatggattgggcttgctggagtgtttaccatttatgctgttggttgcatcatggcatgggtatttgtttatctcaaggttcctgagacaaaaggcatgccattagaagttatttctgagtattttgcacttgggtccaccaaattggcctaatcgccacttttgcacaaaccaattaccatacaaaattgactatctctcgattcgtttccaacaatattgttagtattttatgtgtttttctctctacttgtaacaatgtaccaccaaattacacatgtaattttattcagctgtactgttaaattgtattattcttttttttaattggaaattatataggataactattgaaatattaaactttttttaatatagttaattttcttgttgttactaaaatttctagactattcttatatttactaaaatgtctagagttttttttatttatttgagtactcttgaattttctaaaattatctttcacttgtattagtagagagaattatgaaagtatatatacaagcaaggacaaagcaataagctcttaacagaatcaattaacaaccataaattaaccaacacaattaactaacctaagctaacagaaaactaactataggattagttaactgtgttaacatcccccctcaaacgaaaaggggtaggagccattttcagtttggatttgagatatatgaaccggtccttggttaatggttttgtgagcatgtcagccacttgatcatgactgggaacatatcgaatagagaaactcttggccaatatcggatccttgacaaaatgcaagtctatttcgatatgtttggagcgagcatgaaaaattgggttagcagctaaggcggatgcactctgattatcgacccaaataacagggcaatggggcagatgaacttgcagctcagtgagtaatgaaacaatccactttaactttgctacagtgttggctagagcacgaaactcgctctcagtgctgaaacgtgccacaacattttgtttcttggcagaccatgagattagattctcacccagaaaaaaaacataatcacctgtggatctcctgttatctatacagttagcccagtcagcatcggagtagc

SEQ ID NO: 19780 - DNA, 2067 bp, Cannabis sativa
gggtggtaatgaaatattgaccgatgagacgtggtcaattagtttagttgatcagattttgaagcaatacctgctggaaaaataattgtttttgatattatattattttttgagatatttgtttaaaatagattgttatacactttattatctcaactttactacttaattcatgttcaacaatcagcttatgactgcttataaattagttgtgagtaaataaaaaacttaaaaggatggaaaaattcaatcttcttcttcttatttttcttttgtaatgaaaaattaatcttcttgaatgtattacaatttggtatatatactaagtatagttattacaattataataaaatagtaatggtataatctatataattttactatacttatggaggaggttaattaataattaagtatacttttaatattaatttcactaatattttaggggctcaattaagtatttggaccttactatataataatactctttgaaacagaaaaaggaacggaagcttgataagccatagaagaagttaaaatgttgtaccataaaagcttatctctaacgaagctgcatgacagaaaaacacatttaagtcaagatcataatgaatagtaaaacccaaaaatcaaacaccatttgctttcacacacatataatgctctttctttctctatgtccaccctattcctacctccaaatttctaatgccatacaaatcatagacactctgtcatcctctcatgatcaaatttctctttctttcctccaccgaaagtcccacatttccctttcctatcctttattataattttttttcaaataggaatacgaataaagttagactcttttcaaacacaagaatccacttttcttctacctcaaatctcatctctctccttcacaaaaaacgaaaaaagaaaagcacagcagcatcaataatggggtgtttcaatttttgcaactcaaaaaacccttcacccgccatgaaagaagctcctcttgaaaacagttattacaacccagaaatagccaaaaacataagacacgaaatcctgcttcaaatcccagtatgcagagttcacttggtggaagcaggggaagctctggagctcgccaatggcgacttcaaactcactcgaatcttagacgaaaacgtctctcttgccaccataataagtgtaggaaacgatcttacatggcctttaactaaagatgagcccgtagtcaagctagattctctcaactatctcttctccttgcccatgacagatggtgatcctcctctcagttacggcgtctcgtttccggatgattgcgccttctttttaacctctctagactctttcttgaaggagaatacctgcttttcaggcttaacaaccactcctaaacctactcaaagtaaaggtcttgactggaaggagtttgctcccagagttgaaaactacaataattttttggctaaggcaattgcaggagggactggtcatattgtcaaagggatgttcaagttgagcaatgcttatgccaatcaggtcccttttctttctcataattggtaatttttgttgttgttaaacactgagaaatgacatcatggaacacttttttctttctgttctttacaactttatagtgaatctaagttaaagtgaagggaaaataaaaatacaggtacaaaagggaggggaaatgactctagctaatggggttgaggtgaaaagttgtgtcacaaagaaagaaagtggtggttctgttaagaaaagtagtggagtcaacaaaggcttgaaacggtaaatataaataaaagagtatcttacattacatgcatgcacggacatgaactgatttaagtgatttcattattagtgcaagaaagatgtcaaagatgacagagagattaagcaaaacaatgctgaatggagttggtatagccacgggagcagtgatggcacccatgttaaaatctcaagcagggaagaaattccttacaatggttccgggagaggtcatcctggctacacttgatgcagttagtaagtttcttcgtacttgaaaat

SEQ ID NO: 19781 - DNA, 2393 bp, Cannabis sativa
tattaatattatatatatttataattaataaaatatattacaaagaaattgtaaagttgatgagtggaatgtaaaaagttattgtaaaatagataaaatataattttagtgatttattttaaaggataaagatgaacaagtgtttaaagtgtctaaaattcattatcggacaaagacagatctaatgaaattgtgagaataattttgattctatactttttcataatatatatatataaagaaaacattcattattatttcaaaaccatagaaacagagcataatgcttttattaaacaatcgatattttacaagcatcactagttaacttactagaattacatgagaaccttgtagctaaacaacacaaatgggcaaactacaacaccaactctcaaagatcatatactctaaacacaattgctaaagctaaacaggtaggtactcatcaaagatgtatgaactggatgtgcaagcattatatcttggaccaaaaactgctacacttctaagttctcaccactttagcttagcagggaagtactgcaacagtagcaatgtataacataagaggtcaatttaattagctaaaaaaaaatatagaccaatggtgtgtggcaattacctttttgatgagggagagataatatggtttcactttctccacatcaacccgaactttactcttgctgtatagatcatacttgctacaaagatgagaaaaaatgaaaatagtattagttagtaattggactagctgagaaaatcttgtacaaattactgaaatggtaattacttgaatacgtgtagccacttcaagttttcaaaatcctcttcattcattaagtgtctgtattcccctgaactgtgtaatgctgcaatcaccagatactattttaatatggaaatggtaacattttttatggcaaatctaatctattttacaagtaaatttccatttctttacttaccataaaatgagtggtatctgatgataaaaagagcagcagaaggtagagtgctatgattctctttggcaacctgaaaatgacaccccaaatttcagcttctctgttttgtctatcccttttcttttatatatgaattcataagtgttttatgccctttgaataagtttataaaggatgtaccaagtacatgtagtcatcatgaccccatgacatcagcacattttctagtccacatctctttgaataaactccatacttggtgttataagcaagattgtagtaatctggattttctttgaaatacttcacagaaaaaagggatcatcttattagttaataaagattataaactagatttggtagaaagctgaacttgaattttatgttaaaagtaccttgtggtgaacaattgagtcattaaaagcacaaccaacggggtatgtgtcgcctataatatgaatcacaattgattaatatgatgtataaagttgaagataatagaaaacaaataagctttttgtggtaaactaaaaagagtgattgtatgtaacccttattccttacctacaacagcccactgaggaagccctccaaagctgggaagaagaagcacctttccaagatctaaaacaaatcaatacagaatacaaacttaggtaatccattgttatataaaatcaaatcttgaatggtaacaacaataggtttatataaatacataccatggataaggccagttaagtgaagccaatcctcattgggatagtcccttctaatggcttcagcagtttgaagcaagtgttcaatttgaggttcatccaagtctggatcactctcatccacaacatcattcagaagctcacagcattcccatatgctcatttccatcctgtttagtttgctgtactcttccctcatcttctttacctacattacattaaatttaattatttattttttaaaaaaaagagttaccaaactttcatttaaagaaaaaaatgaaaccaaatacttacaaaatcaaatgtttggttgaggtgattaatcctatagaagttctccacacccggctgcctctctccttcaacctcatagtccctgttattttcattcacatatactttattaagagcatctacaccatctccgtattgtattaaattaacgcaacactaagtttaaaagcaagtttgtattgtactaactaattaacataacactttcctaacacttcacttgtgacactatttttctcgtcatatggcacacttgttcgagggataatgaggatctgtgggccaaggcctgattacacgggccgaaaacaatttaattgagctagctttgttggaaacccagatttcaaactaaggctaaggaaagaatgggccacagggccccatgttgattgcatttttctat

SEQ ID NO: 19782 - DNA, 6453 bp, Cannabis sativa
  modified_base (927)..(939): a, c, t, g, unknown or other
atctaggaatacatttaatcacacaatcttgattatttttcactgtgttgacaacacaataaataagtatatcaatgtgataagtgttatactcaaaattcagtgagcacatcagaggaagacacgtgtcaagatgggaaaacaaagggctcaaacacgcaatcgtaagtacacttggcatggaacaactcgttagaaacataatttgcagagtatgtttataactcggttggctgaatggtcttttgcgaggcagaaacgtacaaactgctaacttatgtatcgacgagaaaccatgtgagtgcaagtgtgcatgatgaggcgtcaacctcactgcgtgaaagagaaactataacgataaaaatacttagcgtatattacatggtatacaaactaagtataaacagtatggtgaatcaagatgacagatagcgaggtgtctatctcactgtaagatggcatacatttgaggaagattatcccgacaccaaaaaatatagttatcaaagttaagaaaaaatattaatctcgggaagtctgatgacaagcaactgcttgccatcaaaattaacccgattcctagtgaggcatccccacgagataaggcttaccatatatccttaaatgtgtgttcatctcggccccataaaagcgggatacttacagctgtgtgaattataaattaaaacctcatttactaggcgtgatttgtaattaaatcccaagatttgagggaataattgatgtaacgattaaagtcaacttttgtaattcactgcccactatgtaattataaatagtgacagacaagatcaaaaaaggggacaaaaaatatcatacgagagaggcccttaaaaaacaaacacgatcagaaatctgaataagattgagtcgtggactatgcataattttaactgcaaaaccacnnnnnnnnnnnnntgttcatatataatttttctatagcttttattttttcggtatgaaatcattaccgtgaggctcaaatttagttaacaaaaatctatgttaacagtttggtgctttcattgagagcctctgtgagaaagctcagaaaaggcctcctcacctaaaagtaatggatgacaccgaagataataatcctcaagaagcaatcagtcatctccctggaaagaaccattgagtcctcagggatctattgagtcatcacatgaacagacggtaagccccaggaaaacccagtattggggtcccttgcttgacggaccttgggtaaacaacaatcggccacttcctaaccagattgataaggatggtgcctacgatccaaccagatacataccaatcaggaattagaaaatcgtcatcttacacgttgattggaggaagcaaactggcgtaacgccgagttagagcgtgagatagtcgcaataagggcagcacaggagaatgatacccaaaatcaacctgaccttgggagaagagattcacaaggcaaacctcgcgactcgcaaaccaaggggcaggagacaacccagagatatattcagaactctcaagagatgcaacctgagaaaactaaggaaaatttgggagtaaggttcgaccgcagtcacgacaggagtgatctacgagagcatctaaacttgaaaaagattgacctttgtcaacgacttagtccaaagctgaagaattcactccatttgcgaatggacgggttagagaataagttcagaaggcatcaagtcacgaaaactagaagacaaccggggcatgaaactgttggagaacttgattcggaagcctcaggatcaaagaaaaaagacgattccaaaaggctgcccaaggataagaaacccaacaagtatatccccctttatgctgaacataccgagcttaaggaaactcgggaaaatatctacctcacacatgtacaggaagtcatttttagtgagccaaaacctatgaaaaatgcgaggcgtaaaagggatccaactaaatggtgtgaatatcatggagatattggtcataccacggaagaatgtcgccagctgaaagatgagataaaaggtctcatatcacaaggacacgatatataaaggggtaggacgatgtccatgatcagctcgatctacccaataactcaagcaacccaggattataaccctcctctgtaagaggaagggacacctcagttatctcaaaagggagcaattcacaagaatacaaggggcagttactccggtaaaacaaatttgcaaaagaattgcgacctggatagatattggatcactatggttgccatatcaagctgtcgcgtggaaagttggacgtcaattacctctctcacttcatgtagaaatttaaaatccaggagtttctaaatttcttgtgcaaaggaacaccagaaaatagcatgagtattagactctcctctaaaaccacatagatcacatgaattgttagagactatattttttttttccaacccatagtaagtaagatttcatggaaatccctccacgcaaaatgtaacattacattaaattttatataaccaaatatttagtttgacaaataaatcttcatttaccgtgccgctgtaaccaaacactctgagaagattgcgcgccaaaaagtttttttttttttcctttagagagagagagaatgagttcagtggtgggatggtatggaccgcttatcgatctctcaagtgtcgctcttcacatcggcgattttgttcagcttctcgttttcgttcaccgatccactcccgttcaggtctctccctctctctctcttatatatttgttttgaaattttgtgtttgtttcttggtaaattaccgataccattagcaaatggatgtgtgttgttgtaacgtaaatatatatttatatatatgcagtttaagttatggaagggaggagaagtaattaggagggacattcaggtaggtgatgatagcaggccctacttccccatttctatttggcaaaagcaaatggcatcaatggtcgtacccggtgatattgttttgcttcaaagtaatttaattttcccaaattccaactccttttaattttttacaactttttttttttttttttaatttgttgtattgtttttttcttgaaaaatttcagatgttaagctaaccaagtatggagatgttgtcgaggggagaatgattcattgttctaccttacttcctctaattcaccatcataactcacttgcttccaaaggtacaattcatattcatatagatagtgcttttggtgtgaagaaattttgccagattattagatttagttcctttctaatgtgtagaaataaattgtcatatataagatgaatcttttcagtttggttttgagatggaaccccatgtatcttaggctcttccatttcaaattctaacagagattacacgatggtggtgggtttgttgtttggtataaaggataagtagaggtaaattgggtactcaaaaagcaaaatgtaattatatagctgaaatctcatcctcttctttcacttatctctagtaccagacataacagtgaagagtattttctttcttgtctgatttctttccttaatatttcttacgaaaatttccgcctttctttttgaaacactagtaaatttgttgccaagcattgccctgaatgaatgtcttcgtaggtatggatgagctagtagaggcatgtagaataggaacaacaactaaagaaaaactcacaaaggtaataaaatggctgcaacgaacagggttcaccttttgcagcattcaaccacaaggccatccggtaatttatacctttttgaggttactttaagtgttcaatcctttgatgtcatgtcaaatttttatttattgtagtttgttaaagaataaatctatatacctcttgcatctctaacttgtatgaattttgatttctgtggtgaaaattgtatttcaaagttaagagctttgggtttgggatgatttgttgggtcttatatttaattgcttgatattcaaaaatcgctgtcacaactttcttcttcaatgtggcttcttaatcattttaatattaatctatacttgggtcagggtaactgctatttttatgtttttcaattgttgacattttgtttggggtaaaatatgtccaacttgtgaaagttgaaacattgtcttatcaaataactaatcaattgccaaaagtaacttatcaacgttaaaattaggaagtcagtgtcgagctaatgtaatgtaatgcaatgcaatatattatgcatgtttaaaatattttaaggaatcgaaagttgtacatgaatctgaagaaaaattaacagatcagatgactgtggcagtttttgggcattatagggaaaattggatgtccaacattttaaagagggtaaaatgtgttatactatcttacttgacatttgtttcttgcatttcctgctccatttatcatatactatattgtggtgattatatagtccttggtgtttctaattgcaatgtgatgcttaaagtagggatcaaataactggtatttgaatacaatggttaaggattgatttgtagcagtttgatgttctttataactcaaatactcttctcctattctgaaaattactttatatttgtaagctcataccataagtattggtggtcatacatagctcttataagagtgatatgtgtcgaaatgtgcatttagttttggattgaattaagatatgatgctgataattacatatttctgttcattattgttctttcattattatgtttcttatggttacaaaactcagtattgctgttatataattactcctcctttattgctttgtagaaattggttagaatggatgtgtattatacctatctccttaacatgtctggtctatgtcttgcactaaactccagaggtttttgttcaaatactgaaaacagtacccgcagaagaagatacacttgaaaagaaactggaaacttccagaaaaaagagaatcaaagaactgtatttcactattggaagtatcacacttaaccgattcatgtaaagctgtctttcacgcatgtgttggagaaatttttctaccatctatctctacaactctgagtgaatctgataaagagaggatgttcatcagcagaaggctatttaaaacaagagacactagtttagtaactgatctcatatgtactggctgcaaactatgcggttctcctttggatactcagcatgagtaaatatcgtttgtaaactgctgcttttatagccaagtcaatcaacttgagaactgaatggtttcttcctcttctttgttgcagcaggtcaaggttagagaatgaagcagctcctttatattgctcaaaaagcgtaaaccgccttcatgtagtagacttcatatacaggcctttcatggtatggatgttatcacattgtttttctcatctcatgcatttttttttttggccttatcaacttattttagtgttttgaattttaatctacacctagttatatatatgggatgaatctgagtataccctgctcctcgtcaaaaacaaggcagcagagctcttgtttgggaacatcacagctgagagagtgtattcgagcttcagagaacgacatggtgaccaaaatgttgatccagatccagtagatgcctcactgctcaaacgttatgggatgttagaggatttgggttgttgtacatcagctgcaaattcaagcttgaaattgaagagcaaacctattgtaaatactgtgaacttttatctgatctggttaattcttttaagagctttactgcaagaaagaaagaacagtccattgaaatttgaagtcagtgtaaatactggcttggataaagaaaatggaaggtttgaaatggaatctgtttggattccatttccctgaatcaacatttccatctttgccatttacttttcccaaattgctcaaaataaagagttggtttagtcgtcatggttcttgttctgtgcaatttttatgcttaggttctaaactatacttgtagattttgaggtagtatattgggaaaaaaaaaagttatgtttcataacttaaaaaactgttttctgttttttaaaattgaaaacagtttttaaaacaaataggggtcgtttggtaaaattttttaaaaataatttttaaaaattgagttttaaaaaactaaaaaacagaaaacatcaaaatgttgtttttaattttcaaaaacaatttttttttttttgtctaacatattacattttatatttttgctcacatactcgaatcctagacccgaaaccatacccgaacccaaacctggatgggttcatgtcatggtatggtgttaaaatattaagaacttgtttggctgtgttttcagttttcagtttttaaaagtgagaatagaaaatagttttttgtcattttaaaattttaa

SEQ ID NO: 19783 - DNA, 4872 bp, Cannabis sativa
agattgtaatgggttttatttatggcacaaaacccaacaaaagatccatgtatacctactatagtcatctaggaaatggatatagtatctatacccttctttggattatatgtgagagggaccccataagtccgtgtgaaccaattctaatggttgggatgctctagactcagagagagaataaggtagcatatgactctttccttgtttgcaggcctcacaaaactgcaaggcttttaaatttggtggtatatgtaactggtttaggatcttggcaagagttctttaggcagggtgcccaagtttcatatgccacaagttaacattagacttttgtaaagtaaaggcctgaacagtaggattggaacatgaaaaagtattctctttattaatggaagagttattacgaaaggttatagctgatgtagcagctatattagtacaatttgattctttttctgatctagagctaataatagatgttattggcggcctaagtgtagaagtagcaacatgacattgaagattgacttctggtgtgacaaaggatcgatgagacaatgtgtataggccgtttttaactctccccttaagcaaaacagtccctgtgaccttgtccttgacaaaacaacaagtagagtgaaattctagaaatacatggttatctttagtgagctgaagaacactaacaagattcttggtaatatgagggaattttagagcataatgtaactttaaaggaacactggaggagggtaaagaagtgttaccaacatgggaaatggcaagtttcttgccattgcctacagtgagagcatcgggtctcgagtatggcatttcagaatccaattgttccattccttgggcaacattattagtaaccccagtatcagcatacaaatcagaatcatcgatgaactctggtagagtattagatgaataagcttgaggattgtcttgctcttcaattttagtcaaaaatgcctttgaatctcccatttgaggagtgacaaagttcttgtcaaatgtataatggcaaacgactgttgtgtgtccaggtttgtgacacacttgacaaagcaatcttggaattgaaggagggccagttctttgatttcttgttgggactcggttcatgttaccatacgatcctctttgctgagaattgtagaaacgatgaggggcaccagaagcatttttttgatttttaatattgagatttgcagtgatttttgaggaaagatcattcacattgaagtgcctttcaatcctactctcatgggttagcaataatgactgaatagactcaaaagaaaggttatctacaagacttgtaacatgaaccactataggatcatattcaggtcccaaaccatttagtaagtgcataatcagatcactttcatccattggatgcccagcagtggataaagaatcagctaacaacttgactttatcatagtaatcagatatagagagattacccttttgaattgttgacaactgagacttgatttgaagaagacgagccttagactgacttgaaaaatctttgaggcagggcacgccaagcatcaaaagacgaatcatgctgagccagggaaccaagaattgtttctgtcattgaagagcagagccaactgagaagaagttgatcctttcgtttccatgccgtgaattctgggttgatttctccggtgatgaggcgctgaacaggagccacaccagtgaggagtatatcatcaagtccatgcccgattactgtgggaatcacttgagatttccacgcaaggtagttcgtgcgatcgagacgaactgtaagagatgaattgagggaattttagatcggattccattgatgcagaggtgcaggtggtggttgagtggtggcggaaggtgttgctgaagtgtgctctgggtgtcgaggttccatgaacgacgctagtcaatgacttcctgataccatgaaagagatgcttatcaatacaattcctaactagtaacaatatagaattggacacaaaaaattgtaaaagctctgaaaacttatgagctgaacctttcatttatatagagaaagattacaagaaaaggctgataacagaatgtaacaaactctatcaaaacagagtacaagtggacaaagaactaacaacatgtactaactgtaagaaataacagaatacagcagatttgaaaaagtttgttatttatcatcccccctcaagcgaaagggagtagaacacactttgagcttggatttgagatagagaaatcgatcagtagagagagattttgttagaatatcagccgtttggtctattgatggaacatatcgaacttcaatttctttggctagaatttgatctctcatgaagtgaagatcaatctctatatgcttcgatttggcgtgaaacactgggttcgctgcaagagaggcaactccttggttgtcaacccatattattggagcagctgggagattcacatgaagttcatgtaaaatagagtgtagccacttaatctcggctgatgtatttgctaaggcacgaaactcactttcggtgctagaccgagcaaccacttgttgtttctttgctgaccaagatatgaggtttcctcctaggaaaatagcatagcctcttatcgatctccgatcatctgagcaactagcccaatcgacatccgagtaggcttgtaaacaaagccttggagcaggtcgaatgagtagaccttcatggattgtgcctttaagatatctcaataatctcttgcaagcatcccagtgaacattagtaagggcatgaataaattgactcaatttattcacaatgaaagcaacatcgggtcgagttaatgtaagatattgtaaggcccctaatgtgctgcgatatagcgtatgatcagcaaaaggttctccattagtgagagatagaacatgagaggcactagttgggctgggacatggtttggtgccatccattttgagcttggtcaataggtctgtaatatatttagattgagaaagatagagacctgatggtgtcctatgtacttcaaccccaagaaaaatagtgtaaggagcccaagtctttgatatcaaattcatgattgagggctgttataacagcagagatagcagttggatttgggtctgttattagtatgtcatctacatacactaataacacaatgagactttgtcctgaaccttgaaagaacaacgagttgtttgattttgacagttgaaatcccttgctgtaaagtgtagatttgagcttttgattccaagctcttggagcttgcttgaggccatataattccttgttcagcttgaacacatgagtggggtattcaggatcaacaaaacctggtggttgtggcatgtacaacgtttcttcaagagttccatgaaggaaggcatttgaaacatcaagttgtttgattggcctttaaaagagactgcaagggtgagcaaaattcgaacagtagctagtttgaccacgggactaaaggtctctttgaaatcaattccaggggtttgggagtacccttttgcaaccagccgtgacttgtatttgtcaagtgacccatttgcgttgagtttaattctatgaacccacttgttgcctactacattcattgagggatggtatggaaccagagtccaagtattattcttgattaaggcacggtttttcagtttgcattgatgcaaaccatttggggtctgcaagagcatgttttaggtttgctggttctttaggcaatagggattcgggtaaagggtaagaggtggcatgataggcttttggcttagatatttcagacttggatcgtgtttgtatggagtgagtattgttgttgtgggaggatttgggacagtggttgataatggctcagtggaaatgattggtgtggggtggttgattagaagtcactgggagaatgcaatctgaggcatcgattgctggtgtaggatgagatgtactctggtttgatgtattctggacagtaggcaaagaaggtgtaacagcaggagggttcgtggtgatagtccttgatgctgcaggcataacagtaacagcagctggtggaattagtggcctgttgtctggtgcagcagctggtgcatgttgcacaccagagtttgatgtatggggtacctcagtaaatgtgggaatagaattagtaggcaatataggcgttgaaaaagttgcagtaggcataggtgagttatgagaagaatgtatctgaggtaaagttgcagatggagagccaggaaattcttcctcattaaattcaacatttcgagctacatatattcatccatttttactttgacaaagatatcccttgtgaaccagagagtagccaaggaaaatgcatttattagacctgaagtttagtttatgaacattatatggtctgaggtaaggaaaacatgcacaaccgaatggtttgagaaaggtgtagtcaggtgctttatggaataagcactcaaatggagatatgtctcttataacagaggtgggcagttgattaatcacatatgtggctgtttgaaaagcattccaccagtaagataaatcaagattagcttgagcaagtaatgtcaacctagtttcagtaatgtggcgatgctttctttcagcacgaccattttgttcatgatcatgtgggcaagggtgttgaaagtgaaccctatgttggtttagaaatttggccaaggacctatatccacctcaacaatctgattggacacttttaatgggaaaattaaattgtttttcagcaagtagtttaaattgaagaaaggtaggataggcttgagactttagggtaaggggaaagatgttggaatttatttta

SEQ ID NO: 19784 - DNA, 6354 bp, Cannabis sativa
tctctctctctctctctcgcttctctctttgtttctctacgatgttctgcttccattttaggttcttgtgatctcaacgactcaacttagggcaggtcaataaatcggcgggtccattcgacgccttactatgcgtgggacaattcttcccagactcgccggagaggctcgaagagttcatgggatacgttgaaggccgttccgaaatacctattcccacttacttcatcggcgattatggcgttggtgcccctaaagtcctgttagccgcttcaaaggggtccgggaaccaaggattcaagatggacggcctgaaagtttgcaagaatctttactggttgaaaggcagtggaaagttcactctccaaggtatatgctttattacttgttgcttgtttggttactgagaaaatgggtggcttactaatgttgtttttagtagttttaaattctattttactgtttacgaatacccatttcattggcaacaagtttttactccctgcgcgagttatgaggttgagatgtgtgtagtgtaaagtaggcatgttagaaacacctttgtagaggcagaagttgttttgagttgtggctaatacacttaggcttagggtggcaattcaggtcaagatacaagctcaaactcaatactaaatattgcgggttaggaattaggataataaaaaatagaagcaatttgaaattgggtggtaatacactataattatttgagttaggttagagtcaacttatgtgacacaaaattgattcgaattgatctgtttatgttctatatatcattaaaattattaattagagttatattattatttatttcataaaaaagttaaatctaaagttaggatagcttatttacacttgatattaagaacattgttcattataataatttatgataaattatttaactacttaattatttatttgtaacttaatatatttttatttagtgtattattcaaatgagtcaaataaaattgatattattaaaaatacatataaactcaaatttttgatactaatcattttgatcatgacagattgagttagggttgatcaattagggatgtcaacctttttcaaaagaaaaaaaaaatagagatgtcaacttgcataacatggacacaaatttgacacaacgacttgaattgtttattgatatgctaatgagtaatgaccatacttgacattggtatttgtagttttgttttcccaggaacttgctaagttttgtttggctgaattactgaacttttatatggattatgtgtggcctacttgtccggtaggcattcttcgagtggtcaacaatttgggacatacagtcaggatgatgttgatgcattgcgcgcaattgctgaggatcctggaattgttgatatattccttacatatccttttaatttctttaggagtatagattgtctttttgtttctttttaaattcatgttcacttatattttattttttttgtgtcttcaaccttgatgtctttatagagtcctccttaattaatcatcactaatgaatggccaactggggttacaaatagcgcgtcagcatctgacattcctgctgaaatctcagaatctactggtagtgactcaacagttacagagttagtatctgaaatcaagccgcggtatgtgatttcggagattttcactgcttgaaaataatatatgatgagtgatcctagtcaacctatatttcataatgcaaattgacaatggcattgtatgctgtagtgagtttaccttatgctggctgctttcaagcctgtatattctaaccaaatcttagcatataaggtctctatggattataggttgttattcttctgattgaagtttgttgtctgtggtagttatcatattgcaggtaccaagggtgtgttctatgctcgggaaccttactcgaatgttgatgctgtgcatgtgacccgcttcattggcctttctgctgttggaaataaggataagcaggtgttttcatttgttaaatgttgtacataaactccctctaataataaagattattacactgctcttagctttggcctttgacatttcataactttcagttttacatctgcctcagaaatttattcatgcaatttctccaactcctgcatcaattatgtctgcttctgagattagtatgaagtcaacaaacacaaccatatctccttactctacaccactgatggttgatggaaacgaagcttccaagagatctagtgatagtgtcactgactcacaatactggagatatgatgtctccacaaaacggcagaaacatggtgctggaagtggtgataagatgtgttttaaatttgtatcctctggcacttgtccacgagaggaaaattgtcactttcaacatgatatggctgcaagggagcaatttatgaggggtgtttgttttgactttattaataagggtaaatgcgaaagaggtccagattgcaacttcaagcatagtttacaggaagaaagtgaaggcaatgctgacaggagacgacggtctgataatgcttcagctaggttggttaaaaattattattacaaatcttcctttaatttattgggtgcactgctcattttactttagtttgactcaagatacttttgctatgtcttattgtctttgattaattttgtttgtaattatgtacattttcatgacaatgctgttatgtacacaagtgttcagatcaaaagagtgctggttttgtatatcaagcgccaatgtagagtcacatctgatcatcagtattggagaaaatttctactgtgcattggctaaagggccacttgtgaaagaccatgttttggtgattccagtggaacatttgcctaatactattgctttatcccagcaatgtgaaagtgagcttgatagatttcaaaatagcctcaagaagttttataagaaccaagagaaggaagcagtatttttcgagtgggtttcaaaacgaagtacacatgctaatctgcaggtaaagggtcttataagtgtcttagttggagttatattaacgcagagaattttctgtttctttatatcacaagttgtgtgaagtgtgctttgtttgttttgtgggcaaacacaaacatgaaatctgaagagacagagatcttacttatagtttcctacatcaaaatcacattttcacacttgcagtttaattttcttgtacaattgtgtaggtaattcctgttccatcatccaaggcagctgctgttcaaaatatatttaattttgctgctgacaagatgggcttcaaatttgaagtcacaaaatgtaagtcaatgttgtgctgtgtatttctgttctgattggtggaaattgttagcttggattctgcacattccttggtttggtacaaagatgattttttttttttttgataatttgaagtatgcaatctgatttacatttgtgtagtccaagctgtcttcatatcatgtttccggtgtccagtttaaactagaagttctaattaatatctttattgagtctttccccaaatgaatgttgttttaactggtgttggttttgtgtaagatctgacgattaatagtttttcacttctatagatttatgctactttatctcttgattgcagtcaataataatttggagggaagaaatagtctgaggacacagtttgacaagaatcttagtttcttctacgttgaactccctgatggcactattttatcacatgtggtcggagaaaatgagaaattcccagctcaatttggacgtgaggtattcaataagttggtgccattgctaatttggtcatggcatctacagccaactcttttccttgtttcgttttaatgtgaactttcttcatatttttttaagacatgagttcaaatcatctcaattttggaatctgtttgtgtctaatttctcaaacttaaattcatttcaagtttcttttcctggtggcatttaatgtgttaaaataacatgtaaatcatggcatggaaattgaacgattagttcagtatgtgacatactcatcttcctttctatttaactgttcgttgagtgtcttttacatgtaacatttgcaggttctggcaggtctgctggacatggcaaagagagctgattggaggacttgtacttgcagcaaagaagaagagacgaagatggcaggcgacttcaaggctcaattccaagaatttgatccgaacgagtgatttctaacgggaaatctagtttttggcaatctttagttaacaattcagtctttctaccatttggtgttccatgttgctctagtgtgtgataacgatgttattacgttaaaatgcaggtatatgtgatctagaagagaagagacgcactagttttttagatggcagccattttttcttgactaaattagatggctgccttttttggttggtctctgtttaacataatttaaattcaaattttgggtggatcgccaggttgattgggccattggtgcagagtaaagctaacgcaatgaatactaattcaaacccaaatccccgtttaccatttttggtgtggcttctattattgtcctaggccattgactcaactatgtatcctaatagtttattatactcagcgttgtagtaattttggtgccactccattagaaagcaagctaaaattttattgcattcttgaagttggtgagatttaattttatatatggctctatggttttgttataatcgggatccaaaattaagttgtgtttgtactataaatgaaatgagtaccacatattatattatatggcattttcatgaagttaataagtgatttcagcctggaagagctgtgagtgacactattagtattacattaatataaattatataaattgagctgtaatgacaggatttttagtaggctcacaacaaggaataggactgagccaaaagtcaagctgggtgtagcccatttcatagtaaatgagatttcctattctataagatagttgccttgtgagttatgccaaggctggaggaggcaatggaatggaagtcacgtggaggaatatccatttatgaaggagcatcttttcagccttaaaaaaggggcaaaacgaaagcaacacaagtgattagataattaaccaaaattacagcaaaaggtagattggaattgtggggtaaagagtaaaagagttagttgcatggcatgttgcacatggttttgatttgattaaagagaaagtagctaaatcttttagggctccaattcccaaccatactctctctataaaaggttttagttggtaaagaaactcatacattgggatgccagtcactattaaaagttctgcgtttatattttatttaggccttaaagcaagcaacagtgccaggaagcaaagaagtgtgaaggaaggagtgttgggcaaggaaaccatagatcacatgggtatttttttaagctttgaaagggagttttattatgttgataatttttattccacgttgtatggggcttcaaccattctatatgtagaaaagataggaaggaaaaaaaaatagataaataataggtactctctagatctcaagtggtccaataaacaaagaatcatgtgagatgaaaaatggttgttgatgtaggtcctatatatgaagttccttttttttttttttttttgagtgttatatatgaagttccttctttacaaccctcgaacctttggcctcaaggcaaagtgtcaaagactctaccgtcaaggagggttgagggttgtgaagttcctagttatcaaaacttataaataagagaactgactggattcttgtttggcccacaaggaaatgatgttcatacattattcctttccttcatagatccatacttgtaaatagttcaatcatcacgaggataatagttatcgctaaataaaaaaaaatcaaaaaaatggttgtgtttggttttattacctaacaataataatgtcttagaagagtgtttgtttatatttaaacaaccaaaatgaagataatgaataaatgaataaataatatgtggtactaaaaatcttaatagtgaatcattacacttatccaatatatatgtatagtatacatgagagagggagagtaaagagagaaagtttgataatattagaagttcccctgttttttttttcaaaaattatatataaaagctaagaaaataaaaatagtgattttacaatccacaccgttaagagagatgtattgatgcacccctacttgtttcggaatctagaaaaaaaatttagtctaattgtttttcatattcatgtacattatagctattta

SEQ ID NO: 19785 - DNA, 4683 bp, Cannabis sativa
aaaaaaaagagtttgtatttttgaaaaaaaaaattaataattttttttttttttttttttaaagactgaagaagacccaagaacttgaacctccctaaacccctgaatccgattcgtccgagttaaagaactcagaactcagattgtgttggaaaaatggcggaatctatctccaaccttcagggccttctctttcagtaatctccctctctccaaagctctgattttctgaattttctccaatttctctttgtttgttgttttcatattttccttgcattttcttctcaggttatcggagccgatcaggaaaacaatattggaaaccccatatactccaccggagaccggaaacatctccgtcaaagccgtaatcgatcaacttcttcctgacaaatcctcacgtccagattctaatttcagcgacacccgaattcggaactcaataaaggacttctctctcgcttgtgctttactatcctcggctcggtccccaacccacgagctcctctcatggattcctctgtccgtttcgattttggcagaatcggccttttgcgagctctcgaaagcccattgcgtcactttcagcgaaacgaatgcgaggaagatcgcggaactgggtttgaattatggaatgatgaccgaggagaatagattaattgcggaattgattcctcaggtgctcccatcgttgaaggacattattcaggagagttctgtcgataaatcagatgaagtcaatgagttctcggcggcttcggctagagcccccgttggtttcgccattgttgctgcttatcagtttagatggtttgtgacgaaggtttgaagttgtggtagacttttataaatttttaagcacttgtgtttgtttttgtggcttttatttgatctgggttatcgttttttttttcttcagattgattatccacatttggggaaattgtgtgctttagtgataccttgtgcgcttacggccgtcgatcactggtcgacagaggttaaagtatgtgcttttattaacttgtatatttattacattcttttcccatcattttttttttgatattttgtggttttaattaatggttgtgcgttactagttatgtggtatttagctcagaattattaactttttcttatctttttgaatgtgttgaattgtttatcttatatggaaaatcattggatattgttagcaggtggatcatacttgttttcctctgttaatttcagggtcagggaatgattagctttatacacatagggaagaatgtaaatgctgctgagcttggttcgtatagtgatgtgattttggatgcatgctgccaaaatattgcttctgatgatgagatatggcatctcgtggtagagatgtcagtggttcttgtgacttgcatccaactaagtaatcctcgcagtccatggtatacttgtttatctgtatggtttgcagtgttacttcatttttgttatatattactttatatggtgtttttctacattgctggttctttacaattattatggatgagactaaaatcaagctttgcgaaagtggttttgtttcatttcagttttcactgggttgatttagattgttattgctaacttaagtgctgtctttgttttctgttcggtgttctttttcgtacctaccaactaatgctcactttatctcatttattgcttttcaatggccattaacccttgtacaggtttgaaaggattctaaatgagatgctgagccatttggaccgccaaccaaggaacatggatcgtcgtgttgcgtggcttcaacatgttgagccacttttcaatagtattggtcttttcttattagcccattttaggcgaatttttcctctattctttcagtggatgggtgctgatgatgatgagactgttatactggtaaggacattttcataaatgagaactgtttatttgatctcatatcttttgctcccttgctgtggatgaagatatgtgttttcatgtgggtgtattggattgaaaatagataatcaacttaacccgatagaatcggatagatcatgtcagtgacaataagactataagtgccatcctcaattatatcctctctctattcagcaaagaaaactatatcctctctctctctaagcttgtattttaagaaattgagctctacctaaatagttataagttgtaacaatggtatcaaagcaaaaacatttgtattggagtactatcattgaagggacgtcttaagtgaaatcacttacagggtgtcaaacagcgccaactttgagtaagtggctgtggaaatcaactctaatggaggtttgtaattgcgatcacgtgggactgagtatgtgctatcttttataacaccttagtcatcttcctcttattggttagtgttgagaatgagttatactttagcctaagttgttgcaacctacagatgtatctctaggtgtttgttatatttctgtacttggtttttaacccgtttgtaataattctgataatataaatcttttacaggttctgaaacagatttatacagttataaggctaacatggatccgtaacacaccctatgttgataggtaagcaaactagtatccaattttcaaataagaaaaaagaggttacgtattaagtaaagagtgctctaaaatgatgtatgttggtgaacacaaatcaactttatttatccatctctccatccttcttgtaacactagatatatattggtaggaaggagtactttctatcatgttatatagtttattgatgatttgattttaggctggtggatgaactaagtgcattgtacaaaggagcatcatcgaaaaagtctcgtgaagatattaaaagactcatttctgagattctgactttgctgcagcagtaaggattattctttttccacttgtttgcagaaaagcttttgctaacttacttgttataaccttattagcttatttgcttttcttccactgttgtgaagatgcaaaggtgtgcagtttgaagcagcatacgacaagtacagagacgatccaagcttcacagatgctgttcccactcaaagttgaagaaacactagaatggtaatgaagaacctatgatatacttactctcaaatgagggcttgaggattgaggattcaacatgcattgcaggttacttggtccaaatgcatgaaacagtgaatcattccatatttatatgttgggccatatcattgtgatgcaggtctccagtccttgtgtttttcttcaatggagagggagtttgaaaatgataccattgcaggtgacaaattaatcaagtgcaatattgtgtatgttgatgaaacgttgctgctttgcaatgctttgattatttcaatattgtacaaagttgttaatctgcatgatgagagtgtgagagaccttttgccttttggtaaacgagaaagaaggcctttaatacttttcagcttaatagaagagataaaggtagtattagaggatgctctttcctaaagattaatattgtgtaatggaatagttttgtttaattgggaatttattgctgcgtaatttatgaaaaagctttcccaactttcagaaagaaaatgctaacgtgtcattgtactacttaagattctcttttctttgcctaattcacgattctatttaacaaatcttaggtgcaatacatattatttagagtaattggtggccaagttttagtttttatgcacataattcctttatttttttggccaaaaccctcagaaatttaattgacaattcaaatatacaaagaaaattagacggagttttgttaaaaaaaaaaaaaaaagaaaaagagttaagtgtaaaaaaattaaaataaaaaaggatttttccgtaaataatagaaaaataactctattatttatttgttcatttattcatactcaaagtccataatccttggcagataaaaataatatatttaaaaagagttaaacaaagtatgtgttgagtaaaattccaattagaaagagaaaatgtaaaataccatataaatatataatgtggtaaactataaaatataaaaagaaatccagattcacaaattattttttcttcacttattggagggaacaaagaccgacccccttaatacagttagctgtcataaattaaagatctgaattattgaaacagacaaatgttcaaatccaacggtatctcaagatgtatatatatatataatatttagttaatccacatcatattgattttataaatatcttcttgatgtcaaacagttccactttcatgtgaatttatttatgattgttaatactgagaaaggaacaagttaaaaaagagatgatcagattttctgctggcatgtttgtattataaatatacatatatttatccccagccattaatttctttgagctgcatgttagaaataagggtaattatttgttttagctgtttttcttttgttgtttctgtttaatatattcccttaattatctcaaaaaaaaaaaaaaatgaagaagaaagtagttttgtcttctaattcttaaataaaaaaaattgtcttctaatttgttaaattttaccaaagtttatagaaaagtgaaatttttatacaataaactaaaacaaaaaaacattttccaaaataaataaataaata

SEQ ID NO: 19786 - DNA, 2934 bp, Cannabis sativa
  modified_base (648)..(649): a, c, t, g, unknown or other
  modified_base (1814)..(1824): a, c, t, g, unknown or other
ttgtatcactttcaaataacatagaaaaaaattagcataaaatttagtatacgtgtctcgcacgtagtttttgctagtgtatatatatatatatatatatatttggttacttagacgtgcctatggcacatccttttttttttcctcttacaaataagaaactttaataaaattaaataaagcatactcacatttttgagtgtacatatataatttataaatagaattaaatttttaacaaatgtattttttaattaaagataaaatgtaataaatatttatatattttggtgcactttgaacaggtagtactcatgaatgggtaatagtagaaaaaattgagtttttatacttaatttttctattttattagaaaaatctcttatttttacattatatggattgagagtgttccatctgctgacaaataatgatacaaaaaataatttcagcaaaaaaatgataaaaaaatgttatgttagacttaaatatttttcgtataaacacatttttaatatagtacaaaaagatatattttctgatattttctttaattaagtagcttaattaaacatataaatttaaaattttcttttattattcatcatcgaatcaaatttaatgatttaatatttttaaaattaatanntatagttaaatttgtttagtatcaatgagtaatacccattgaaaagtgttatatatatatatatattaaaattatagttcaaacatatatatgttaatatttttatgttattgttcaattttgttcattcgtttgtattttgttaagttctatttttgtgggtcaataaaaatttgaaaaattcgaaaacttattggactactaagtccctaaaaatttgataaaaatttagagtgcaattcgtgaatataggttttctttttcttctaatcttaaatttttaaatttattagtttatatatgtggcgtttggtaatacttttatttttaaatctttttatcacaaaaataaaagtatttttttttttaaaataaaaaatgtgttttataaccacttgttttttaattttaaaaataataaacaaaagtgtattctataaatttcatttttattttcattagttgattttatttaagtcgggtccgaagtcgagatctgggtcggggtctaggtctaggtcttggtttgggtccaaggtcatggtttgggatccaggtttgagtctgagttccaaggtctagattgaggtcgaagcccaaaatatagattaagaaagaaaaaaattgtttaaaattttttgaaaatgaccttttttttattcaaaattgttcaaattttaattatcaattaaaaaatcaaaaagtgaagacacttttataaaacataattttaattattgctatgttattgtttggttttgtttgttggtattttgttaatttctatttttgtgagtcagtaaaaattaaaaaatccaaattttttttgaagaactactaagtagaaatttaatgaaaatttagataactatatgtcaatataggttttccttttcttttaatcttgaatttttaaatttattagttggtagggatgttcgcgatgctggtggtagagtttttgactattttttttaaatcaacccgcacatgcggtttttctaatttcccaaatcgcatctgcaccgcgaaactaaaaaactgtaacaaatcgcactgtaaaaaatggtgtagtacggtacgatttttgtggtttagactatcacaaaataattaaactatcacaaatacaacaaatcttgagcaacacttgtcaaaaataccnnnnnnnnnnnaaataaatatgaaaaaaagtttcaagttttaacaatacaataattagtgggctttgggctgagccttcacataatggacctaaataaatataaaaaatggtatttttatattatgcggtgcagtgcgatttgaactgtatattaacaattcaaaaccggaaattacaccgcactgcacggtttaggtaaaattcaaaccgcgaccgcaccgtaaaaaatttcaaactgtattttttttgcagtgcggtgcgatgcaggcgatttgagcagtttgatgaacaaccctaatagtttgtgtgtttggtaataatttttaatcaaatttttatttttaaaattagaaaagtgaaaatattttctaaaatcatgttttataaaattgttttaaattctcaattttttaattaagaagcaaattttttttttaaaaaaatcactttcaaaatttttttaaacaattttttttcttaattaatattttaaactctgaccccaacctaaaccttgaaatccagatcccagactcgaatcctacctcggaatcaaaccgtgaaccatatctggacacccgccccaatgctggacctagacccggactctagtctcggatccgactcaaatataatcaataaataaaaatagaaataaaatttacagaatacacttttgttttttatttttaaaattacaaaaataaaaataattgtagaatacaatttgtttttcaaaactaaaaatataaaaaaaaattatttttatttttatgattaaagaatttaaaaacaaatatcacttggttagtttattgttttaaggtatttgtcaaacatatttatatatggatgtgatgtcaccaccgtagcagtttaatgtgagctaatacttgacatggatgaatgttaagttggtggacttgatgggctggtagtttgggctttgtcctaccggtgcataacgtctaaaatatcttgtggcttatatgagttggaccttcttatgggcttttacagtaatgggccttaatgttaagctcaagattgtttttttcttttcgggcgacttgaactaactttttatagaggaaattacactctatatcctttttatatt

SEQ ID NO: 19787 - DNA, 3769 bp, Cannabis sativa
gcaaaaggaattatgtataaaaaatgcttagttttttgaggcaaaatttgtttaactattgtttcacttgcatttaactttataaattcaaattttaattataaaacttttaaaactactaaactagtagcaaatttaaatttaaggtgtcattcggttacatatcacttatgggctgcttatgtgtacactcttatacacatgacacgtttaaattggtacacctaatattattatgtaaaaattatttttaaaattaaataaaattataaaaaataaaaaatattataaattttaaaataatttttatatttttaaaataataatattaggtgtaccaatataattttaacacatgtataaaaagtgtacacataagcaatctatattagcaattaactataaaaaataaataacatcttaaatttataagctagtttggagaattttacggttaaaatttaaatttagggagttaagtgcaagtagaatgatgttgagagaatttaacggcaaaaaaattctttattatttaattaaaagattaggaggttaattaaatatccatactgtctatttccagcgatttattaatatattataaaattattattattcattcactcttcctattggccttttccgtaatgggtgcctataataactcagtatttgtctaataaacccctaaaaaaatagactaacatataattatttaaataataaatatttataagattaaatctttagtctatcattttcataagtaaaaatccttggtctattcttgtcggtgacataacattttcgaccttaatttaatctaaattcatcatttaaattcagatataactaattaaaagcaaaattcttaaaagagaaaaaagaaaataataataattaatttaatgagcacatactattactagtcaactaaaaaaagaaaacagcaacacatttcttaacccaaaatctaaaaaaagcccacaaaactgtcggtggaagtaatggttaaaatctatataaatataaatcaataattatttttctaaatatatatttatttattttattttattttcactttatgattaataaaatctaagtgagtagccaaattaaaacgtggttggccagaaataactttgaggattaattattgtggataaagacaccaaaaagcgaagacaatcaaacgtggaaagcaatctttaaaaaagattccaaatgacagagatagtaaaacgggggcccactttaacataaaagcccaggcccattatacctgaacctaagcccacttaatcaaacactaatgtcggcatgtggctaaagccgagagcgagtgaagccgttaagccaagtggaagagtgagctggaaattaattatccaatgctctgcaagatccgctctggatttgatcagggtttggaccaatccaacggctgtcgtacgatctcacatttagtagatgaaagaagaaagtgggccccattacaaccatatgtcacggctgtacctaagctgtcccactctctcttagctgttaccataaattttttttatttttttcattttggggacaacaatgtctcgtgttgtattatagggtaaatattactttacatcatctctaaaatttactaaaaattttctctcacaatattttccgggattattttctgttttctcacactttctcggaaaataaaatatgaaagcaatattttgaaactatttttgtttgccatgttcgtgttcaactcccaagattataacattatctctatgaaaaaatacaaagtaattgggagcaacaaaacaaacatttttgaacatatttctttacacaaaattaattaaaaaaaaacaacactaagaagaaaatgaatgtatctctctctttctttttcatttttttttaataaacttcttaaaaaaaaaagtttccttttcccattttctttcattttgttctggtaaaatggtaaagaaactcctacaaaggaaaaataaataaaaaatattaattttaatttacagttttgctgacgcgattattatatccataataagaaagataccacctaacaaacttcctcaacccggtttgtaaatcggttgtgggtttgtacccgagttctcttcgggccaagctgatattagcatgagtaaacggaacgtcgccgtttccaggcatatccacaatattcctcttcgctttaaccttcaaatgtctttcaagaatgtccacaagcgttggtacagtaacaggtgacgtgttccccaagttaaagattctatacggggcgggtcctttcttctttccacccgacccggtactcttcgcagaagtatccaacgacccgagacaacccttaacaatatcatcaatgtaagtaaaatctcgggccaagtcgacccggttcttgccccgataaaccgtaatgggtttaccttgaagaatattacgggtgaaagagaagtaagccatgtcgggtcgaccccatggcccgtaaacagtgaagaatctcaaccctgtaatggacaaaccgtaaatgtgattgtaagtatgagtgatttcctcaccggctttcttcgtcgccgcgtagagacttgccggagaatcagtccgatccaattcggagaaaggaaccttgtcgtttagtccgtacacagagctagatgaagcccaaacaatcgatggttgaggattggccattttacatgcctcgagaagcgtgacgagtccagctatgttgctgtggacgtaagattggggattttccatggcgtagcggaccccagcttgagcagccaagtgcatcacgtgtgtaaacgcaaccacatcgaaaagcttatccaaaagcttagcgtcgttaatatctccctcaacgatgaagactccatggtcattaagcattgattttctagcttttttcaacgatgggtcgtaataattgttgaaattatcaagacccacgacgccatctccgcgttttttcagagcaagagaaacatgggtaccgacaaaaccagcggcgccggtaacgagcacagacatacctccagaacgatggatcttagccgagttacgcacttgcttttcccactggattccaccccacgaagctgagaaataacggctacctgaatcgacgaagctctgaaaactcaaatacgacgccgttaaagctatcaagaacaaagcccagagaaacatcgtgctggtcgaggcgaaacaacggtgaaactgacgattcatggtgtttcctctgtcgatcttgaactttcccggcgtcgatggaaatagctcttcttgtagagacggcattttgttgtacatatatgtgtatatatttgtaatgaaatttttatctcagggactattgaataatttacagaaagatcaagcactgttttgatatttttcgtataaataaatttcaaaggaagaaggtaaagaaaagggtacagatgcagagaaaattatttttggaggtgtgattaaaaattttctgcacctgccatttgattgatgatgagagagggttatatatagtggtcacccacatagaagcgacaaattatacgcgtgaacgcgtttaaggacggcctctgtaacagagggtaaaatcgtcatttcattaaaagtctctctctctttggaaataaatgggaccaaatttttttctttctttatgacataataattaatgggaccaaaattaacacgttgggatagttaaaaagtgaaaagaaatgga

SEQ ID NO: 19788 - DNA, 2090 bp, Cannabis sativa
gatggcctgaatgacagatttgaggagaatttctttgccccctttagagaacactttattcttccagttatgaagatggccccagactttatcatgaagatagtggaagattttcttttttgttcttccgatgtgttgagggagacccaaatattttttgaaggaagatcgaaccgggatttgcagaaagtccgagataagagtttgatccctcagctcgacatttggggagaagtacaatgaagatttttgaaaattaaccttctgcccggtagccttcttatacacctctaggacctctttaatgatgttgcatgagtgaatagaagccctgcagaataggaaactatcgtctgcaaaaagaggatgggatatagccggagcacgccttgctactttaaagccagtaagggatctgctactctcttgctgatgaagaagagaagagaaaccctcagcacaaagcaggaagagataaggggagagggggtctccttggagaatgccccaagtagggataacgtttccagagactttgccattcacgttaaattgaaaggtggcagtggaaatacagacagagaccatatgaatgaaccggggagggaactgaaattttcggagaagggccgaaatgaaaggccactccactttatcaaaagctttggccatgtccagcttaactgccatccaacccttcctcccacgggacttaagcttgatagagtgcgcgacttccagagcaatgataatgttatctgatataagcctgcccgggaggaaagcactcttgttgggagagatcaaattgtttaggacaagtttgagcctattagcaatagcctttgatatgattttataaatgatgttgcaaagactaataggtctgaattccgaaatggaagtgggttgtttaactttagggatgagagtgacaggggtggtataaagaggatctatatccccatctccattgagaaaactgagggtcgcattgataacatcatgccttacaagggaccagtttgttctgtaaaaattagagttaaaaccatcgaggcccggggctttgtccaaagggagctgaaagaaagctttctcaatttcctcaatggaaaacgcttcattcaaaaaggatccatccagatcagacaaagagcgattaataccctccagagccttctgcatatccgtccaggaagagtttgtggaagtgaagagcgagtgaaagtgagactcgatttcgctaatgatgtctgcctcatcagagacaatacccccattctgcaaatgaagcttttggattctgttaactttctttctatgggaggcatagcggtgaaagaattccgtgtttttgtccccctgggccaaacattgggttctagcttgctgtttctagtaagtttcttcttcggacagaagagcatccagtctggattggagatatttgattctcgcaatagtttgatcatcccaaaaatgagtagaacgagcagtctccagatctttctcaatcttactaatgctttttgaaattgaagtcctttttgtgattccaagtgttaaggcttctagcacacggagcacggattgcaatgagatttgggatggcctcttggtggaccgtgggactagttcaggactgattgaagattcgggtctaatttggatcctttaaccaaacattttcaaagtaaaaacgtttacttttatccttcaaccgattgcccaggggattggaagtgactaattccaaagcccgatggtctgatccatagaaacccaagtgagtgagagtagtatcagggaagttatcaatccaagaactattaatgatcccccagtctaaccgctcttgaatgtttttaggggaagccacgttattgttccaagtgagcaggggacctttcgggtctagcggggaaaggttaaacgagtccaaaagttgtctggagtcggaagaagggcccctatcagaattacccccttgtttatcatgagaaaaaagaaaagcattaaagtccccaatgataagccacgggtcacgaggtttatccctaccaatcctattcagaattttccaagtt

SEQ ID NO: 19789 - DNA, 6366 bp, Cannabis sativa
  modified_base (1274)..(1274): a, c, t, g, unknown or other
  modified_base (4313)..(4318): a, c, t, g, unknown or other
atatacatataaatatttatattgaattattctttgttttgttcaaattatttatggtggtttggctgtaaaatgactttgtacatctctatcaacaacccaaatgtcttatagaagacttagatttggtaatatttttaattttcttttagtcttgatcaaaaaatactctacatccaactaacccctaatacctatacataaatttaaacacataatgtatataatatgcatatttatttatagagtaatttttgattaaaatatttatgtttaacttctgcttgcttacagataaatacctaagtttagtttttcatagtaataatacttaacttatattttcaaaacttctgtaggtacttagccgttaagtgtcaagtcaatagccacataataatttctatttcgtctatgttattaattttttttatttaaaaattaatttaaatatccgagtaagaaaatataatgacttaacacttaatagttgggtacttacggaagttttaaaaatataatttaggtattattttactgtaaaaaattaaacttaaatatttatctgcaagtgaaagataaacttaagtatttatataacaaactactctaatttatatatgtatatggccctacctttcatgtacttataagattaagttatatgatcactacaatgattgtgaaagtggggtccttctcttgtccccaatttcaagtttttttttttttcaacccaataattactaaacttgtgggccaatttcactggttaaaaatctcatgaaagtttggatttttcactatactaaatttggtcaagaactttttaactaaccatagtcaaaagtactttacttttttttactttagtaaaagtatctaccacaccacagtaacttattagttgttttttttttgggtttgaattgcaggttttggaggttatggaagatgaggaaacagactatgaaatttggaaaatgccagaggaagaagaagaagaacaagatgagttctggggttttgaagatcttgaatatgaaagtgacacttctttctcaatttctccccaagattcaatctcaacaaaaggttctttaaaagagtagacttatttattattaatatatattatatatgtatactttgatgtaaatatagatgtaacacaaacacaacaatgttagtattaagtcacaccagatttgaaaattggatacaaggaaaccccacctcctttctaatcaaacttttaatatatatatatatanatatgtatgtatgtatatgtatattgtatggagaaaagtttccttggatgtgttgtgatgtttttatgatgattagactcttatggagtcagtgttgttacaacaaagcaatatatataatataccactttctatgctaagattgaggaaattccaaagagaaagtgtcatggagataatgatctgcaaaattattgtcaaattcttattaatatgtatatatttatttcgataaatttagaataatttagctcaatttaatttcacgtgtataaaataaaataagtgtaacgtctttgtttcaagtctttacactcacagaatgaatgatttttatacacgagtacgtcactctggttgtttcatggaatgatgactgaccctacaaaccaacacagatatttccagcgtgctttgtcttgagaaatcttcccagaaggtcactcatcctgaattaccccaagtcaagcacgtttaaccgtggagttctttcgtgatgggctaccgaaaaaaaaatgcactttgttgatataggtgtcaatcaatccatttaagctctcttcaattgtgtagtcttatacctacacagtctcagaatcatcccacttgaccttccccaggcggtgtgggattgcacagcttactcggtatttctccttacagatcacaggactactgactatcacaataaatatgcttggaagtagatatttgaattatatttttggcaccttaaattattcaagaatttcttaaaaaataagataataccaataccaattgtaactatattgtattccgtcatataaaaaaaaattaagttatattgtcaccttaaaagtgatgctctagctaaatttttttctattattattatgaaaatagatgttactatcatatatattgtcaccaataaatgatgttgtttgtaaaagggatagagttgagacaagtggatacaatgtaaaaacagtttgaaatggtggcacatactcttccatcaatttctcaatatgtataaagtacatatcaatgtgtaaattaaaatcaacaactttaattatgcaagaaatttagataaatataggatgactatttctaaaacaatatttaatattctattattgatcacaatccaaaattacaatagtaattagtaacaatacaagaagggtcatgattaaatgaataagttagattgtcacaatatatattaattatcttattttctttcattttctcaaatcatattaatttggtaacataacaacaaattgttcttcttcacttttcctttggtttttaagcctttggccttttcagagttggcaaccaaaaattgttagtttattggattgttgaacaatatatgtatgtatatttatatagttacgtagttatatctatatttgtttttctatattaataagtatccatatatataacattgtcatgacagttctatctaccttatagaaaaataaaataaataaatatatttatatttgatttagtagagaatgaaactgaaataatcttaccaaaccacttcaaaattattatttattaaatttgaacccatatattaaaaaaaaataaaaactcctaggatttttattattctgaaattatgggacactttagggaatttactctatattttatttatttattgtaatgtgtaataaattctaaataaaaataaataaaaaaaagattgccatcgaatcatgatggtgtcatgccagttaggcatatgtgttattggcctttcacctaaagaggtccactagagctgtcttcctatttcaaaacattaatttttattttactctaattttgtactaaaattagtttattatcaacaaaataataatatgatatattatttccaacaaagccaaagaaagaactaccaatattattaatgctaattattgaaaaattattttattatttctcaaaatacacttccatttttatctattagttagggaggttttgattctcatattacagatcactaaaaaaataatgataatttaaaacctttcatagtactttttttttccaaaaaaaataattaaattgggttttcaatactttttcacttactattattagtttgataatcagtgccgccctaagtattactgaattaagttcgtgcttagagttcatacataattgtgtgaatttaagtcacataacactctttttttttattattttttttaatatatttctaaaaataaaatctcaaaatttaaatggccttaaatttatatattataagaaacacaagtgaatatatgttagtatatttatagagttgcattgcatgtggcagaaaccagtacagctggcaatattatatatgaggtgatctcaattctcaacagcaaaaaagagaaattaaaatgagaagttgttaatatattagagaaagatattttataaatatatgaatgaattaataataaaaaagggatgcagttgataagcaggtagagtttatggagggtaataagtatttttttttttttttttaatttaagcgtttatatattacaacatgttttacttggactcgaactcaggacctctaacactcacacacccacctatgatcacttgagctaaccctaagtagagtaataagtatttatactcaaactgtgccactcttctatagggccacattactatgtgttagttcaacaatgcataatccaacaaccccttaccctatacaaaataaatataaataaatcttgtttttatttcagtattatttattctataattatatcatctatattatatatatacaaaatttatgtaatgttatacaaaactagttacaatttaggtagagcaacaatacaaggctatgatatatactatatatatagtcgattgtatttcaacataaaattgagtaatttcaatacccaacacaaataaaattcttcctctccaagaataattatgtacaataaaataaaacaaaatcacttcatatattatttttttttnnnnnnttttttaaatttacggtttaaatttcttagataattttaggtcactcgtaatttagaattaagttacaatacacaattactataaccgagcttaggctaaaacatgccatccatccaacctaagacccctccaaataaattattttgaaaaaatacacaaatttttagttgctttcaaaaattctacatgtatcaaaaatcctataataatttttttttcctaatttgatattatttgtgtacgctattaaatattattgtgcattacttgtaattatgtaacaaaaaaaatctcctaataattaattaaattattgatgggttttaaaggttgtttaacttcaaagacaaaggcatatacaggtggccattaattaacgataataacgataatgcctatgctttaattttttatatatatatatttaagggtgaataattaatttaaatggttaatttagaagagagttttattcatcagtgtgttaagttaactactatatttataaatattatatatattttttgctaataagaagattataaataataattgaggatggatttttttgatgagttgacactagacaaaaccaactttttgtttataatattttcttaactttttctactctaaaaaataatatgcattgtcttattaaggctttaaagataattatatatattgagaagcacttagagaaactttttatccaaaaagaagagaaatcacatatagaatgttatataaataattatttgaaataataatgagagttagtgtacttcttcaccaacttcatatatatgcattgcatttggcttattatataaataaatttatataatttaattacatgcttattttgttttttcatccttgtacatataagattcccaaaaacttagacttaaatacttaaaaaattaaccttaactttgtatttaaaattaagagtcatatttatgtgaattctctattctagtctatactatatgtaacaacataattgactttgagattttatatgataatatatatatatatttatatatataaaaattgtgcttgtttatcatgacaacaacaatgataatgaccaggacagtctaataagctaagtatattaattagcacaaaaaaaagtataaatatatttggatgtatatattagcataactttaataattttagttattaggacaatcatattattctttaaattattattacattttttaacttatagcttttggtagttttgtttgactttcagataatgatataagcacaagaacactagtgatgttgatcaaaaattaaaatgtgttttctttaataatttaatttttatatatacaaatgaagcatggaatatatatatttatagatgatgcaatatagttcacttttgtgcaaaaatgtcatctttgtataatattcaattaataatgatatactaattaacttattctacatgctttggtcatccacacttagcatgaatgttttttaagaaaataaaataagaaaaaaaatatagtgtggtgtgttaaaactagtaagtcatagaaaaaaaatattttggatcattcttcaaagtaaaatatgatattttccaaaattaataaaaaaatatataatttgaataatatataagttgaggaatatctattttttgtatctatttataaaaaaatactcttatattatatttcattgaaatgtatccgtttttatgagaggtttgctcaatatatccaaaccttctacttaagtgtagcatataatttatatttacctaaggcatataataagagtgagtatatcttaaaaatatgtaaatgaaagtaaaaattaaaacttgtaaagtaaaataggtatatactgtaattttctctcttgaattaggtggaccttaaataaaggactaacccgcttatgcggggccgggccctgtatacatatatttttggggtaagttgaaaaataccctttttattaatcaatgaatcaaatttacctttaattttatatttatttgaaa

SEQ ID NO: 19790 - DNA, 2128 bp, Cannabis sativa
caaattttttaaaaaataaacttaaaaaagttttactacaaaagaaacataagcagattaaatataaaaatacatactagtttcacagtaagtaacctttaaattcatgtatggcaagctaagctagcagtggcaagccctaaaaatattgaaagcttagttttaattagtaacataaatgtttccatattcaatagcgaaaaaattataagcatgggatagagagtttgatataaatccaaattggatgaaaaagatactgtttttttttttttttttgttttgatagaatctgcattattctgaacatgaaaaggaagggacagaagtgtaataagagacatagagtaaagcagctaaaaaagaaaggagacacagacactgctcagaagggtagaagcagtactactactactactactattactgccactattgttatagtctgtctgtctgtctatctatatctctatcataatgatcataagcattatgtcacaagatccaagaaacattaaacaacactcaaccccactttttcttcttcttgttgtaacttgggccctttttaatttcactcccaaattgaatataattaattataaagtaatattattggagggttctaccctttaaaagggacatctggcatcaaatagattaggctacttgtagctcattagctgcatggtggtcctaattgtggaaagaatttattgaataaaatatcatatttattgaatggatatgtagtagtgctttgtgtataactatggagcatgcacaacatataagatcatcaaaaaaaaaatcataattttctcttttaatttttaatttttaatttgttcttttttttttcactttaaaatttatacggtgtgttatattttttctttttctcccctccatatgcataaataatgtacaagggaataatggaatgtgatgtaggcgtgctgtggataggtactcctactgagatttatggaatttgtggtccttttgctctaacatgccaatgtagagagcatggaccaccttgattttgatccaaattcagtcattatcagaattggactactgtcaaaataaaatatttgggcttgatttactttaatgtgagtaaatgtttcttaaggaacggaacaggtcgacccatttatacgtttggggaaaccaatacataaaagagtttgtacatatgacacatgcgtgacctcagcccaatccaatgtaaataataaaggcccactcatataatttagttgcggagaacttacaaatgtacccaatattttttgtcaattttatatttttactatcactttatttttttttttatatattttcactgtactaatttttcaaaaataatatattaaagttttaaaattataaaaatactatattttagtaaaataaaaaaaataaaaaaataattctaagacaacttaataaacaaaataaaaataactatgaaataacaaaatgataactacaaagcaacgaaaaataacaaaacaatgacctgattgcaatatgcaaaacaacattagctcctcaatatgtttttatattacgaatttttctaacttagttttaacaacttaatttatcgttctttaccactatattatttctttcaataaaatttgttgtgtaaaaattaaatttagaagcaaaaggtccaataaaacgaaaacgctaaaaggcccgcacaggttgaatgcataaaagcccaaaatcataggggaaggcccaacctggtgcggtctagttattaatccctatggggacgctacaggcaaaaagaaaggaaaacgctaaacaacaaggacaataagtaaagcaccgacggaagtagaaaaaagaagggagcagaataattgaccgacgggataaaaaatcgattataggaggaactacaaacgagaacccaatgaggaaccgaaataacctgccggcgaggaagtacctgagacacaacaaagagagaacgccgggatagtaccatcatgttgggctttatgcctgttgtcgagtgaatttcgcaacaccaaaatgtattatttaattaatataaaagagaattttcagggaaatgacaagtgcgagtattcgacct

SEQ ID NO: 19791 - DNA, 6028 bp, Cannabis sativa
  modified_base (31)..(37): a, c, t, g, unknown or other
  modified_base (5471)..(5472): a, c, t, g, unknown or other
aataaaattgattacattgaaatggagtttnnnnnnnggcataaaacccaacaccttcatgcatgcgttccttatccatgcccttttttttttgtttagatctgattttattttctcaatggtactcctaatcttcatagctctctctctctcacgctcaaagtagcttagactcacaggctttgtcaagactgcggttgcactactcaagccaagattttatttcaggtataataactaatttgggattttcatttttctactcttttggagattattgaaattgtttttacttaatgagtttctgaaatttggttgtttcatgtcagtttatttcaacatttgaattttattgttttactgttattactttgcttatagtagtagtatatgtttcaatagcgttttgtttagacttaatatgattgttatgcaatacagttcatcatatagttttgatttagtgcctataattattatataacatttttttatgtacatgtaattttattaatagatatggatatgcaataaaagaaaattatgatattttttttcatatggcattttcaaatgatggggacatatatagtgttacaattattattgtacataatggtacgcaacagtcgtaggagacatatgcttcaagatcgtacttttactagacatgagactcgattaaaatatttgactagtttaataggtgaaagagacatagcatgtgtgaatgatctaagaatgagtatgagaacttttggagtattgtgtgaattgctccgtgctgatagaagggtgaaaagaaatggttcagtcataattgaggaacacgtgtgtatgtttgttcatacacttgcccatcatgtaaaaaattgtacattgaacgctagatttaagcggtcgggagaaaccattagtagacacttcaattctgtttttcatgggattttaaggttgtaagaaaacttattagttcctcaagatcctgtgcctaccaattgcattgatagtcgatggagatagtttgaaaattgtctaagggcattagatggtacttacattgaggtatgagttcccgaaagaaaatgtaagattgcaacaagtgtattaggactttgttctcgagatatgaattttatatttgttttaccaggttggaagggttcaacatcagtaactagagtacttcgtgatgccattaaaaggcaaaatgacttaaagatccctaaaggtaattttagtgaaaatttttattttatactttgaaccatcactaaattttaattgtttagatcactaaattttaattgcgtatcatttatctgagttgagtagaaatgtgcctagaaatcacgaggagtactttaacatgaaacaagcatctgcaagaaatgtcattgagagttgtttcagattgtttaaggttagatggtcaatcttaaggagcacgtcattttcccaataacgacacaatgtcaaataattacagcgtgttgtattttacataattgacataattggctacgaagttgaaatcaatgggactttcgattcatgatcaacttgatgtgttgacgtacatgttaaagaagccagaatatgtggcaaccttcaagtcaatagatggcgaaattccagaggcctttgtgacaagagttcttagaaaagctaaatcaagtgattgatttggttatatgagtattaatatgtgaggattgatttggtcgattgaactttggtttggtttgattaatagttgaagctttgacaatgttacaaggtctattttagttatgtttgtttttttttaacaatgtggttactttttttttaacaatttattcagaattagaatcaatattcgggttggaatcacatatgccatgttttttttaaaacagtatttttaatttaatttatttttttttagtttttttaaacatttagcatttttaataataaaaaaaatagtatcttttattttctttttagttttttatatttattttcaattttttagtttttatttgatttttttttaatttttcaatttttgcaaacttttttaattaatacaatacaatacaatgtgaaccaaatatggtataatttaacacaacatagttatacaatttaattccaaacataatattgtattaaaattatacaatccaattcaataaaatacaacccaatttaatacaatacaatacaatagggtgaaccaaatgagacctaaaaagataaaatagtgtaagttttgattgaagttgttaaagagagtcgtgatcatggaagatgagaagcatgatgagaacaagaaagaatttcctaagcaattatgaagcaaaagagctaaagaagagactagatagaaaagactgaattgacaatctcaccaacctcgttctcctctcctcacatatcaatccattgccttttctattttgttattatgatgaccaagatcattaaccaaccttttgagccaagcaccgagcaagaaccatgccgtcttgcaatacagttgagcctccttgactgagaaatggacccatcacgtgcatggcgtctccgatcgaccattgtggttgtccctttccttaacttttcaagcaatacatcccaagctggcctatatcttaagtgtgtaagggatagtgaagccatgtgatcacaatccctaatcatttctactattttattagggaaagtagtgctaccatttgtgatattttatattgccattaacttgaccagttctggatttttcaaaatctcggaatctataattcaaataattaaatcatgagtaataaaaacaaaaattagaaaattttgggtacaaacaattatattgttgctctaaaatgtgtatgtatatatatataaaaaattccttgaaagaggttgtatcatggtaaaagtaggaaccaagaaaccaaattataattgataagagatcttccacacacaacgttgttgccatggtatctggaaaactgaagaaggaagccatgtcttcagtttggataataggtaagacctcacactacatatactccaaataccttctttgcctttagatttagatattctgccaccgctgagttagctccatcacatccaatcaaaatatgtagggtatacttataaaaatagaattactaaaaggcactattggtgcctagaaccatcctcagtgtcatactgctaatagtgtaattaagtatacggtctcatataacttaataaaataaattttagaaaatatcgctaactaattgtaggatgtcacctatagaagatgctgggtaccactgtgtccaatagcaatgctcttataaaaatcaaatgtatagcaactcttttactcacatatatgttcttttcttataacatgactaaaattgagttatatttcaagttcataatgaatattgaacatgagatttgagaagagacacatataattagttcttaagttcataatgaatattgaacaagacattaggaaagagataaatataattaccttccattttataattctatttgaggtatcgaataacatattattgatctgattatgtctattaaggtccggtttcttctctccacattacagttctgcttgtagaacttgctgcacaatttaacgggactaatgtaatatttgacataaacatgataataaaatacaattaatatatattttttaatatgcaatcctattaaaaaattttgaggactttgtagtacacatctaattactctaaagagtattttatgaattttataacagtaacaattatcttcaaatgaaaacttaattgattaatgatataaacttgttcatgagtaagtttttgtgtaaattataatcaaggacttaagctatatttataacctttgatgttagtcatttttacttaagaatgatgttggattaaaatccactttaattttccattcaattaaaatagttgacaaagttaactttctccaataattctacaatttactagagaataactaacaaattgttttgaccttgaaatagagtcaacgtttgaaacctggataggataggtatgttttatctgttgaaccttcccttgtgtgagtatatttattttattagctgatcaatagacgcgatgtctttgaacttttttgcggttaatgtaaatgatgatataccacacacacaaatctctcttgacatactttagttcttgctgttatgtttgttttggccttgaacatttccatggttttataagagatattctaggaattaagccttaatcaattcatatagaagtgacccatcttctctctcacataagtgatttattatttaagagtatctcatattactctgctcgaagttttaatgcataggaatcattaaaagcatagcttaacctttccttacgagtaccaatgttttatcacagaaatggacttgaggataacccccacagtgatccaccatagtctttatagttttatttgtccctttgaacctagatcttgtgatctcttgtcaactaggttgggtatcaactgtaggctttagccccattctcttcgataatttttcaaccaactctctatttaatcctttggttagaggatctgggactttgatcttacatagttaatagagataactgcagttttgagtagttatctaatggtgttacgtctacgacaaatatgtgtagacttaccattgtataaatttctctttgctctaccaatttaagattaaatatcacaatgtatactaattagaggaataggttttgggcgttttggaatttcatcgtggatctggctatgatcgtttgtttagaagatttccacgatactgctgcaatgtgaagtgtgaacacatatccactcgtagagttaaagtcttttatatcacatatccagctagcagcatagtgccatttaagtactgttgtatattttgtatagtgcagcccatagcttcgagtaaaatttaagtaccttagtactcttgttattcctttccagtggcgaggccctagattactcatgtatctactcagtttactaactgcataggctatgtcaggttttgtaaaacccattaaatacattagacttccaataattactgagtaatctacataggagacactcccacctttgtttttacacaaatgtaaagtcaaatcaataggagttttggaagcaccaaaatctttcttgttgaacttctcaagaattttgtcctccacataatgtgactgacttagaatgagtccatcaaatgttctagaattggaattcataaaataacatctactaggcccatatctttcatgtcaaatgtggatttcaacaaacttttgttagatttgatcatcttatcatttcttcctataagcacgtcatcaacataaatacataggatgacatagtcattatcnntttctttgacataaacacatttgtcacattcattaattttaaatccatttgccaccattgtatggtcaaatttctcatgccattattttgatacttgcttttaatccatataaagatttcaccaatttataaacttttccatgttctgaggtagaaaagcccttgggttgttccatataaattttctcatctaaatccccatttataaaagttatttttgtatccatttgatgtacttcgagattgcataattctgcaataggaagtatcattctgatagaattcattctcgtcccaggagaatatgtatcaaagtaatcaaggccttcttattgcttataatttttaattacaagttgtgccttatgattgttaattgatccatctgctttcattttcttcttgaaaatccacttagcccctaaaggcttacatcctggagaaagatctactacctcccaagtatgattttgcaatataaactcaatttcattacctatggcttgtttccataaacaacctttagaagagcttatagcttcttcataactttgag

SEQ ID NO: 19792 - DNA, 3343 bp, Cannabis sativa
ttcgcgagccaactccgaactaattggttgatcttgaatccaagccaatctctcctcagcctgattaatcaacaagtctcgatcgccataagtctgcctcctccatctctgaagagcaaggcgggtgtcatttagtctacctctgaaacttttgcctctcgagtccttctggccccaagcctgagtgatagtttctgtacaagaaggctctgctgtccaggcttcaaagaaccgaaagggtttgaaccccttactcctcccattaccagtatcaaccaggataaaaccatggtctgagactgagataggatgattgacgacagaagcattcgaataatgtacaacccaaccatcagatgcaattgctctgtccaatctctctctcgtaagaccacccgtaaaacggttattttgccaagtaaattggcatcccttagacccaaggtctatacctcctgtgttccaaataaaatttcgaagtataagagtatcttgttgagaaaccttcctaccccctctcttttcccacgaatttgcaataagattcaaatcccccattatcatccaaggcaaagaacttcgattgattctagtttccaattcatcccaaaattctctcttctctgcttcgtaaggtctgccataagtagcgaaaagcttccatttaaaaccactctcaggatccctgataattgcttcaaaaatcccaagggaagcattaataatttttaagtcaatatcatgattccagagcagagtaaacccccccgccaagccttctgctggaatcgtcttcgaccacgggaacccaatagccttttcaattactttgccaccttcttcgtccgcttttgtctccatcagaaaaacacacatcggtttatgcaccctcacccaagtttgcagcgcttgggtcgccggggttctacgaataccccggcaattccacgaaagaaacttcattgaggaggagggggcatgataagggccgcctcctcgcccacttgaaaatgctgagattcatggataggaacttccaccaaactatgatccgaacttaacaaagaacttaccgaattgtgctccgcctttgttcttttcttttcatcagtattcttgttctctttcgatttcctcttaggattctttctcctagtggcctgtccatctttcgttccgctgcttcccggagagaaggtattaacttccagtgttggaagaaaggtgatagcagacgcccctgttttggctcccaagtcaacaacttcttctctttggtcgatgatagggacaatagacatacaagcctttcgttttttggatccagagaaggcctggcccaaagtcgaaaattctgttacatcatgcgaaacaattgtttgggcctgcccattcttcacttggattgggtccattagttcagacaccacctcatccaaagttttatcagtgggccaagttgcatatacatgttcaggatgttgatgtggcactctggacctacaaatttcttcatgaggcctttccactaattggtccctagtaggcccaatatctgccatgagactagcaatgatacccttgtccctttcccggttatcaatgtgattcataggatgaagttttggctttgaaacacccaagccactactctgacctgcattgcctaaaccagtatacttctcctgggatacacggctggccttcgaaggcacctgaccccccatactacaattagagtgtcccagtctaacgttcaaaagaccagtatgttgtctaccaacctgtgaggggtcattgtcatcattgatcatgacgtttttacccttgccaccatcgtccattgctggtctaactccggcgggccgcctattctccgtgatttttaatctcggaattctgggatcaaaacagctcttgattgggactcctacctttatccatgcaccgtaaagaggaacggctctcccaatcggagggtaagcatattccgttggtctgctgcactttgcgtatgagtgagccaagtaaccacaattgaaacatacagcagggagcttgtgatacttaaactgcacccattccttccggtctctcgagatattgagataaaaacccgccaccagcctctggtttagtagaacatcgacttggaactttaagaatcctctccgagctatgttctccctggtagctctgtcgaaatcaatatactcccctactttcttcgcgatgactctcgagttttcccaggtcagatacggagtaggcaacccgtgagcttccacccacatcctagccttattcatatctgtctcttcccatcttccatcttcaggccactctctcaagtttaatagcagaccattaaccagccatggtcttttcctgagcacctcttttttatcagcttcattgtcaaaaaagatcccccacaccccctgtttcatggttttcatacgccatctacctgacagagaccaaatcttggtcaagatatctctgagccttcctcgagcaatagttctcctaccaaaggtggtggcaagaactcctttacttacgatatcagcatttatctcgaaatctgcctctagttcaagggacattgagtcaatgaactggagacgcatctcgtccatatcccctgactcatttgccagcatatcatcattaatcccttgatcattttcgattactgtcacctcttctcctcctccttctaccacaaggtcatcgaccggagttgggttgttcatatttgtatccgtagcatccattgtattttccctcataagacactaacactgagacacttcagtaaatcggaattccgatagctcaatcagagtacgcatatgaatgctggtttgaggccgaaacttagttaattatgttattctctggattttggccctaaaccttggtttctcttactcctttatcaaccacaagttcttccctaaaacatcaacaccactcactcactcacttccatgccaaatttctatccactccacccaaaataaaatcacaaaaatccattctatataaataaaatacccacatataaattatattttacacacacaataattatacgttaccaaatatgttttttcacattaaaaaaaaaagacaaaacatataaataaaaatacatgaaaaagtggaagaagtgaaattgagaatagaatagagtatagagaaacagagaaagagagagagatgttagctaaggaatcaacggttggattcgaccttcccgaggaagtgttgcaactactgccgtccgatccttttgaacagctcgacgtagcccgaaaaattacatccattgctc

SEQ ID NO: 19793 - DNA, 1555 bp, Cannabis sativa
ctaattatgctagttgaaaaacctagttataccgattcaaaatatttattaaaacccataaaaaaatttacacaactgaaacaaaaaccaactattccaattcaaaatggatctacatagataaatataccaaaatcatcattgatagagtatccaattcaaggagggatgaaagagacttacggtgttgatgagatctacaatgacactcagctcctgttgagccaactgcaaattctccaccatgctctgccatggccatggcgttgagctctcctttgcgctcttcttctgcttcttgttgtcgtccttttccacagcccaagcgaaatcgattcggcgaatcagagaaagccgcttctcgtcatatcccacatcactgcgcaaaacaaaatacaattgggtcagattggtaacaactaaaagtataggaaatactgttttcaagtaaatagttcgcatgcatttgcccggaaaccaaacagggtagtaaatagttcaagtagagagtcgtacgagggaaatcgttcgaagccattttcctcaatggcctctaagcgcttgatgggaagtttgtcgagggaaatttgcaatttctcgctcattttatgcttctgaattcgctgggaaaattggagagaaaatttagggctgaagccaagaagagaaatgagagggtttatcaattagcagcaacacgaaactggaacagttctgctctacattatcagtcaataaacgacttatagtttgtaaattacgtgtcgtttgctctcaaaacatttcggttaaagtaattaatttgctccccaagcttttttagttggcaaaaattccccggtctacgacaaaccttgagaagttcccttctggtctgttttctctgaaatatattaacactcttaacataaagttgtgcacttttcatgtatcaccatcttccctttttagtcagttagaattattaatctgaactaatataatcataagtttaatatcataagtataattattaactatgtgtcaaatatatgttcactactataataggatggttaataattatatattatgttagaagcacatgagagcacccttcaaaattataattggcccattaaattatagtatactattattgaaccacttaagcctctgagataaatatatatcttaagtgaagaggttttgggggttaatggtaatgagtgaaagatgggatagttccacgtagtgttctctctaatatcactttgagttttgtatttgtcctcatattgaaaattcttagatgttctaatatggctcacataggtggatcatcaatgggaggtatgtatgtttgtttttgttttgtgatactctaaataaaatatagatcttggttaatgattatgaataatgatgattagtatttaatgtgtattttgatagctcataatcaaaaaaaatttaataattggtatcagagctatcaaatctatattttcttaacaatttatgtcgtaacaattagtacttattttcttacgacataaattaatgtttatttaaa

SEQ ID NO: 19794 - DNA, 1855 bp, Cannabis sativa
gtaaaaataaaagatgacaatataaaaagggtatagaatctaatttcctctatttttttggacccctagactgggtgggccttaggtgtgggcctgacccgcttagcccagactcgaccctaagaattttactaaatacatatacatataaatataatttgtattttttgagaaaatatatacatgatttgtatgtatctactatttataattgaattaaaattttacaggtcatattgagttgtatgataaatatagtgagcttcacgagtatggaactttgctgtacaaaagtttagatactggttatggtcatgaattcccaaaaaacaatcagagggtaattatacttataattataattaatactactgtctttaatgatctattatatgtatataaatatatatatacacaataatattgaaatattgaagatatatttttattaggttgttgtgatatgtacaatctataacgagaagcaagaggtgaaaggaatagaagatgagaaaattacacttgttatgggcgacaaaactaatgagcttggtaaaggtaattattaattaattcatttttcacatattaataattttatcccattaatcaatttcagtaattaatttgaattttatatatacttcaattacttatcatcacgagagatatgattattagaaaaaaaaaatataaagtaattatttgaaaattattaggatatataattaactataattaggatcataacataaattaaattaagaagttgacaattgttctagctttacatgtgtagctaatgcaaaattaaattagtcaaatgtgtactccacacaatcacaacaatagtttctaatatgtaattttttttaatctgtaaatattgtttaattttatatatatatatatatttatatttatataaatttatagcaaagtgattaatatcaacattttcatgacatgcagggtttgacaaagccctacgacaaatgagagtaaatggacgagcaatatttatcattcataaggctagtaattaattattaattctcatctaatattttcttgaaatttttacacaattttaaataaatatatatcattttttacaatttttattctttttaattatgattttacaaatccttatgaaaatagcaaaaatataataatgtaaaaagaacggtctgtattttttccaaaacaaaaaagcatactttaaattaatctgtaaaaatatttaaaaatttatagaactgtatttttataattttcttacttaaatataaaatattccttttttttttctcctttcccttctttgtgattaattttactttcttaatttatgtataaagaagaaaaataacttttttgctagataaacatggcttaataataataacaatcctatttttaacaaatattaatccaaattttaataaatgaaaatatagtttcataaaaaataaaattatgcttataagaatttgtgattaacatatttttgttattaattatgtgattaatattgtgtgttatctgatcagaatctttggccaagtggaagaagaatgcccaagactagctttggcagtagccagaagtacatagtttgtgatgtaacattacttaaaattttgggataataataataataataataattaagtatttataattccagaaaaataaaattagagtatttattaaatatagaattagagtcataatattgactctaattgaaccaagtaattaattaagagcatgtgtgtgtgagctgttgttggaatctaattaattagctggtgtttgagatcaggggatttgcaatttgcataacagt

SEQ ID NO: 19795 - DNA, 8513 bp, Cannabis sativa
aattagaatataattagttacatcacaatgcattatgctcatttcacatccacccagcccctcagtacaaaataactccaaagctctttcggaaaagttcacaaaaatagaataaaaagattgccacattagaatgaatttaactaatcaaatctcacatcaaactccacgtggctttcaaaaacaacaaaattttattataaaaagaacaaaatcgagcaaaattgatagatgcaagaaatttgagatttcctttttacatggatcaccaccgaatttttctagatttttaagaggagccccatttgacaaagtaagcaatttttcttttgtacaatattaccactgtaagaaattgtacatcaacatgtcttgactcatatcctccatcgaaagaataggagtcgccacgataaacccccctacgactcactcatccccttcctcctcttcatcgtcgtcctcttccggtgcctctctcaaccactaaaaataaatacaaaaacatgaactataatgttaaacaagaaacagtccatggtcaacaaagcatatgctgtatgccatcaatttagatgcttaatacttggacatgaccgggaatagttttaagcctaaaagatatttgtatggtaaccactaccttatgacagctataagagaatcattttgacccacatttatttttccccattttcaaaatgtgcatgcatgattttaaaaatttgtccatgtctttatgttccaaagaagcaaaatttaaggaaaaacttaaaacagttgcaccatacaaagaaataaaaatgaagaattaaacataaatccgattctaggaaaaagaatggctgcaaagagaaaagaataaagcttacttgaatgaatttttcggcctgctttacgaaaactttatccgactcatctgcatctctcttttcatcatcccaccttagaatagcatcttcttgtataatttcttggtcatacaaatggcataatatctgaaatagatttgaagagaaaaataatatatatatatatatgataataatcagaagattaataaaattctttctagagttttaggaaaatgatagaaaaaataagctttaacgaaaaaccgaagctctattttcgaagtggaatagcattggcttgcaatagcaaaacaggaaagtaaattcctgcaacattattctgcttttgaatcaagaggggatagtaagaataaggctaattaggatttttgccactaagctgacatatatcaaattatgcacccctaactttttaagctgaaaactattaagattgttggattcaaagacttctatctaattctgttcaactttactaatgcaccgatgtaccaaattgtaactccaaactttcatccacgtcaagcttccattaataaaatcggacataagtctttacattcaacaatctcaataaatcggggggaatttttaactgcatgaaaagttaaggaggcatgatttggtacatctcaaagtttagggggcggaactcctaattagcctaacaacaatgcaagcaaaggatttgtggaaaataaattcacatctatatcttttccaactgtaaaagctggcagctagaattgtgaagacaacaaactaaagcagcaaaagtaccttagtgaataagggggagaattctttagcagactccaaacacatttcttcaaatcttagtattacctcaatctgtcaagtttggccaatatagagtcaaataaaaacatcatatcattaagcagtaaattagactgtcaaaaactaaaaaacagcaaaatcagcattccttcaaaaccacgaacagataaaaaactactgattgagaactctgaatctacactgacaaaagtagaaacagaaacaaacatgcatacagtgttttttcaattatacagtaaaaatgaagagaacattaagagtatcatttaaccccaccccaccaaaaaagtttactgagtatccgaagcacagctaaaattactattaagaatttctgaattgtctatcaagtataataatttttttccacccatttgcactaagcacaacaccaaagcaaaataatagtatgaaagaacggtttcaagaattcagctcaaaggatcttggaataaattttaattcaagcatttactataatcaagtaaaataaaagcacaaacctcttcatctatatctgctaggtaatacttcagaagtttcttccaccttgtaattacattacaaatatgttgaagcaattcacctaagcaatagatcgcaaaagcatcaattaactgaaatgtaagtatcaaaccatagtaactgaagagaatccatagtgtaggacaaacatagaaaatcggagaatgaatgtcactatggttgataaaattgagtttctaaaacactgatcagctttcctgaatatgtgggttattccctaacttggtcacatgggcaagctataaagtaaaataaacccaatcaaccaacatctcactttgatgctgttaacaataatatccaatccaacaacaccaaatttcagtccctatgatccattttccaagacctagagacctctatcaaagttttaaaattccctcaactttaactcagatacataagaatatgatctttcaggctggaatttttggcatcttgctaccttgataatcacggttttaaaaacttaaagatggtgattaaactcaaaactaactattttaaatgttaaacaactaacaacctaagaatacttttaagaaaaaatataaaataaataaataataaaaaatatatatgttaaagaatagcagggcaaagataaaaaaaaaaaatacttactagctgtattaggtttagactcttgtgccaatttcattacagaataaaagagagctccagcacaatccgcagttaccttgttgtatgacaacctgacacaatggccaaaatgtaactaaagccagttaataaacgcgaaatgtcaaaacattatgtcattagatattacaatgcatcccgttatacacaaattaaaatgtcaacagaagaataaacaactgcatcgtaggaaaatgctataattgcaactgaggttctgcttgtgttccaccacattttttataaataaaagacgatgacactatcatattaaagaaataaattgcaaccaaaagagaccttctgaggcaaagtaccaacagctaaactcacaaaacttatgttgaccaaaagggccagacaccatgatcaaagttcattctatctactttaaaaggtagttcataaaatagcaagactaaactaaattttcactccgccaaaagaaacacccacatacacaaatgttttttttcttagaaaaactagtttcattgttataatctttcttataaatacaggtgactctgaatgatacctaatcagtgtatcaagataccatacctaagtgaattgatttctaagattacattgtccactttaatattttcatgtacagctcttaaaaatgttgcttcaacctgcaaataaaccaaaaaaaaaatctaataattagtcccatgcaaatgtaactttcacttcttttaattaaatcattagggtcagtctttttcacctctttctcaaaatcaatcgaatcatccctaaagacattgctatcatcatcttccgaatcattagaatcaagtttcagatctccagaaggtgggagaatactgccatctggagctaattctaaatcatcatccatagcatcagttaattcagcaagtttttcagcagtaatgggcgcaactgaatgcctccattcttcatcatgtcccccatcacttaatgaccaaatataaccaactcctccagcaccaagctgatcaaaaatcacaactaccatcagataacatattacttgtaagacccaattcttctaaggatcattccattataaagaagggaaataaaataaaccaagcaacagatggcttgcatttaaaacaaacataatgagcacaaaaaagaattttgcatgcttcacattgtaacaacaaaaatgaaaatataacacccaccttttcttgcactttagatttaaagtcatcgaaaatttaatatcaagcaacaaaaaggacatttcattataaagtaagaaaataaaataaaccaagcaacaaatggctcgcatttaaaacaaacatatctagcacaaaaaggaattttgcatgcttcacattgtaacaacaaaaatgaaaatataacacccaccttttcttgcactttagatttaaagcaatcgaaaatttaatatcaagcaacaaaaggaaaagttaacatcttacaacccacataaactaagctcacacccagttagcataaaagtataccttttgtgccctcagctcacacacaatcataaagcaggtaaaagcatgatctgagaggtgaattcatacacaatttcaaaagagaagaaagaaaaacttggggagggaagagggataaaagaagttctattaagactataaaagtaaatggaaaagaagttaacttgtgaagtaggccagcgctcagtctttatttcagatgttatttccccatttgaattatccataggaccatcaactgctgcacattaacaagaaaaaagaaacagtaaagacagttattgaaaatacttacaaatctccgatcacctaactactagcaagaactggatggtgacattaatattttcgcgcttgatcctaacaaagtactcatagccaaaaaaaccccattactttgttgaaaaacagtaattgaaagtaaacacacataatgtcaactgaaaatggataatttagtagtaatcattaaagcaatcacatagttacagtatctgaaaagaaatgtgaatcccacaaacaattgcaaaaaactacagtttatgttaagcactgtgatatgttttggtgtcttgatattttgatagtacgcataagtagcctaatgatgatatgcaaaaatgatgctcactgcatggtgatttctttcatccattcggagaaaaaaaaaattaaaataaggtccaaatcaaattaacaaagagccaaaatttggtgcaagagatagaataagttacatggagcttcaacaatgccactgtcagcatattccagctcttcatcactgtctagcgtagtaggctgttgaaataacgatacttttgagtatgaaggaacaacaaattgtggtccaattacaacctgtaaacaagaaaaatataaaagaaaaaataagtatcaatgaatcagaataatctgttgcagttacaaactcaatggtgacactaagtaagaaattaacaaataaacaaacaaaaagtttcaaggctaacgcagcagaagtcccaagcatataattattcaattttgatgcactcacataggagaacaaaaatcaacaaacactacctcttactaacatgcaataattgccacctaaagtgagctaaatgagaagataattcatttaattcaggtcctataaagataagtattgcaccgtcagaatttctcaacaatgtaagtagcataaaatatcaaatataagccctcggcaatttatattctaatcaaaggtgaatttcaatcaacaaattactaggcatggtgtcctatatatgatagaattacaacatataactgtatgagaagggtctaagtctaagaccacacatcagcaaaaggtaaagactaaaatccaggttacagtgttaaagaatgtgtaccttaaatgacaggactacacctggttccaagacggatccagatttcattaccactccatcacatactatggcatggcttagcttgcagccatcttcaataataacattatcccacacataggaaccttctatagaaatattggatcctatagtgcaccctttcccaataactgaatgtgaaatactggtgttgttcccaactttagtgccctctccaataacagaaaatggatcgatatgcgcagaacatgattgccctatttcagatgaatacaagaaataagggaatcaaaagctatcagattttccagctctccaagcaacttaacagatcataacctatccatagaaattgactttcatttttacctgatgctcgatacattacttgtctttctaatttagttacagagcttccaaagaacataacatcagggaccaatgggtaagtccagcgctgaattatatctttactgacagtatcatagctccgaaagttgtcaatcctagccgcataactcgaatgaatttcatgtgtgaaaattttgtaccccataatctgaatggatagatgatcaccttagaaaaattgcaaaacaaaaataaatatgaaagcagatgtgcaaaatcaacagaatacatacgtacaatgcatggtactaagacaggagtgacgaagtatcagaaatattaaatgataacattcaatactaaattttaccaccaatatagccgaaaaaaaaagagaaaaatttagaaaaacatatttggagctccatactgtaaactattatacataatcaaacaaacagttaagttagttaatgtattgaaaaaatcccaaggtcccaatagaactactttacctatacagttggtgcatttttctaacataaggatgtaaacattaaacaccaacttcttccatctcttaaggaatcaaaaaaaaaaaaaaaacttcttctatctcttaaaatttttaatgcaagctccccttattctcaaaaaatcacaaatataagtaacaaaatttctacattagacacgttcaagaatcccactgtcaccctaaaccactattcccattttttaacacaaaaaaaaatactggaattgtattccttacagtcaagtcaaccacactttagcacacacaatcagacaagtttctggacaattatagggtgtaataattcctctaaacttttcttagtaaacaaagctctgtgtggattttaatgcaatgcttaagagaaaaggcccatattatatgtttgttggaggacaaacatgtgtgttcccttgtgcaccaccacaaaataaatatagtagctaacatgagatgtattctaagaaacacatacatcatcaagaagcaagcccttaacaaaatgacgtcgtaaatgttgataatcaaaattgtccgtgaaaagactgaggacctctggagaacatatatcaatatagcaatcctgcagaaaatatacatcattagtattgtagtgtaaataaacagccaaaatcgcttttatagaaaaaaagtcataaatttttattttaaaaaaaaatctttttcagttaactaaactatgcacattaagattattataggagaccattctatatttatctacaaataatataagtctaaccaccataaaagccaacaatagattttattgtaatgaaactaatgcaatctattgacttctcatataagattaattactacaataaacaagttagaggatatacctgtttgtcattgtgcagtgaaagtgaagtattatcaccaagcaacaatttatccaaatacataactccttttaaattgtctgacttgtcctcataatataatagctgctttgtactaggatctattgccataaaaagttcatcagtaccaagtcgggattgacgagtgatcacagaaggctttgaccgtttgatcaccattgtcattacagcgttactatcttttttctttctatccttatgttcttgaagtgcctgagtaagcgacatgttgctcacagtatctccactaattaagacaaaatctccatgtatcttcagatgaaacataatatagtcaaaatgtcagtaaatgaatgaatatgcaattacattagaagggagaacttcaaataataataagggaaagcaaattcaacaatttcatctaaaaattaatttgaatttaaacaaaactgaatatcgtgaccttatcattgttcaaatgctgacagattttgaacatatacatacattaagaaaattatacagaaaaatgaatcgatagaagtcgaaagaccagcaacataccacattgcgctcatatacgaaccgcaaagcgtctccagcactaactgagttgtgtgactctattgtttggactgagaaatttggttgggagaaccattcagtactctccaagtaatgaatcacttgcttggaatgagcacagcagaaaacaaagacttcctcaacaccagctgattcaagccacgctaacgtgtaattgatcattgggacatttactaatggtaaaagtaccttcaagaacaaaactattattaagtttcataaccttgcaccaaaaagaaaattgactttgcaaacttccccagagaatcgaaaaataggttctcactatatatctactgaaaaatctattgcaacccatacaaaaagcttaaatagattatttatatctgaaagca

SEQ ID NO: 19796 - DNA, 2708 bp, Cannabis sativa
tgtctccgagagcggtgagaaagcccctaacgttgtctacaagggtcgtcttcagaacaggtcatggatcgctgtaaagaagtttaccaagatcgcttggcctgatcccaagcagtttgcggtacccttttttgtgtatattttgctttctttttggggttgggacttgggggtgtggttggtcgttgtggtagctgagctgtttaattaggtaattttgtttgcgtttttgttttttatgtgggtttttggaatcttttctgggtttttgattcttaggaggaagctagtagcgtgggaaaccttcgccatcggagactagctaacttgattgggtattgctgtgagggtgatgaaaggcttcttgttgctgaatacatgcccaatgatactcttgctaagcatctttttcactgtaagtttctctcttccttttttttattatttgatttgaactactactgaaatttaattatcttttgtatcaataactcctataaagataaaagcttgcacatttgtttcatgttatcttcaatctctctttatcgtggtttgcattaagggtgatgatttgatggagttttgaattgttttaatgtgaatgtggtaatgttttctctttagttctacaaaattgtgttctctttttgatatttttctctttgtttatcactttttttttggtgccgtctattcctagattgtaggcttttgtgcgtgtggtttctgtcttttcttttgttgttttggtttcacatttatgaagaaggcattggatattgtttatctcaaatttctttatggggctttgtttgttcttgacaggggaaaatcaaacaattgagtgggccatgcgtttaagagtggccctttatattgctgaagccttggattattgtagttctgggggtcatccattataccatgatttgaatgcatatagggttctctttgatgaggtgttgtttctacaattgaaatattatcccaaaactttgattttgcatctattatgatctgatttcattatttaacgtttaactaaatttgtaggatggtgatccacgcctttcatgtttcggcttgatgaaaaatagtagagatggcaagagttacagtactaatcttgcttatacgcctcctgaatatttaaaaaatggtattaattcctctagtctgattaacacatattgattgtgatactgttttcgttagcttcttgtttccacatatagaacatcttctatggtagattttcacttctaatggaatgggttaatctgacctactaaagtgcctagtatgtaaaccacattcaagatacaatctcctagtcttaaactcataatatgtcagactgttcatggacaaaccggttgacctactgggtgcttgtttactgttttgaattatctataacccgatctttgaaatgttgcgactctactgctgtttaactcaaatagatatatgtatgcaagatgagtttaactatttttattgtttctcatgattgtaattgcattttctatatcttagttgttcccataattgttaatttggtgttctaggaagggtcactccagaaagtaatatctacagttttggcaccgtcattttggatcttctaagtggcaaacatattcctccaagtcatgtaagtggtttctttggttatatgtggcattcatatttgtattagctgtctttgttaatttgtaagaccatagcactggtggagagagcagagttaaagttgttacttactacgtaacttgaagaggtctatgaattagtttatttagttttactgacaagactgattaatttgatttatgatcatgtttttaggctcttgatatgataagagagaagaatatcaatcttttgaccgattcacatttggaaggcaagttttccacagaggaggcgacagtggttgttaatcttgtttcaaagtgtttgcaatatgaacccagggaccggccaaacacaaaggacctcattgcaacacttgctccattgcattctaaaactgatgtaagaattctctgattccgatattagaaatgccaattattagtttgagtctagagttgtgttctgctttcaggcattatctatgcatatctggaatgagttttctgttttcttcacgttagtgcaggaagttatcattggatgttctaatattaaagttcataattaagcaccattggtctatttacaatatgctcagtatgtgaagttataggatgttagtattagtgcatgaagtatgtatgaacaatatttctgtagcagttatcatactcctttgctctaacagaacttgatttttcaatcaactgtttacatttacattttccaagtcttttaatagtcaacactgttaaaaaatgtgtcctccactgttatggtgagcaatgatccctgaaattatgtttcttcacatgcacaatgtttcttattgtggaaggttcattacttcctcttctcatacaatataagaaaaaaaatcttggggtagcaggttccgtcttatttaatgcttggaattcctaagcacgatgaagctccatcaaccccacaacgaccactttcgccaatgggtgaggcctgttcccgaatggacctgacagccattcatcaaatcttagttgcaacacactacaaggatgatgaagggacaaatgaggtaagca

SEQ ID NO: 19797 - DNA, 2451 bp, Cannabis sativa
ccataacacctatctacctctccgtccctatcagctatgtgtaagcactacctttctatcaaaaactaaaaaaaaagccctgcttagttgtttactctcttttttcgaaatcctttacattaaaacaagtagtcagttctctctttattggtaagaagagcctgagaaaattacccaataaaaagtggcattttgccttcagggataaattgatagccaaccccaagtttgtttggaccctcacgaaagagacaagcaccaggaagatattcagctggaagtgcagctgatatttgagagaatctaagagaacgagagggaaggatgtggctaggaagcacgtggaccaagttagttgaaggatttcatgatggcggagcaactttgaaaagaggattctctaaagcaactgattctgttatgcccaattctatatcgttttctttagttattgtattactgatatataaggagcagttttctaatttgggaattatgctaaaggaagtattttgtttcttgaggagttttgcactcacacgaagagtgcccattttcctgttacggtattagagttagatacacaacatcactagttatactatacatcttcttaagctaaccccccaaaaaaatgggagaatgaacaaaaaaaagaaaaggaaatctaatacaagccttggctgcttttgcactttctcaagacaaaagggtgttctgtatgtagccactgccaatgccaaatgtgattaaaaatcagatcaaaacgtacattaatatgacccaagtttgtcccttcatcaacatctatacattacaaagatgaaatcagtgggacagtatgttgcctttgacaattccaactcctttatagattagaacaggacaagcactgataatacaaagatggatatcaaactcatgaaagaattttactctatggatctcagaaagcaatggcaaaagacaacaggacaagcaagacttacgtaagatgtgaactgttatcaatattagatctgtttctgtagctgatgacttaaaacattgcctacagattatctcacacaatgaaagatttgattgtatggtattactaactagctatgcgatcccttaatctcctggaccggatgccgccgaatatcaaacttgtcaacgtactcaagaggagtgactgtctcattcctgaccctcttgatcttaggactcaacaagcccctgtgcctgaaaccatacagctgaagcacttggttgtctgcaaaattgaatgccctttccatactgctcaagcacttctcaaccgggtaatctccatagctcccacaaggcttgcagcccacaaaatgggtcacaaatggccatctctcatctcccaatcctggatgatacttctctatcatctcttcataacgatcaactaaaccagcccaatagccatgtaagtagtatgaattctcaagaaacaccttatccatccattggtccttctgtgaaagcaataagtatatcaatgctgactgatcatctgcctcaaacgccggccttcccttgagataggcagtcaaaaccctcccagcctcttctcgaacaggaccctttggacccattggagcccaagcatcaagcaaatccagagaccattgacaatttctaaacaaaaagctaccagtattcaaagcaatccaagatttttgttcaaacatcaaatcagggtacccgtgaacaaccaaattataattatcatacttagaaactgggatctcaaacaccatatcagtaaacaatgcatcactatccatccaccaaatccactcaacttcaggatgggataacatcaaacgcctaagtaatggcaatttcgcccaatacccagcaagctccttatccaaatgagccaaattatacacaatctcaatcccatgaagcctacaataatcaatcttattcttaatccctttcagcaaataatgatccccaattgggttatcacaaggcttaggtggcgacccagttacgagcaaaatacgaggcttaccattcacatagctgggaaactccgggttcgaatcaagccaggctttccgctcctggttccaattttcgatcttggggccaagagtatatgtaacattaggattgatctcagagtcggcaagctcatccgggtcgttgggatcaccgtcggatcggatctcggcgaggatccggttcgtctcttcgatgatgtgctggttgacggcgtcggcatcggagccgccaaggtttccgacgccgattgttccacgtagaacaaggatagtaacgaaaccacacagaatggtaatcttgatgttgttgaaggttttttggatctgacggccacgaggtaagctcccaaatccacgacttctaccattgacagctgagccattattactagtcggtaacacacttcctccacttctcttc

SEQ ID NO: 19798 - DNA, 4326 bp, Cannabis sativa
taacataaaaacataatcaacttaatatatcatcaatgtcttatcaagaaaaacttaatatatcaatgactctcagtgaagaacccacatttgggtgcctaaaacctttgctcttgtactccacaagtccataccatacctaatctaagcctgactgtattccatagttagtacctaaatgcaaaccactcacgtgtggctatactgacctaatctatcaagaatatgcaacctattctgttctaatcagataaaagaaatatcagttttactgaaaatactaaaagttcttagacaacaaaactcttacatccatcttagcacttactccaattaattattgaaattgttcaactgtcaccaggacatccaccgtcaagattcttatgcaagtaatagctctgttttgggtaaagagacaagcactagcagacaagtattcttttggtcattacattagaaccaccaaatgatcccctaattttttaatacagacaaaatatcatgacgaataaataaagaatttatgttcttaaactaaaaggtaggcaccatacaaatttttaagcaaatgaactagtgtagtgttacaaaggattttctcaaattcgtgccgccaactgaacaaagtcaatgtcaactagatgcctataaaaatgtttttctaagagaatattaaaattataataccaacctcagcatctactacaaatatatattttaatgagtcaaagatattataaaacgttcaataataataataatattaaatgtaaaaaagacgggcaataactcatatatggaatatagatgcatgctcaacatgtcactctatcatgcttgagctagacattcaggattgcaatatacagtacttgctctaggagaatttaattgtgacataacgatcaaaaaaagagaagcctcagaaaaaaaaaattaatgaaaaagttctaaatgtttgaaaagttaacctagaaattaaatattgataagaactcaaccactggatggataggaattggacaagatgtgcatagaccatgtagaagaggtcaagatgcatataataacgtgcttaaaaaagctaatcaagaaattaaatattgataagaactcacccactggatggacaggtactgggaaagatgtacaaagacaatgtataagaggtcaagacgcccataattgattatactgtaaagaaaagtccttgtagaagacccacctaagaaaataaacacttcatttagaggaagtcagcttaaaaattattgtaagttctatagttttattagaagaaaagtacacaaacctataatacaatatgacaaattgtaatggcaagtggtaagattcatgccaaattgtaagtttagaagtattgacattaaatcacggcaaaaattatttgagcacaataatttttatatcattatatgcattagaccaccagttgcagcgatagcaattgcaacagcataggctgctgcaagacgattataaattaatacttaaaaaaaatgtctttacatatctaatatttaaactagaaattaaataatggtcaaaactcaccaactgaatggctaggtactggataagatgtacaaagacagctcaaagacatcgcacttcatataagtaactttgaaacacaatattggttattgtataaccaagtcaatgtccaagtaaagaggccaaagccacctgagaaaacaaactcttaactgagataaactcaatttttcaccctcagttataatccaaactaatcaataaaactgaaagccgaagtacaaaataataccaactaaaatcactaaaaatctcattaaatgcaagctgattacttaataattaatataatgagttaagaatttgcactatataatggtcttgcttcctgcaatccactcctccaagttatgtaatagatcaccgagtgcactaatggcactgcgctgcattaaaagctgggatccatatacaaaacacaagtaagacagaacaacatcaccacatgatccacccaatttggaatagatgtacatatctgtgcgtttcttcggccaactcaataaagacagaaatgggcgctgctttaatcctctaaaactacatgtagatgtaataagataagcaagcagaggcttcctctattttatccacttttctgtaagcaattgaaaaaaaaatcaattaagtaaaagaaaacaaaaatattaataacacttgttgggggctctatactaacaccgataaagtataaatcttgaaaggtaacccccagcgcaataatgttacaaacaaggtaacccataatttgaatatgattactacatcttctactactaaaatatcttagggtccagggagccttgagttattcatttataaacaaatgtattaaatcaaagtcagtatagaacttttaaataacacattgtataatgtaaacgtcatctggaagttgatcaatttgtttatgtgctgcatacctcctttgcatattgagcggattataagggacaaacgctgtgtgtcactgtggcacaggactctgtgttgactgaagtcaaaactgtgtgaactactatataaagtatgaaaagtatgactaaaaacttgcatgggacaatttgaaatgtccacaagtagttgcagactgcagtaaagtgactacgtaaactacaaatcctattcttcttcactaaaaaattgatgcaactacaatttttacctactgctgtgctagctataataaattataaacatagaagcttaaaaggtagtgttaatatatttttgtagttctgaacttctgaatgtgattttgtacatgaattacatataagtagtgcaattgcatagtatacaattacatgtgaagctagacataacttactgatggcgtaacatcttacttacattatgcaaattagactataattctgaaatgagactaacatatctgatatcccaaagaattgtataagaataaaactataagttagaaaacaaaataacgactattctattctacacactagttttattgaaatcacaatcacgtgtaagcaaaaaaaccaagttagcttgaaaattacagtgagccactttagacaacaacaagaagaccagcgagaacattattcattccaatttgtgattaaagaaacttttaagaatcaaaaaatcagactgagagagtgaacaaatcctttttgaataacactagcaaatttgacctatagcaatcttattaaaataaattaaactaacaggtattaccataatcatctagatccatcattaaatgccattggcataatcatttagatccatcattaaatgcccttgccataatcatccatccaatcaatgcataatacaaaaaaaaaaaaaagaaaaccaaataaagtaacaaacactattaccatgaacatttacaaacatacaaaacacaaattgctcaatctatcttagctcattgaccacactaacaacaaccagtatagataacattacaaaatttatcttcaaatttcacataccataacactacttctgacattctccataccaataatagtattccatatcattgtgaaacataaagattaaacctccactactatcccattgcaaaataaataaaatcgcgcgggaattgcagtaaacacaaatcgcttaatctataatagctcattaaccacactaacatccagtaaagatacattacaaaactgatcttcaaatttcacataccaaaacaaaaacaacttctgatacaaacacgcaacaaaacttctgacattctccatactaagtcgtattccaatatcattgtaaaacataaacaataaacctccattactattcaattgcaaaaaaaaaattaaaaaatcgcgcgagaaatgcataatcgatagatagaacagtagatcgaattgaaataagaacaaaaaacgaggttttgagaactcaccgagtgatgaagagatgaatgaacctgatctgaaactccatgaatatgtttttgagtatgggattgaagatagaaagatgagagtgaaaaatggagggagagggaattttgtttgtgaaagataatattttaaaaaataaataaaaataagatgagtatttatattttatagcgtgccgttttgaatttcgacccaaataaagccgagttgtttgtatttttcttctatttttatgaggaagccaagccaagattaggacgagagccacgctgcctcacgcgccgcttgtggatcggttttgacctgtttaggaattaagcgtggaatagct

SEQ ID NO: 19799 - DNA, 4110 bp, Cannabis sativa
ctctgcactatactctgttaattttgtttgtcttgattagcttctacatggcctaaaaggccaatccaaaacaagcaaagccttacacaaggcaaactctagctaaagactgattcctcagtcacagatttgagaatagtcttatgtcttcttctctctcgaagagagaaacccaagggttctaagatcgaagagatcaaacttgttctctcatatcaaacacacacaacacaaaaatcacaaacacagtattaataacacaaacacacacacaacacaagagagataggagttagggattgagataaacaaacatagcacaagagaacaccacgatttgatcttggagtttaccccagaatgcttgatcttcattaattcagaacaggtaaaagtttctcattagattcaaatcacaacttgattgataatttgtcttgatttctctcttttaatttttctttctgtattttgtctctagcttactaactcttttttttttctttctgcatgtgtatgaatacaacttgagagcttctctccacaacaatggatctcacaagagtaaagcttcaggtttattctgagcttagcagtaggtccttttaaagcactaggggcgatactggaatttggactgaaaacttggtccaaattctagttgagcaaaattttcttgttgtagttatattttggagtttattgttgtaactgcttttcttatttttagttgtaactggtttttgttaagagtcctggtagagagtctatactgaacattagcccaaagggcatatttgcaattcatgttttataaatacttgatcttataaggagatctattcaacaaattctacctagatttccttatgagtgatgagagttatttgcactcttgaggattttagctcgatgaccactagggtcaatttccttttcaatccttagcaagttcatgcaatgcttgtacttgcctagggttatcactttagtttccatgtttgtgggattgtgttcggtgggaactttttccactgtgacctctccctgagtcactttgtctttgataaagtggtatttgatctcaacatgtttggttctgtcatgaaagacaagattcttgtagagatgaatacaactctagttggctatctgagtagattataatagtatttttaagtaaatttaattcctttaggaccctttcatccaaaatgcttatgctctgcctcagtagttgatagggcaacccgggttacagttggactttccagcttatacaattacctccaaattaggaaataataagccgaagtagatcttttagtgtctctatcaccaacataatcaaaatcacagaatccttctaccaaagttagattttgggattttttgaacaccaaaccaatatcagtagcccctattagatatctgaatatccatttcatagccatccagtgtagtttttcatggttagccatgtacttacttagcacacttataacatatgcaatcttaggtctggtgcttaccattaagtacattatggacccaacagcattagaacaaggtacttgactcatctcctccctttctttctatgttttagagcattcatctctagagatcttgtattgactagtaatttgctggctagtcttctaagcattagtcatctgaaacttttcaattactttctgtatgtaatcttcctaacacagctttaggattcctttacttttgtctctcacgatagtgatccctaggattttagtagtagtacccaaatctttcatttcgaactctaacttaagcatctctttgaccaaatttaccttagacctttctttgttgattattaacatgccatctacatataacagtaagtggatgacatccttaatatcacttccatgaaagtataggcaagtgtcatagtagcttttaatgaatccttgcttagtcataaaagcaccaaatcttttattccattgtcttgaagaatgtttaagcccacacaaggacttaactagcttgcagaccatgtggcatttccttttttctacataacccttaagttgttccatgtagatatcttcttctagctcaccatgtcgaaatattgtagtgatatccctttgatcagtttccatgttaaattaattagctaaagcaagcatcagtcttatggtcttgtatttgactactggagagaaaatctctgtgtagtcaatgttagaaattattttatcaggatcaatatttactaacatgtattttgactataattctacaatctaacaacctaaatatgaaaaatcctaaaacgatgaaataaagacattaagttacaaaaaatctcacaataagggcagcggaatagattgtctcattctattcagttctctaacccttgatcctttttgttgcagattatcaagagctgaacctagatcttctctcattcgattatgttcatcacagtccttcacaaaggcctgagtatcaacttgaacagtgtgggctaatactcaaatcacctttgaacaatattgagactgagtttttgctagtgaatttcaaaaattaaagagaagagaatgatgagacattagttttttaatcttcttctctttctttatatacacattcacttagggttaagtttagatgagatgggcttaaaataaagacttgtgctgaatctttctcttagattcgaatatacatatgagctttagagttagattctagccactctattttaaataatgttatctcatctatttatttaaataccaatttttttaataattatcaaataaaatacaattttaatatatttattaattagactcaaaaagtttactaattaataaataaattcatatatatccttccttctcaaaattacccaaacttggtgaaagttctcaaataagacatagtctatttttaaattataattgacttattaaatcaatcagttgagtctaaaagatgatattatctcggacaatgtggggaccatggacctatgtaaccaagctcctaataagtagattttgaaatttatcgagtaaatttcttaacttattaattcctcctaacttcattatagattcagaattgcactcctaattacatagaatgctctatacacaaagtatagatacgctatgaattatccattatttcaatcacaacaatcattgattctatggacggtttacattgagtatggacaaaattatcattttacccttcaatgtattttatccttaaaacacttagccacttgtaaatgatatttttagaaactaatataattaccgaaatgagtgttctatcatttattgtgttaagccaagctctataaaactattgtttcacttctaataagcatagaagttataaatgttcatatatatgattaacactcccacttaattgtactattgagttttcaagatgtaagtatgggttattcctacggtaagctggtaacgaataagtcaaagaactcgtgcaatatatttaagctataacttaaccatctaaggattgagatcaaataatttataatcaattaagtgatattgactttaaaaaatataaaggtgagtttataatatcttttccattttcaatgtcgctccattccgatgtatagccaatacatccaatcctagtttactttactaatgtcctggaaaagacattctacttagctaattgtaagtaaacattatcgatgattatcgcattagtataaatccaatgcactgataaatcatggaactaaataatttgaagcatataatcacaatttctttccactatgatgatatcactgtaattatgaataactactatatgttcagaatttaatagaacttatatattaaacctataatcatgtataaaacatgtgaacaaagcatataacaatgtcgagatatgatttctgatctttattaaaagtaaataagattacaataaaattaagttttatttagggcataaaatctcaacaaactctcacttgcactaatataaaataaaagtgtatttcaatttaatatcatatacttgatgtcttgattaaat

SEQ ID NO: 19800 - DNA, 4653 bp, Cannabis sativa
aaagtagcaattttttgtagtaataagagttttttatttttacattttaaagcagttttttttatattttttttataaaaatccacatagcaaccagcatagtaacttaaatcgcaatccaaatctacatagcaaccaccgaaataatccaaattgtaaaaaaaaaagttaaaaaatagaatatgggtgattcccctaaaatgaaatagtcacgcgtgcaacacaatttttaaaccttatttttgcgtgataattttttttttttttttgaaattttttaaactttgtaagatgtcttaaattactataacatatatatggccatacaaaaatttgactaaaaatttattttggatatcaaaacatatagagtacatcccttttaaggattaattgtagagttttctaatatatattactctgaaaataacatttatttatggttaattttattttggctagctagaatttttgccccctagtttcgacatgtaccaaatcatgttctctgaaattttaaggtcgttaccaattcttcataaactatttagattgttgaatttaaagacttctaatttattttaataaaaagtctaacatagatgaaaattcagtaggcatgattgagtacatgtcaaaattcgaggggtatgatttggtagatatcaaagtataaggagcatggtttagtatgtaaataattaatgaaatagtaaaattgaatgaaattaaacaaaagttcttaaattcaacaatctcaatagtttaagaggaatttctaacgaccttaaaagttaaaaagacataatttaatacatgtaaaagtttggagattctaattagacttttatttttgcatttacatgttaataataatatattaacaagtaaaaaaaaatgtcttttcttaacaaataaattaataataataataataaatgtccgaaacccgatccacgaaaagaggtaaacagaaattgatggcttataaaccactccactgtccttaactcctctccacggacaagacaatattactttaattactatagtgcaggaatatacataatacaacgtacgtacagatacttttaattagaaaaagtcaactaatagcgggtgaatggtgattgaccctacgcataattttcttgaaataattatcagaattcaatatatatgaattggatttcatcccctttcctaggtgaaaatattcacaaaaatgcaatgacaaataaaaatatggtaaatgaaggacaattaatttaattaaaaagcaaccaacctgttcttcttccttaagcatatggtttgaaatgaaggtctgaatggtgccaatacaaaacacaagctcttgaaacggtttcatcgtcatcgtcatcatcgaaccattaacgtcgtcgtttcgacgatcatcatcatcatcatgttcagttaagatcgcatttaaccgattgaaaatggaatcgaagaggccatcgatgctcttgtgctccaacgagtaagcggacgccacattcttcacatgaacatccaaagccaaaaatatcacctcgtcctccgccgcacagtggtacttacacgccaacttaaggaactcgaaccgcctcaacagctccgccaccaacccgcatcggcccctgtggatcacaccttgctccaacgcgcccgacaccacgcgttggagatcggcaacctcagaacgaaaagccttgtggaagtaaactagaagaagaatcggcgcgtgcgcgagtggcactagtaacaatgagttggaagaagaagaagatgaagcagttgaattattaacgtcattatgagcattattattagtagttatattaatgatattattattattattattattattattatcctccgccagagcggcgtcgtctggtggtgggggagagttgacttggccggcggcgccccccatccacaccgaaacgaggtgtcttcaagagcttaaacaagtacatgaagagtttcggagcaaagggagaggaaggggaaggtggaagttgggagaggtcaagtggatttaaggagctttgttttttcatattctcaaatcaaaattctctctctccggtaatgagcttctctctctctctccctcaaaccccagccccacacaccacctttcttcttgccttttcgactaattttttattagtttcaataaataaatgaataaataaatttttgtgagttttatttttatttaatatatttgggatggagacattataccgaatccccaacggaagaatgatttgtttttcgctgtgttgatgagatcgattttttgtcttctcccactcgctacggtacgtatagtgaatattagagaacttgaattaataataaaaactcatgcaaactataaaatataaaatgactactattttttttatataaaagaaaattaattaaataaataaaattaacaattgtgtttcgaggtgatcaacttctaaatctgctgtttatgtatattttattataaatctaagagttaagcttttcgaatatgctaaaggacattactaatgcaaatatgggatctaaatagtttaatactatgaggtgtattttgtatatattttagtaaacacataatgctcaataacaattatattttagtttttttaatcgtacaacatggaacacttatataatgttacaaatagaacattgttattttggtactattggtgcttattaccaatatgagatgacgtcttaatcaggattgagactcaatattattgtaccaataatcagtgacagggccagaatttttactgtgtgggggcttatttatcataaaaaaaatatttatacctacattataatcactattactagatttgtttaattttgtgggggcttttctactattttgatccataattatcaaaataaaaaatttatatttaattttttaaaaggcaatatttttgttagtggggctatagcccccacattattatgagtgggtccgtctctgccaataacagtataacacatgttgatagtaaaaattcatcaataatgaaaaataagaagatatttaacttgctgaaacttaagagaagttgtagagcgacaatagtgaaaattagagtatcgtataataaactcttaagttagggttacacaaattttctaatccctttgaatgaggggtgaagttctatttataggggttacatgtggtctcggggaacaacctagtacttagtacattcattagttgtagaggtcaaagtagtggttgcagggtggtggttgtagcatattgttggtcaagtataccagatgctgcaaatctgtggtgatcctactacttgctcaattcttgtctccacgctttgtcagacgttgtggctgagcaaaagatggcccccacatagtggtcccgacttggtggccctaccgtggtggttctcgtaccttctttcaagactatttatttatcttatactttagtaattagtgtttctttgttgtaagttatgtgtttggacttaatctttttaataagaatagtctttactccttaggattcaaattggttggacaaggcgagaatgaatgggtgatgttagaactttcaagtgaccaaacctctcaaggtgccaagaggggttggcgcagaagggtgacgcagatacccccttggtgcaaggagtcaagactttgcctttttgttctctttattgagttggaacttgctagtggatcaaagagatacctagtcaaaacatgcttaacctatgactgcgattgttgtcactaccaaggggttaatgcatgtcttcatctttttttttttttttctctagaacttgttgcctctcaactttcataagagattagtttgtttcaatgggatgagaagaggtcgtgtccatgactttcgagaagatgtcgcgagaggtgaagtccaccaccccagtaactttcggcaaaaattcgtcaaccaagttatggttgaaaaccctgaataataatcactgataaaaataatgtgatgatcttaacgtaaatatattagagagagtggataagagagtaaatgtgaaaagctttgtattcaggaaatggtctcataaaattacaaggttttgacccccattcttttaatagagtggaggggatttatgaacaagtatattttccaactgcacttgtggactcttgtcactccaatattaatttgaaagttggttttacttttgagcattcttaggggcacattctccaaaaacatgtgttcaatgagacatagactcattaagggtctatgtattcttttatttgaggagtgtgggccaagcatgttgtttcatgaattccaacatgttgtttcatgaattccaacatgagtgtgtgagccaattattgtcatgcacgtattttaacatgagtagctggattaatctactccggtggttgctttttgatctaagggttgagattcaacttatccaactataaatacacctctaaattgttgggaattttcattcccccattctttctttagcttgctatcaaaatttagggtttccaacttagtttagcttagcattggtatttttggagatcttcttgttcctctctctctctctctct

SEQ ID NO: 19801 - DNA, 4602 bp, Cannabis sativa
ccccctcaaactcagtgaggttgaggaaacaacactgagtttgtctctgagaattgcaaatctggaactggacacagctttggtaagagaatcagcaagttggtctagagcagggacatgttgaacttgtaattcagacttgagaactttatcccgaacatagtataagtcgatttcgatgtgcttcgtgcgagcgtggagaataggattggcagcaagcattactgtgctaagattgtcacaccagatttttggagtggattttggagttgcaagaggtcctaactcatgaagtagagactgaagccaagagatttcagtaacagtagcagctaagctgcgaaattcggcctctgttgaagatcgtgagattgtttgttgctttttggacttccaagcaactaaatttgacccgagaaatacacaatatccactcgttgagcgtctatcatcagggtcggacgcccaatcagcatcacaaaaagcctctatatggaaatcactgcattttgttagatgaataccatgatcaagggtaccagcaaggtatcgcagaatccttttgacagcaatccagtgagcttccaaaggagattgcataaattgagagactttgttgacagaaaaagcaatttctggtctggttatagtagcatattgcaatgctcctacaacagatctatactgtgttggatcttgaacaggatcactgccaaacttggagagttttaaaccgtgttgcatgggagaattgaggcttttggcttcctgcattttagtgcgaacaaggagatcctgtagatattttttttgagagagatgaactcctgaagtagtgtggtgaatctgaattccaagaaaatagttaagatctccaagatctttaagagcaaattgcaaattcagattagaaataactgtaccaacacgtgcttcatttgatcctgtgacaataatgtcatctacataaacaagtatgtaggtgatatcagtaggtgtgatgctgaaaaacagagaggaatcagtttttgctgaatgaaaccccatgttgtttagagcagtagagagcttggagaaccaggcccgaggtgcttgcttgagcccgtaaagggctttgtccagtttacagaccatatcaggataggatgcatcaatgaaacccggtggttgaaccatatagacttcctcctgtaattcaccatttaaaaaggcattatttacatctaattgccttagtttccaaccttttgtgatagctagagtgagaacaacccgaattgtttctgattttatgacaggactaaaagtctcattgaagtcatagcctccttgttgatgatagccttttgccactaaccgagctttgagctctttaacactgccatccggattgtatttgattcgaaaaacccatttgcaaccaataggttcccgtccaggaggaagcttaacataacgccaagttttgtttttctttaaagctgtcatttctttttgcatggctgcaagccactttggatcaagaagggcttgtttaacagtggagggaaaaatggatgccatgaatgctttaggttttctaatgccagattttcctcttgtttgcatagggtgatgattagtcacaacagggacagagggactgccagatgaggaagcagtaggttcaggtgcagcagaaagtgatggagattggaaaataggtgtggaagaagaaggtaaggttgtaggatttggtggtaatgtggatacaggggaaggagagatgggaatgatactggagggtgagttggagggagagatagatgatggtggagatgtggggagtggggtggatataacaggtggaaaggctgaagtaaactgatgtaaggcttcagttgagtcagatggtggtgaggtagaagatgttttgtaaggaaacacggtttcattaaacaagacatctctggacatgtagatgcgaccatcgttagagagacatttgtagcctttttgggttaaactatagccaagaaatgtacagggaacagacctatagttcattttatttttgttgtagggtcttaggttagggaaacacaagcaaccaaaagttttgagagccgagtagtcaggtttggtgtgaaataatttttcaagaggactgatatgacttagcaccttagtgggcagtcggttgatgagaaaaacagcagccctataggcttcatcccagaactttaggggtagtgaagagtgagcaagtaatgttaatccactttcaactatatgtcgatgctttctctccacaaccccattctgttcatgagaatgaggacatgaaacacgatgaacaatcccactggtttctaatagatttgtaaaggctctatattccccaccccaatcggattgaatggcttttattttcacattaagttgtagctctatttgtgttttaaactttgtgaaggtgggtaaagcttcatccttagttctaagaagataaagccatgtgtgcctagagtaagcatcaacaaagcttatatagtacctatatccattggaagattctataggggcagggccccataaatcggtatgcaacaattgtaatggggcagtataaacagtttcagagttaggataagggagcttatgatgcttacccaaacaacaagcattgcagaaatcaaactcactcttattactgtttggaatattacaattgttcatgacagtttgtacagtgtttttggcagggtggcccaacctattatgccacaaattgaaattggataaaggtacattagagctagtgtgaaaacatttaggatcgagaggggatgcagaagacacagatgcagaaactctgggctctgcagatgagaaacttggagtggataggcattgatcaaatttgtatagacccttctcaactttcccaaccaataaagtcttcatattgacctgatctttcacaagacaatggtcaggataaaatacaaagaagacattgttatccctagcaaattgagagacactaattaaatttttggttatagcagggacatggagtaaattatttaaatgaagagattgagaggtgaaaggagaggtgagagtagaatgaccaatgtgttgaatgtgcaaacctgaaccgttgcccatatagatctgatctgtagactggaattcttgagaagatgtgaggttgttggcatcatttgtaagatggtttgtggcaccggaatccggataccagctggagtctgcaaccgtagatggagtggcagtcatagcttgcatatcagcaagattagcagttgcagggaaggattgaaatgattctggccctgtaaacgatttgtcaaatcgataaaaacattgggtaacagtgtggccttgtttatggcatagttggcattggattttaggtgtggtgtagcctcgaccaccacgagttgatccacgatatccaccaccacgagggggataaggattgggaaaataaggtggaggatatggcatgccatagttgggataagaaaagggatagggatggcctctgtaaggtgttggaaaaggagtacgaactccattattgaatggggaaggtgatgaagggggaggtttggtgtttggaggttttaggtgggcggcaagattggcttctggtttagaaatatccatttcagagtcttgttgttcgtttcgaacttcttgggccatgagtagagattcaacttcagcaacagtgtattcgtctttgcgagttgagagagaagtgacaaagacagagtaatcgcgcggaagaccattaaagattgcttctatgtgatcttgaggagacatttcatggccgatcgaagcaagagagtccacaaggtgtttgatcttaagtaagtaatcattgagattgccagtaagacgagttcgacggagttgagtgcgaaactggcttattttagcacgattctgagctgagtagtattgttcaagactgatccagatttcagaagcagtgttgcagccaaccattcttgtgagtattttctcagacattgaagaaagaagccatgaaacgaggaggctatcttgaatatcatattcaagaaattcagggtttacagtgcctgaattttcatctgcagcagtagtgaatttagagggagtggaagtaggatcaaggtattttaggagacgattacctttaatggcagcaagagcttgatgacgccatggaaggtagttgttttcatctaattttactgataacgagtgattgaacgacatcgcattcggttttggcaacgagaatcctggagctctggctatggaagaagcttgagaagaagaatcggccatgagaacgaagggaccgagaaggcgtctgataccatgtaagagaacaccagagtaaagaaccagtgtttgtattattgaattgatttcattgaatacactggaaaagacttagctttatatacacagctaaatgaaattaaagaatcagttacaacagtagaaagttagttataaccgtagttaaaactaacataacagaacagtacaagagttgtaactaaaacaagcatagacaaaacctattctctaaca

SEQ ID NO: 19802 - DNA, 3694 bp, Cannabis sativa
cattcttacaaggcttatttctctttatttctcctttatttgttctgatcatggaaggcttttggcttagacttcaaagaataagggctttaatttccatccccattgtaagcagctgggtcttatcaacttgtgctttgctgatgatcttctaattttttacaagggcagccttagctcggtaaaaggagggcaagagggtgtttattaagttttgtgactcctctagtctctattaacaactccaaatcgcacatctattttggaggagtgaaggacgagccaagcttcaaattctgaggttagttcaaatgcaagagggttcttttcctttaaaatataagggttcatcttagacctactagatggaaagcttctgattgtggagttatattggatagcctaatcagaaaattgaattgcagggccagtaggaatctttcttttgcagggagagctcaactaatccattctgtccttcttgacaatagaaacttctggatgagcttattcatattacctaagaaaatcactttggctatagacaaatgttgtcgtgatttcctttggggtgtcaaaggtaataagagtaagcttcatcttccctattgggaaaagacttgcattcttaagaaattagggggaatcagcttttatgaaggaaagaaatggaacatggccatgatggccaaatatagttgggctatctcttgtaaaaaagattgtcttgggttagatgggtgagtaccatttaccttaaaaattttaacatttggaatgtccctaaaaattaaagtataagctggtatttcaagaagattttgaaaataagggatcacaccagagaagatgaattgttgaattgtgttaagcataagaagtttcgggctaaactttactatgcttctctggtatataatcaggaagttggatatgttaaggctatttggcataggcttatcattctaaagcacaagtttatctattggcaagcttgtaatttgcaactggacaatttggatagaattcttcctattcaatccaatctttgcctagtttgtgatcaggaaaaggagacacataaccatctatttatggactgccacttcacaaagttggtgctgcggtatgttagcaactgctttggggtttaactggccaaggaatatcgtcgagttccaagattggattcaaaacgctgcttatgacttaaaatttcagatttataatgctgtcttagctggaattctgtattgggtttggaaaaataaaaataattgtgtgtttaacttgatgtgtaactagatcaactacttttataaatgttaattagaagattggtgaagtatagggtgttgggattcgcttgtaatcacactaaaacaaataatagaatcatggatgtaattagtagctagtgaggctttggtgcttgggcttcgactctgccttgtttctgattgtatttgctcaatttttgaatagaattattttttgtccaagaaaaataaataaataataaagtactgcattctttcatagagattctaatatatataatgaacttttaatttcatgaccatgatcctttattattttgaattaataatcatatatataattttaaaaatggtccttaattatgatctgatatatcgtgattcatttgttgggctatatatatatatattttttctaacgtggtccttataaaaagctaataataaattaaatactattactatatgacatgacatacatgcatgaattgatcctcaagctagagccagataggatctatgaaaagattttgccatagctagtctggtatatagacgctattttaggtataataataataataataataataataatagtaattaaacacactactatatttgatataatctatatatatatgtaagacaatatatacatattccaattatgagaccgttatatatttggatgagtaataattaatgccatacacactgacccatatatacgtacctgctgcttcaaatcatcattgaattaaaatttattatatggtgtcagaaaaaataaataatagaaaagaagaagacgaaaggtaacatttatagttacttttggttaaaattaggttatatataataaattatttaataaactcacgtcgagttgaactcatcaataaaatgactaatatatatggatttgatatttagatgatattaattagactcgtgaaacagtacacaattccaaaaccctagcttgtaatgttaatgagtaatttggtacggtcgttgttattgagtttatccaattccaaacaattatatttaatcacaataaaagtggcagattttttttttggttttgtacaccaatataaaagtaatatacaactacccttttaataaaattaatatggattttgagttgtatctatatcggccggttatactataatatatatacaactcaaaattcatgagcatatgcatatatagaactttatgttgatgaaaacaaattatatacatgagcatatgcatatatagaactttttgataagttctttcgaccaactactttgatcagtaatttattacattctaattaattgtatgttttttttaataaatcatgtaattttattaatacactacaaaaattgtcatttttagtgacaattttttaatcataacaaaaataatttgtgactaaatatgatttttaatcctaacaaagaaaaaaatacttgtaattaaaaattgtcactagctaatttaattttagccacaacaagtattgtgactaaaaacacatttagtcacaacaaattgtgatttttgtgactaatacttttggtcacggactttttagtcataatataagaatgacaatttataattaatcacaactttttcccttttagtcacaaattttgttgtgactaaaaatatttttttttgtagtgatagtaattcgttaaaataatagtagcgcgccgcccaatatctctccctttgtatatacaactaagattataataaaaaaaaaataagctaaccaaccgattgtctgattcttaaattatttgacaaacgaaactaaaataaaattttatgtaaaagattgtagcatcacaattaactttaagaacatctatatatactcaattttctccaccgctcaatagacacaacagtattaactgttgcagcaggttctttgattaacccattaacttgagtattcaactattgtgcaatatgtatgcaactacaccattaacaacccattcaactgtagaaaacttttattcctaatcactaatagtgatttcatggtgagctatcgaagaataaaaaagatgaaccaatattaacaaagtaaaatcatgtcacaaacacaagattaatcgtagtaacctaaacaaaagacactcaaaattatattacaaagacaagactaatcgtagtagcaaaaccacaaatctcgaccaaaccacacttaaactcggaaggttggcatgaccatgcaaaaaaagaaaaagacaacctccagcaactaagaatttagaagcaaaagaccctaacaaacgaaatataattgaggatcattactttagttaattaaggtgccgtttggtaacactttcgttttttaattttattttaatcacaaaatgaaagta

SEQ ID NO: 19803 - DNA, 5311 bp, Cannabis sativa
gttattgtttttttcttggcgcatttggcataggtgaaataccttcgtgcatgagcataaacttctgaataatgagttggtaaattattgggctttaagctacctttggcagtattaaacgcccaaagttacatctcggatggtggcttgccgaaactcccaactaattctattggagtggttgtggaaccacatgagtcggttcttggggatattaatttgttcatcgacactggtattagtgctgataactggaaggttggtttgggtgttgttatctccgacaaacagggtcagattattgcttcaacgggatctcctctcgttgggacattctctccctaggttgcagaagctgcagcccttctacaagggttgcgattgtgtctgcgagtaggatacactaacatctcgtccttttttgattgtcaatctcttgtgcagatcatcggtcatcacgaacctcgccttttggagtttggtattttttttttttttgaaaataagcgtaatcatatattaaatagatgttagacctcacggtcgttacacaaaatgttctctggtaaagagtggatcgggatagatccgtacatctggtgggtgaaaactcatttagccacattatgggctgcaaagttacaagtcctactaatattattatttctcacatccaacaattatgaatttttttttcttctatttctctgcattattgtaataggaagcataatgttaatgttcgtgctcttgttaaattaacattatccttatttaatccctacatttagtggcccagactacttatggatatttaattttgttggttgttagttgtattgtcctttggaccttttggctttgtgccttactgaaatttttcctcaatttttttttctaaaaataaaacctatggttggttaaattgcaaaattgaaagacaaagaccaaaatgaggccaaaatccaaatcaaccatcgactaattggatcttgtatcatacttttgtatcttttatttttgaaactgataatttgataactttttttgtccccttaaagaaaaatcgataatcccttctctcgaaatgatcacaacatgtcaattataaggttgaaaaaaaaatatacagagtgaaaataatctccatttttagacttaaatagattgaaaatttatgccaacaaccatcatatatatttttttgtccgtaaaataagtttaccgataatcctatatatgtttcgatatttaagataattttttagttcaattttttatggtcctttacattgtagttatttaagttatcttacaaaattttaaaagattaacacactgaaaaatatggttcaaatagttcgttacatactggactcttttattttatacgcgtgcgaaagactatttaagcatattttcggcatgttaaatatttttaattttttcaaaattttacataatatcttaaattatacaacgtagagaattataaaaaaattctcaaatattaaaacagataagaatcggtagatttttttagaggagattgtagaatttttttactattttttttttaagttctatttccatctatttgttttttaataatattattaaatttaaagctactttaaagattgaaattgatattctataaaatttcaatagcatttctttttaaatgaaaaatttgtagaatgtatgtaaaagttcatatgtttgatacagttcctaattcaatttgtaaacgatcgaaatatcatgtaacctcatatagtgaacaaagttcaatcaaatcaaatcaaaagaaacaataatgattcttctgtcacagaatttgttttataacgaatactatacaagaatatttatatatataaatatatattacacaattaattgattaaaatatttatcataaagaaaaaaggatcacataaaatttacttaaaaaagaaaaatctttaatataacatattttaatacaccataacatgctgctgcacatgccacctgacctgctaatgttagagtacatataactctattgcctccaaaatccattaacaatttctctctttttaatttaaaaattaaatttatattatctcaattgataaactaaattattcatttggagtaataatttaagaccatttaacaattattctttcctattaaagatgtaatttttaattcacattgctaaattgaaggtatatactaaatcagggatatttgtagcaaaattttgtgataagttaaaaactatcattttttattatatattaatcaaatataacttcacaatagtttcaataaataaatatcctctcaaatataaccttatcaaaattagaattcctaatgtacataatatgacctataaaattgggtataaattaaaaagtagtaaaataaagataaaagtttaaataagaaataaaaaataagtatagagtgtaatttcttctaaaatttttgttatagttcatgcacttaaatacttatataatttttttatcgataaaattttttatattatttatttaattatatttaaatttttatataaattttttagcggtaaatttcttttatgtagttcatatttgacaataaaaattacaatcgttacacctttaatgtaacatttgtcactgtaatattgtaacaaaatgactacgtgagaattttcactactacaaaatttacataaaaatttaagtgcaataaaatgaactatattaaaattttacttaactgcaacaaaataaactaaataaatacatttatcttaaatttaccttaaataaaattactttttttttcttttgcttttgaagaatatcattattacatgtttattaattatgaggtgaatagagaaagatgatttatgtatagaaatgagaataaaaacataattatagtaattggatggagtataataaaaataataaataaataaacttgttcatatctttaggaataattacataattagtaataaataaattaattaattaaatacacatttaggctgatttgatgtttgggttgagagaatatgctaaagctaaagcctaatagggtcactattgagagcttatttctctctcctgcccgagctgcccagttcctctgtttcaaacaccccgacctgcccctgcccctgcccttgcccttgatgatgcaaaacttttctttctctccttttttctcaaagaggtctctttttccacgccttcttcttcctttctttatcggcttctctcttccgaatctcactctgaacccgttttgcccaattgggtctgatcaaaatttctcaatttttccatcatacaattaaaaagttaatctttttatatacgagcagtgcaatcttttttcttttttcttagtacctgtttgatgcctttttatttgtttaaatcattcgatgttaggtggtctgaaatgggaagtaagagatgtgtgagattattttgcttgttgtaagtctttgaaattttgttgtgagaggtttgggaagatgggtttggggcctgatgcttcaaaggtggaaacttgggaagattcgagcaaatcaagggtagtagtagtagagaagaagaaggtgaagaaaaatggggaagttgaggaaactgggtgttgggttaggtttagttttaggaattgcatgccttcgagatcgaaagttgatagcttcatgagtggtactaccgcttcttgtggtaaattatttttatgtcgttttcccatttctatttttgtgaatggattttttttctctttgtttcttttttgtttttgtaactatttgagttagctaatccaagttaagttgcctcataaattcacgggcttttacaatattattgagcaaagtatacaaatttccaaaattttcctttgttatcttaacttgaatagagtctaatacgacaagaacaaattggtttcttgtagttgctatggatttttgcatgaaactcaggtagtttcacaaaaggcctcataaatatcatcacatgtggggctatttggagtatatgttgaaactgactcatatatatttgtagtattcttcaaatatagttataaatgttagcatttattactaatgcccataaaattggatgttataaatgtgtgtctatgtatgtgtgttcatttactgagtgagttgcttttgtgtaattttgttctggtggtaggtaaatctactgatgagaagaacagagatcaacaagttgctccagtggggtcatcaacaagcactagtaatatagaaagtactatatctacacctaatttcagtgaagaactgaaggttgcttctcagctcagaaaattcacatttaatgatcttaagttagcaactaggaatttcagacctgagagtcttcttggtgagggtggatttggctgtgtgtttaaaggttggattgaagagaatggtactgctcctgtcaaacctggtactggactcactgttgctgttaaaacacttaaccatgatggacttcagggtcataaagaatggcttgtacggtttatatttactcatctttgctttttgcctttttattgtttctttcattcttatcatgatttatttaatgtgtctttacaatttcaggctgaaattaattttcttggtgaccttagccatcctaatttggttaaactgattggtttttgcattgaggaggatcatagacttctagtttatgagttcatgcctaggggaagtttggagaaccacctcttcagaagtatttaaccaaaccttgcattttccattgttaaaacttcatcatgatactactatgggatgttattagcataatgctcattatgacatgacctttttctttcttttttttttttttttgttaggagggtcagtgcctcttccttggtcgatcagaatgagaattgcacttggtgctgcaaagggtcttgcttttttgcatgaagaagttcaaaggcctgtaatatatcgtgatttcaagacttctaatattcttttagatgcagtaagtgattattataactgaatgacagcttcaactccttacttcgtctttttttttttgtttgttttctacaaatgttaatgttgaatttgtttgttaggattacaatgctaaactctcagattttggactggcaaaggatggtcctgagggaaatgatactcatgtctcaacacgagttctcggtacctacggttatgcagcaccagagtatgtaatgactggtgagtttggttataaataatcatctctctttgact

SEQ ID NO: 19804 - DNA, 3475 bp, Cannabis sativa
taggtgagagaaatctcactataatagaaatcaacatagcacaatattcttcaatccttggaacccaaaaatacaagataattttccaaatttttaacatgaaacccaaaccaaaaaccttccaaaacaacataatgcatcaaacatatatacaatagcataaccatgctataatcaccacacttctcctaatcttcacaaccatgcaaccccaatcttaagaatacatcaaacaccattaacaagctcaaaatctagaaatttaaagcaagtaaaagagatcaaaatagttacctaaggttcttcaagctccaagcaagggagcacacaaaattccataccaaaactcaagcttttcttctaaaattgggtttgaaatcacaagatagaaagataaagagagttggacaagttgggggtttcaaaaacctagaaattgtttttcctctttcgctgaaattattttttgttggaaaatagaaattttaggccaaaagactattttgcccctaaaacacacacataagcataaacacataaaagggaaaatttgtcattccactcacacacatatatatcacatgatttatattttatcattaacacatataagctataactaaatttcgaaaatatattttggaccctgaaccaagttcggtcaaaaatacccaattgtgactataccgtgttgacttgtcagaaattacctgcagaaagatagaataaacatactatataataatatagtctataaactaatataccgtaaaattatgtttttttacccttcttaggtaaaaattatgaaaatacccctgacacaccaatggggttttaaaatacaataaatcacaataattctacatattaaatcatataataatataatttctcattaagacttaattaacttagttagggttactaatccagtgactaaactttagcgtattacaattatcccctccttatagaaattttatcccaaaatttatctgaacaactccagatatttctgttgcatacctgtctctagttcccagcttgcctctatgactttactgttcctccataaaactttgatcagtgcaattgtcttgtttctcaagagtttctctcttttgtctagtatttacactaattgctcctcgtataaaaggtctggttgaagttcgaatgtttcataactcagattacgcaacaagtctgaccatatttccaaagcataaaaacatggaacacatcatgtacagcttccagcgctgggggcatagccaacctatacgctacttgccctatcctctccaagatttcaaaaggtccaatgaatctcgggctatgtttttctctcttaccaaagcgtttaatacccttcatatgagatattcaaagaaataccatatctctaacttgaaaattaatatcttatcggtttggatcgacaaagctttatagtctactctgagtagcaagcatttacgctctaatcttgtcagttgcctcactttgagccaccaagggagaagacagaagatggtgacaatcaaccaaggataagaaagagaagaaggggtgacgagcccctgaggagaggagctaagaagaggtggcaagccaccatggaaatgagagaaggagggtggcgagccaccaaggagaggaaaagagaaaaggtggcaagccaccaaggagaggagaaaaaaaaaagagttggcgagccaccaatgagaggagagaagagggggtggcgagccaccaaggagaggtgaagagaagaggtggtgagccaccaacgatatgagaagtgaagaggtggcaagccaccaaggacaggtgagtggttgtgaggtgagatgaatcatggagagctttaggagctctttaggaaattcttagcctacttgggtgagccccatgccttttttgggggagggagtccctgactccttgggcgagctcaagacctcataggtgagccttgatttctcttgcaccctcctttagtaatttagccataacttgctcaatataactcgaacttaagtgacacagatcttttggaaagctaagaaagatatctacaactttcatgcttagctctaaatccagttcttatttcatggttcctaaagctatcaactattcacgcttcataacccaagctaccaatcgtttcctgtctctatcaataagtgtcaaaggcactttaaatgacttagataatgtgatcagcctccaaatatcattgtcaagggaggacctctttattttttactacttcattcgtcataacttcgagattacactttgtgaaatcttggggttaacatattttaatttgtaatttgtctaagaacaaatttgtaatttattttcttttaatttcgtttgttttataaggcttcaatttaatccaacaaaaataaaattatatctaaataaaatatttcaaatataaatgtatattacattaattttatgaaaatattatttaaatttaattaattttatatttttatactaataaatatgtaattaattagtatttaatgtgcaattttggtattggtagcacacattcattgtcccctttatctatgtaggacagacacttggcatgcgaagagaggtttggatggtagcttggtggcgattggaggcttggacaacaccaggcatagacagttggcgaagaggaaaactttagatggggacaaccgagccaaaaatggggctcgcgtgcgtcaggtgacagctgtaatatccgccttcttgggtaattaattttttttattttgtttgctaatggggataatttattgttttgaatatttatgaaatttttttagacaataaaatttcttttattttgtttttattagtttgaggttgtgtatagataaataattaaattattagagctaatttaatatttaattatttataaatactattataggtatgttaataataataatatgggtatatattatttagtttattattaattatttattattactattattatttagtttttattattatttcattatttagttttttttatttttttatttgtaacagtttttacgttaatatatatatatatgtatatatatttattttagggttaagattagagtttgtgggatatatataggatatttatgagatacttttagggttgtgaccgcagaaagaaattgaaaaggagaggccgtgcgtagcaagcgataccgagagagagaaaagtgagattttaagtttttgtattttgagagtttatgggctgctctagatagtttctttgattctaaatcctgtcatagagcttttagaatgtgattaataggtctggaatcaaaccattcgaagtcaccattgtttacgttcgaaaataccgttcttgaaacggacccggatttgaacgtgtttaagttgtttcgaggatcaaaggaggttgtatttg

SEQ ID NO: 19805 - DNA, 6078 bp, Cannabis sativa
taataatttttaataaattaatttgtggtataaatatttaattttaactcttaattgtaaataaatagttaagtttaattttttacagtaataatacctaagttatattttatatttatggagttttcgtagttacttaaccgttaagtgtcaaattattattcacgtgttatttttttagtagtatatttagattaatttttaaataaaaaataaaaatttaatgacctagaccaatcaaaaactgtcacgttggttattgacttgacacttaacggtcaagtacttacataagttctgaaaatataacatgagctagctagagatgttatgacaaaactagttacggttactgcatctgttcatgttaaaaattattttcaaattagttatatcaaaaaaattatcgaattaaactcagagtcttatttatattattttaaaaaaaatataaagtctattttatcatttaacaaaatagatggcctaattaataacttttataaaatacataatcgaaaatggtatcaactattttgttagaatttagagatttgaacaccaaccttggttagatattgtatctaagttaagcataatattcattagcaacaaattaggttgagtgatgttgtttgggagattagagatagatggataaacaaacagtttggtaaatatttgggtattaatttttttttttttaacaaaagtcaaatagtaattataataaaatatagtttgatttactattatgattatgaaagagacttatggccaataatgaataacaatagtgattaatataaacaaagcatgattaaccaattgatgtaaagcctattttacctttcttatataaaagctagttttcttaaacctttgtatagaaaatttagttttgtatttttgcaaataaaaaatgttgtaaaatttgtttaataattactatgaatatagttaattatttgctaaagataaaaataaaattataacatacaagtaataaaaaaaagtgattatttcacaaatacaaaaaataacaaaaaaattataaaaataaggttgtatggaattttaaatatttttaaaattttatttacaaaaaaaaaaattattttgaattcttattaatttgttattaattttttattatttgtatggtatttagttatttttgctattgttgttttgatgttgttgggctgtaatttttttattatttttcgtattgtttttataaaatactgtaaaaatatctaattatatatatatataaaaaaaaatagtactttatctaattatcccataaaaaaaatctcatgtcaacacaacttgttggattggattcaataaattcaaaaacatgactacacaagtttgtttttcaccttaaagttctaagataaataagcaattataaaacaacaaaaattaaataaaaattaattaattattcgaacaaagaaaaacaaaacaagtgcatgaaataaaaaatataattttaataacataaaaaaagaacagaaaaaaaaaacatttttctattatatagatatatataataaaatccttaacaaagtgaaaataaactttgttacattaaaaaacaaaatggcaatgtttctcactttagtacttttcttttttttcttttctatggttacacattgtgcaacaaaatattatctcttgttctttctttccaaaaatcaataagagtaaaaaaattacaggagaaaaacctcatcttttcgatattgttagcttaggatcaaactcgaagcgaaaatgaagttcttcataataaaattgtggcgaaaaacacaccccttcggaacataatgaaggaatatgtgacagaatcaagcacgaagcgctgctacgttctgagataacccgtcaactgcctcatccataacctcagcaatcggttcatcctgcataaaataaccgaacatacaatgatcgataagtaatcagtttaagcaatcagtatacattatagtatcaagtttgtagtatcagttacctccgaatcagttttcgttgttgttttcatgcctatacacttagaagcgctaatgctattactcttcaacaagctacgaacgttcgggtttgctttgctgggcgtgtctgtatttacgctctgtaagccatcaggctgttgtgctcttggactatcaagagttgaggcaacagaagcattagttctcctttcgaaatcatcattttgctcgtcgaggatttccttcgggacagtaacacgtcctctgatcaaaaagagaaataaaatcaacaaggaaagatcctcataccaatcaatcgaatatcgagttataagtgatacaaacctaggaagggaagcatgttgtctttgaaggggagtactttttccactcttgcttctatcgcctttagcaaagtgttcctcgagatgggcgaattgcctcttgaatcgatcgacaccacttaatggacaagaagagaactggttagtacttaacataacagtttttcgtaaaagttatgatctttagctgacctcgggtacatgaagctagtctgctctcctcctcgaagatactcctgcaacatctgaggatggtactctaaaatctgtttgattcaaacatagtttaagttacaacgaaaccatggcactagcaaatgaacaagtttcaagcaacagggccgaacctctcgatatatcaactctctaacatcatcctttgccaatttcctacgctcaaactcaaattcgagttttgagatggcttgagtagatggttcgcgttccacatttgacaaaccgataaagtaaggatcagctagtgcctggaagaataaagggtcaacaacataagatattataatactttcgaaacagctaaacaattacaatacctcttcagctgatggacggtctttagggtcgaatgcaagcaagcgttccagtaaacgaagagctaatggatccacattagggaacttttgtgagaatggaaccggttgttttcttcgcatgctactaagataccttcgtgctttttcatttcgaatctgacagttatcaagtatttcagcatgaaaagaataataaatgtttacagcaagagaatttggggataaaaggaatgaaaactgacccttgcagtggattcaggtgggggtgtaccgagcaaatcggtcatgagatccaattggtgtaccacatttttcccaggaaacagtggcctccctgtaagcatttcggcaaatatgcatcctatgctccaaatatcaattgcaggagtatactgaacacaaaaagtagaggtcttagtctaagaaacaaagtaataaggcaaccgaacacttgatatgatcttcgagtacaaaattccataaaaacatggtcaatttaacatataagaaagagcaacagatcaatggtgcttagagaaatgaatattggtgattcaacctgtcctaagcaaaggaacaatacttgaagaaacaacccgaaaaaacttcaaaaagcatcagaagattgttaataaaatcacaatatagagatgacatcacaatgatcaattccagcttacttttgagaaaaatgaaccgcagagctcaggagcacgataccatcgagtggcaacataatccttcataacaaaaagttcaataagtaatacagtttaacagattgttgtaaccatcattaaacaatagcttaaagttaacttacagtccaaaagatagcagatggggcatcattgaaagaaactcgagcaagcccgaaatcacatatcttaagtttgcaatcagcattagcaaggatgttcttaggcttcaaatcgcgatgaaatacatttgctgtaagaaatatgatgaaatcaatcaaacaattttataaaagctgtgtatatatcagtaacaaaatactaaacaacaacaccaacaacctgtatgaatgtatttaagaccccgaagaagctggtataaaaagaactgataatgctcaggagtaagatcatcattcgccttgattacttggtgaagatcagattccatcaactcaaaaacaacatagatatctttaaattcccgtcgtgaaggaggcaacataatgtgttttatttcaactatatctggatggcgaagcaatctcaacagcttaatttctctcagaattcgagtagcatcagaaacatgttcaaaaacatcattaatcttcttaattgcaactctttctccagtatgagtgtcgattgcagaaccaacaacaccataacttcctttcccaataacttcctgaatctcatattggcttccttctccatattcagtgaagaaatctgcctctgctccctatacaagtaagctataatgtgtcattattaacaagtatatggaaagatggagacctcaaactttaaatctttgtagttttcttagtatttatgatgatattttgatcattggaaacaatgtcaagacatagctgagatctcaaatccatctaaaggataaaagaacaaaatcttgactcaatctcaaacattgatgaaatgataattataataattctaatgacaattcaataagaacatacaatttggctaaactcctaagatcacatttcaaacacaaaactgttctataatttttcatccaatctgaaagactttattttcttaataagaaatcagttctgtttgacttagattaaaagtaaagatgttagctttaaacataaatatatttttatatatttatatatatttctcctagatatgtgtaatggacacagaaattaaaatcaatgtctcccaagtcataaatgagctttaatcaaaaaacaaaaaatcccataaattcattgctttgtcagatcatcaaaccattcaaacaaaacagatcaatacccataaataaaagacagtaaagattgaaaaaaacccaaaaaagaaaacaaacccagatcgtaaaaataaaaacaaagatcgaaaagaaccttcttttgagtatgcatatgtccaattttgaattgggtcctaatgggtacgttaatagggttcaatccagaaaaatcaaaatcttcttcaacaacagtaaggccttgagattcttgtttcagagatagaagaccatcattattaatattattattatcatcaatagaagaagaagatgaagaagtagaagtagaggtagaagaagaagaagtaggacgacgttgaaaccagcgacgaacaccgtccactaaggtagctccactccccatatacaaaaaattgttgaaagtaataaagaaaaagtctttttaggattttgattcacagccaatcgattccagcatttcccgctttcaaaatctaattcttcgctggatttgacattcaatactgaacacaatacaacataaacagaacagaagagagagaaagaaacaaagagattgtatttatggaaatatatattaatttaattatcctaaatttaattaattaattaattaattaataataaatttgtgtgattttttctttctccggaaccgaaggttgcggaggcaaaaatttcagagatgtggactcaatgaatgaatgaacatactttctttctctttcctttgatttggtttaaaatgagaaatcataaaaataatgtctaattaagtataggattttaatataataaattatttttgggcaccatttataatttgttaattgtatttttttaaagatgattttggaagtaattatatataattatattatattttgtgtatttaaaagtaacggtattaagtctagcaattacattatcttttgaaaggtaaagtgtgtttagatagggaaatttgaatttttatgcttacatttgattaaaaaaaaaatttctaaataaataataactaatatttgtaacatatgacaacttttataatatccctaaaatactctcatttacatcacccctatttacacgatcaaaccacccatcggaccactcatcggactacccatcggaccacccatcggaccacccatcggacccattggaccagatctgctaccaattttt

SEQ ID NO: 19806 - DNA, 2319 bp, Cannabis sativa
aaaaaaaaaaaaaaaaatttatgcaatcaatttcatactaagtaaatggtctgtaccagacaaaaacaattaaaaatatgaagaaatttctaaatttgtcacttaaaaaagaaataataataataatttattcagaaaaaaataataaaataaatgacaaaacagaattccctgaaaacaaattggaacaaagatggaaacattatttgtccaaaactaaaatctggtgtaacttcttgcttggtgtccaagctttttttttttgaaaaaaaaacctctggaaaatatctcaaacttccatttatcactgcctatattttattccgaaaataaccttgccacgtaatcataattactctttgagacctaaaccccactaccctataaaaccctcctcagtcctctgtttccttcttcccaaaattcttaattttcttctctttctttcttttctgttttttcctcaaattcccatcaactctctccggagatggttggagtaaccggagttttggtcccgatcatattttacgacggtgaaagcgagactgacatgggagacgtcttcgtttatcccgacctcgatttcaagaagcttcaaacaattctatgccggaagatcagaatcccgccacaccaattctcggtgttcatgtcgtcgtcggaatctcgcaagaaaatccctgtgaacggtaaagtcaatttctgggttatttctcgcatcaaggaatgcatcttcgttgtggttccgaagcgatcaaaacgcgagaaggggaaaaataagaataagagcaaccaaaatctcaaggattttaggcttctgaagcgtaatgattccattgactactactactactacgacgaagacgaatattttcaagatcaatctatctctggatacacttttccgactgactggaatcggatcaagtacgcgtacaaggccattaattatcagcatgagcaaatgaggtatatgatcccctgcgaagactgcttgagagcccaggcattgggtattgaagacgagttccatctgtgcgttaacgatgagatgactttcgggttcagaacttcgtcgggtccgattgcccgacccaatcaaatcaagtcttcaaagacttgggatctttggtcttggactgttaatccttcgcttgtatagattggaggaggaggcaagaaaggctaataaggcagtttgtattttcttgcaacaaacaacacatgaggtaaaatctactgtgtggcctgatataccataagaacggtgtaccactcttttgataatgatagtgtaatttaatcttgttagattagacccctgccaagtgtgtttcattggtcagtagtacgcagttttaggggactgttttagctcttaactttcgaaacaagaaaagggatttttaatattcttttttataattattatgaatatttttctcaccaccacatttttctcctaagaagtttgatggtttgtattttttttttcctggttaactctcaaaagagggttttttgggttttgaattgaatttctcagcgtaataaacatattattagtattagttttttcttcttttttagtggggaccttctaattgctaaagtatgtatttaaatagttaatatgtttttttgtttttaatgtttttgggcccataattgtttctatatttgaaatgaatctgttatttgattacttcatcatttataattaatttaagaagctcgaaaatttgatataagataggataaccataattttctaaaaataattttgataacccgtgattttaatttattttttcaaatcttaattaggaaattaatgtacatgaaagatgaattttctaatttgaagtagaataaaggtggtcattgtagttgggatccctatcatattcagcgtaccatttgtttgtgggtgattagttaaaagaaacttttttttgtttggtttgataatgattatatatgatgaaagagactttcttttttctaaatataatttgacttttataaaagtcgcatgcccaaggagccatatcccctaatggtagtaactcttgagtgaggtacttagaactgtttattaagaaagtgtggaaaagatactaactagctttcatatccttccggatgaaagtgaatgatagtgttttctatttacgatagatacagaagttgagtgcaattaatattaccgatatgagaaaataaaagaataatttgttacataaacatttaagtttaattttaattacaaataaatattttagtttatttttagctataataatatcaagttag

SEQ ID NO: 19807 - DNA, 3903 bp, Cannabis sativa
tttaattgtgtggagtggtcttatctgtgggaagtcatgaagaaaatggacttcgatagcaaatggatagcgttgattcaacattgtctgtcatccacaacaatcttatcattctcactcaatggtgaaggtacgagttatgtcacaccaacaagaggtcttcggtagggggatccccttttcccttatcttttcttgatctattctgaggaactttcaagtttactacaaaaagaggaagtgactggtaatcttcatggtttatgcattactagaaatgcaccttcagttttacacttactttttgtggatgatagcctattattctattaaacccacgaaggcgtcgactttggcaattcaatgggccttggacatttaccatcgagcttcaggccaaatgctaaacaatcaaaaatcaattatgtccttctctccaaataccctagatgccgcccaagccttctttcaatagactttacaaatgccaattagtgagtgccatgagcgttatcttggattgctttcttattcaggtcgagataaaaaagagttattcagaaacatcaaagagcgtgtttggaaattgatgcatgcttataatgaaaaaatgttctccattggtggaaaagaggtgctacttaaaacggtagttcaatcaataccaacatttactatgagttgctttcgtctcacaaaaatcttttgtcaacagttagaaagtataatggctaatttttggtggggttctagaaaagatggcatgaaaatactttggggaagatagaaattgttatgtaaatcgaaatttgagggtggcatgggattttgatcttttgtacattacaaccaagctctcttagctaagcaagcctggagaatctttgaaatgcaatactttgttgagccatttattgaaatacaggtgctttcttaataatacatttttggaagcaaggttaggacacacaccttctctcacatggcaaagcattcattggggtcgtgagcttcttgttcaaggactacgatacaaagttggaaatggtaccatatacattgtggattagacaaatggatacctggttatactgagtttaagcctattgcctacaacgagccataccttgcttgttgcccatttcatcacggctgaaaggaattggaacttggagttactcaaggattattttggacaattggacattgatagaattgtcataattcctttaagcttcttcccttccaatgatggactaatttggcatcacacaaccactggcatgtatatagttaagttaggattccattagcttcaagcttagaagaagaacaacattcatcctccttggacttatacagaaattagtgaaaaactttttaaaatttgatactaccatcaaagattaaaatttttacatagaaaagtactgcacaatgcaatccccaacggctgctgcacttcaccggtggaaggtaattgactcaacttcttgttcgaggtgttcacattcatgggagttaattggacatgctcttttccattacaaatttgctaaatcgggttgtaagcaaacaaagttcaccattgtttttcagaaagaaaaacaaatgtataatggtgattatttaatacatctttccaccttactttctcaaattaattttgagcttctcatatgtgtcatgtgggcgatatggtcaaataagaataaagtagttcatggtggtactgctacaaaaggtaaacatactactacatttgctactaactatttggagaaatttcattccttttctaagtagccacaacacaaaaatttatctcatagtaacaacgttgctgcttcccaaaccagctcctacaccagcaaccataaaggaggaaatcaatggcagccaccatctgctggtcagttgaaaatgaacgtagacgccactctcaactcagctacaaaaactctgggtattggtgcagtaatttgagaccataatggttgtgtcattgctgctctttcaaagccagtacaaggttgttttagatcagataagttggaagccaaagctctcttttacagtctcaattgggtgcttcaggaacaattacacattactcatatcgaattggctgcactctgagttgttaatgctttaaataatacatataaaaatttatcatgtttctcagatttaatcttagatgttcattattttttatcttttttttcttttttgaagatgttatttttcatgttaagagagatgctaaccgtgctgctcacgttttggcaaaatatgcttcaaagttggatcaagatattatttggatagaaaaattccctatcctatttttgctactattgtaaatgatggtgaaactttctaaaaaaaatattaaatatagtatcttaaaaaataaattaagtattttttataaaataattatttttttaataaaaaatagtaaaaatacaaaatataacatttttaaaaaaaataattttgaagcctttttggtaaagaattttttggattttcgacaaggggatcctcttccctgaatgtgtgtcttaatggaggtcaggttgggagggtcactccgtctgtggtctttgacaagggtatcctctttctccttacttgtttatcttggaaaccgaattaatgtctagactattggaagaagctctgggaagcggtagtattaatggaatccgtgtttcctggggtgggctgactttatctcacattttttttttttgcagatgacttgattttagttggtagagccactttaggagaagctagaggcttctggcatttccttgagaaattttgctattggtctggtcaataggttaataataaacttaaaacttctttttttttttctttttttagtaataacactccggacaatgtgaaaaaagagattagagaagctctaggaattagagggtcagaaggtaacgttaaatacttaggggtccctcttttttggtctaagcagaaagatgttgatttaaactttgtgctggataacctgacacaaaagcttcaagggtggaaagaaaaattactctcgaaagctaggagagcgacactcattaagtttgtgggtctttccatgccaatgtatgccatgtaaactaccaagctatctaaccatctagtcaataaaattgatggtatggtccgtgacttctggtggagttttgagaaggggaaccacgagatttatctaaaggcctgggataagctatgcctccctaaatccagagggggccttggctttaggaaaataaaagaaatgaatctagccttcctagctaagtggggttggaacttactcactggtagtcagtctttttgctgtcatattctgaaagctaagtatctaaaagggaaggagcttctagactgcaaatataaaggtttagactcttagttctggaagaatgtggttaaagcaaatgacatttttcatgaagaatcttgtaaagtggtctctaatggcagggtcacaagaatttgggattatccatgggtgactcatggaaattccttctttcctaaacctaatgggagacctacgaatggtttcgataaggtggcttagttgctaactgataatggacagtggggcgaatggaagttgactagattttttgacaaagaaacaattactgctattttgaaagggggcaattcgtctggtataggaactaacaagtggatttaggccaaagagagtaatggccgattttcgtgtgaatcagcctaccttattcaagccttatagagagctcctcattgtgaggggacaccttcactatttggaacaagttatggaatagtaaaatcatagagagatacaaagtcatttggtggagaattctgtct

SEQ ID NO: 19808 - DNA, 2845 bp, Cannabis sativa
gtatttttgccaccaaaaataaacattaagtatttaagtgtataaaatcgaaaatattaagtgtttatgctgcaatttactctaatatataatgtacaaaatagaattaaatttatcattagtttaagaatgaggttttgctctcaagtgaattcgggtcgggtcgttctctgaagaatggccgcctgtttgccttgattgcaaaccgatgatttttccgtcgtcacggcacatcgatgtctctctctttcaaaaaaaaaaaatagaattaaatttgtcctacgggattcgatccataattatggaattatttgctatattttttaaaaaattattataaatattaacaatatttttattcgtccttcaaactatgaacgagatttatttttttttttctaccgaaatgatgactaaattcaaagtttttttttttttttcagagatactaaatccaatatttgtattatatatggacaatttgataaatttgctacattaagcaaaaagtaaccacttaaattaaaattaaatcattatatattgacaatgtaattttatttttcatatctcctcactcactctctttttcttctttcttctaaagcataaattttaaatatacttacataaaatattatgtattttctgtaaataaaataataaaaaatcgtaaaaatatttaaaatttcgtacaaccgtagttttgtaatttttgttgttattttttgtgcatttgtgaaataatccttaaattttaaaaacatctatcagatcatatcgtgtattttatcaatcattgtaccaccattggaccattatattaaacattcatttctaacctccagattgcactactatcatacccaccattgtatcctatcgaaccactaccataccataaacaaaaaaattataaaaaatgcaaatttcacaaaaactcaatttttaccaaaaaataaataaaaaaatacaaagaaatcacagattgttcgtgtgttcgttcgacggtggtagtcatgggtcgtcgatcacacaccagagagaacaagagagagggagggtcattggtcttcggccccgcaccatagagaaccagagggagggagggtcgtgggtggtggtgcaattggtgaattttggggtgatttgtggtgatcggttgggtgagaaagaaaatgacagagggagagtgaagagagaacagaaagaggtcttcttcttttttttttttttagttttttataatgagagggataatttaggagtatactaaaaagttaacacgcaaaatctatacatattaactttaattttaatagttaattgtagtctaataaatatatatttaatcaaattttccttaaataatatatagacatgtgaaccaattttcaaaatgagtacatcatctaggttgaaaaacaacactattttttcccctttctacaaaatccattaattctattagcaattttttaagaaatgaatgatccataaataaagggtgtaactattttattttattttatttgcaaaaaagtgttaagagtagtgtaatggagtggggtcctagaattctagggttagtataaatgaaatgagtggtattgtatatgttggtcattgcttggtttaaaagagtagctaggccaccaattgggtggacggttctacatatataaatatcgctttgttgctaagctaagctaagctctaagctactaaaaaaaccacaaaagacatcaccactttcctatttcatcatcatttttattttttgtggccttcttttcttcatcatctcattcctaagacctataaatatatgtattttccattccattaatatcttgataaaggactataatcttatcgcattatgaaaataattataacattaatttactatcaaatttaatttattttacttatctatactactaaattttagagagacatttttctatacttattatgtatttataggtcctttagaaattttcattgctgcctatttattttaaaactaattgcactagtggaatgatgttagagctggatgcacaatagaatgaatgattgaattgcaatgagtacccttataataaattatggccaatataatataagatatatacccttatcttcgaacaatatatatatacatattactcgttcaatatctatatatagtttcatatatttaaaagtatatataattattaatgtggttggccattatggataaagtaatttcatgatagaaaaaaatacaacacgatcgatatatgtataggaaattttgtttaatgtatgtatatttaattagtagtaaagttttaatttggtccatatttttaattgttgatcaatgttgactcagtcatgtgcggagtatatatgttaaataatttccaattaatgaagcttcatatcatctaagtatattaattttgatttcatataaaagtattaaaaattctacaatgcacccccttaaaatggatatattgatatacccttatcaaatctcttagccataacagaacaaagaaaaggaacaaagagaaaggaaagagagaaaggcagagaaagaaaaggatgaagattgaaagaataatcttactttattatgaactattacaatagttcagattatatacaagtgatcaagcaacagaatacaacaaacaaaatctgttacaaccgaaaacaagctaatgtacagctggaataacagaaacagttagagagcaactaacagaggaaataagttgttaactgaagttagttgctcacttgtcttgacaacccttatctgttttagcatccgaaataattt

SEQ ID NO: 19809 - DNA, 5881 bp, Cannabis sativa
  modified_base (5534)..(5538): a, c, t, g, unknown or other
gtatccgtcctagagatgtcatgtagcaaagagtgccactctaggactttccattggtaaaagaattcaagcatccttcataggatttaagtatctgtcctagcgatgtcacgtagcaaaaagtgccactctaggactttccatccgtaaaagaattcaagcatccttcataggatttaagtatccgtcctcttaatccagaatcctcgacccctttctcagtgtgtttgtagggtatttatagtgtttttctggggtgatccctaggaatgaatcacttgtctttctgtgcaggcttcataggggcacatattcccaacatatacaaaataggaaatacataacctataccgtatgtatcttaggtgttaggtggatataatcttttatcccttctgggttgatgtgatttctcataaattagccgtcactagcctcaataatcatagcataatagctgagaaaggggggttacgccatctgtcatatcgtttatggtagtttcaatacgtctttccccatgcgggattaaatgcgaggtgattgttcaatagagtccagtacctcccggaattgccttaatatgtccttggcctccgggagcgtgaaggtccttctcatgcctcctccgggaggcaccttcccagaggcgctcctatgtcatttaaaacttagatgatttttttaaaagttggtcctctcagatccacgtgtcgtccttatccaagtccacgtattttgggcaaaattaaaggcaacaacctctatttattgtctccttaaattttttactttcctattttttattttacttttaattctctccttaatcaattttttctatttttttttatttaatttaattaaagatcattaattttgttaaaaaaattaaaaaaaaattaattaattaaaaatttaaaaataattataaaatatataaccatatatgataactattgattcatttaattaatttataagataatgattcacttatgtataaaagtgagtacacactacactgatcattgttaaatttattttatgtacagagtaaacttattgaaaagtatattaatgatgactacaagtgaaatatggtaatgattcacttaattaatttataatagaatgattcacatttgtataaaagtgagtatttatcgattattgttgatttattttatgtacaaagcaaacagcaaatctactcgaaaagatattaatgatgactacaagtgagatactgtaatgacatcaactttaaatatagtagtgatcaagtgagttaggataatgacaattgttttgaagatttttttttttttgcgtgctttcttttttatataaaaaattgtatgataatttttttagagttatttagagttctctatatagatttatcttctttttttataaataattttaaaattatttgatatgattttattattcaattaatattcatatgtataatataaaatttttataaatagccgcacgcgaagcacggcctgtttactagttgcgtgtatatttagttcaaaatttgttttatttttattaagcgtgttgttggaagttcaataagatgtcatatttttattttattgcaaatatattattatattgcttgtttacttggcaatattgcaaactgccgacaccctttgcactacattgcttctgtgattttgagaaattataaaaattacatgtacgacttaaattgaaaaaatagctaaaattcacactactaacaccttgaacattttactaaaatatgaatgcatattaaaaaaaaagttaatacataataataagttaatatatatacatgtatgtttacaaaatagtctaaaaaaattagagaaatgtaattttagaggaaacataaataattttgttagtttaatattttataaacatatttacatatatatattataaattttaagtattaaaaaaatagataaattgttatgtataaatatttttttctcgacatatttatatatctatacatattttaaataaataaaaaaaaataataactaagttatataataaattacatatacaagttcaatattctaaatgtatttttctctaaaaaaaaatattttaattaatttttttagttgactagatattatgagtcttgagtataaaaaatgattatatatatagtacaactaaaaaatatctttatagctgtaataaattatgaagcatctgagactctaaggtagagtctgaaaatagagtttgatgatagcattgctctcattaacatccaaaaaagtcattatttattggaacacacaccacatctctctcaacatagatacttctctctttgtccctattcctttctctctcattcattttctactacagctttctctctctcctcttatgtttttctttggtaggtaggtgtagataaaaaagaatataataaaagtagtcaatatattgtgtaagacttctcactatggttacaaacttttgaaacttctccccatatatatatatatatatattacaatatatagaactaaaaaaagataaattaaccaattaaattatcaataaattactaattcgaacaaaattacataaaaaaatactttatattgtaacaaaatcttaattacacgttcaataccaaaataattttcttcgaacttagtaatctagatcaccatcttggttgtttaccaactgggaatgagaatgaaaatttcttaggagtaaattcacagttatgataatcattttcttcatatcttgctacatcataaatagaatcactagaaaaatgatcagagggataacggtcactggtggactcatctactgcctttgaatttggatcaggcctctcagaatgttgtttcctcttacttttttttgcccttaaagagacttcttcgcattttatttacggctccttttatttctttaagtgtttcttttttcttttcttctattaatttttgtacatcgttaaaattaaaatgaagattatgtgataatgaaaacctcatactttgcgttctacgtacataatcaaataaataaactttttctatatctacttgatatataatttgtatacacaattcatagaaatataaattaacatactaataattatactctaatacaaaaaatataatcagtataacaaatataatcacgtagtaaaattttatttatctacactgatcacttaatattaataatctaaatatcataaaaaaataattaaaaatattttaaaagtaaaaaaaaacaaaaaatatattttaatttttaaaaatactaatttttttcctctaatttgtttttttttaacagactataatttaatgtgtcaaaataatatatatatatatatatatatatttacttatgaaagtaatatatatttgcttagaaagtaatatatacatatatttacttagaaagtaatacatacatatatttacttattaaagtaatatatatattatttttacacaacaaactgtagtcagttaagaaaaacaaatcagagaaagaaaaaaataatattttcaaaaattataatatattttttgatttttttaattttaaaatatttttaattatttttttatgatatttaagttattaatattaagttattagtatgaacaaataaaaatttactacatgattatatttgttatacggattatattttttatattaaagtataatagttagtgtgctaatttatattttctataaattatatatacagattatatatcaagcagatatgggaaaaacttatttatttgatcatgtacgtagaacacaaagtatgaggttttcatcaccacatgatccttattttaattttaacgatgtacaaaaactaatagaagaaaagaaaaaaggaacacttaaagaaataaaaggagccctaaataaaatgcgaagaagtctctttaagggtaaaaataagtaagaggaaacaacattttgagaagtctggtccaaatatagaggcggtgaatgaatccacgagtgacagttatccatcggatcatttttctaatgaccctatttatgatgtagcaagatatgaagaaaatgattatcataattgtgaatttactcctaaggaattttcattctcattcctagttggtgatctagacaaccaaaatggtgatctagataaccaagatcgaagaaattaattttggtattaaacgtgtaattaagaatttgttgcaatataaagtatttttctgttcttttaaattttcttaatagtcttaattttttttttatgtaattttgttcaaattagtattttattgataatttaattggttaatttattttttttagttctatatatattaatatataaagggagaagtttcaaaagtttgtaactatagtgagaagccttacacaaaatattgactacttttattgtattctttttgacctacacccacctaccaaagaaaaacataggaggggagagagaaagttgtactagaaaattaatgagagagaaagggataggaataaagagagaagtatctttgtcgagagagatgtggagtgtgttccaataaataatgacctttttagatataaatgagagcaatgctatcatcaaactctattttcagactctaccttagagtttcagacgcttcacaatttattacacctgtaaagattttttctaattgtactatcactactacaaattaggcatttagtgacactatatagtgacactcataaaagtgtgtgtcactaaaaaattaagagtggttttttgggacacacagcattagactctaaatgttcggtatttattacgcggaatgtgtgtcacaaaaaatatggagtgtcactaaaaataaaactcaaaatatataattttataaaaattaaaaaaaaaaaaaaagcaaggcctatggtgacgtgccacgcatgtgaccaaagaggtttccccatgctttttgcgcatcgctaaagccacgtgagaaccataccattttatttaaaatatatatatatatatatatatatcagccctagtaattcatctcttcccccacaaacgttccccacaccccactgcaactctcgcgcgataccccaaccagacccaaaaattttccccatctgaggccggcgcgaggtcttccctctcaggcggagacccgtgctcctccttaggcgcaacagacgaacgcatctcaagtaagaagtttttatttcattttcgtttattttttttttccatttcagattatttttccattttcgttattttttccatttgaaaaatgtgattttgtatgaagaaagtgtagttgtttttaagttgtgtcttttgttagttaaaatttggatatattattcaaaactttaatctaaatatgaattatatttttaaaatttcagattatttatgttgtttttttttttgtttatttatgttttttttttgttattttagattnnnnnaaaataaaatttattgagttcaagctcactaaaattgaaaaagcaaaaaattaattaaaatttgtgtatactctattttgtatttagagatttaatctaaatataaaaattaaactattttatagcatgataaaaatcttttaagaaacaaataatataaattttaattttaattttaatataataatagaaaactaacattttttttagattaataatacaactaagcttatagagaaaaaaaaaatatcgatgattttcatatcataagagaggagaatgtacctattaagactattccaaaatggtaatgaaattatcaatttttagagaaaagctaata

SEQ ID NO: 19810 - DNA, 3178 bp, Cannabis sativa
atatatataaataacaagtgattaatagtataattgaatttatattgtgattatatatataatataacttattttgaaatataagtttcaaaaaaagaaatacaaaacacatgttttattgtaataataatgtttgaagtgtaaagtgtaaaacaaaagaaaaaatggccaaaaacaaggggattatatatatatatttatatgagagaggggttaagtttttctcaagcataaatttccaaaggaagctttgctttgaatggaaagtatatatcaaactaaagcttttttcttacttattttctttccttttttgtttaatttcttcccctttaatttttttttataaccatcatctcatattaattattttcaatttttgtttgaagaaaaaaaattcattaataaataaactagataaattaacacaaatcagcctaaccaaatcgtttaaattaaataggacaaaaaccctaaaaaatcaactttaactaaataattttcaattttaatctaataaaatttcccattaattatttaaaaatatataaagatatatatctacatttatattcttttttctttttttttttttccattatttaataacagttactatcttatcttcaaaaactgatgatgatacataaaattcatgcatacttctcttttctttattttctttttcccaattttctacccaaaattctctctttatgatcggtactcctttttaattattaatagtgttgaaactcgaaaataaaaaagttaaaataaatttatatattaaagataattatcatcatcatcatgtgtgtacatatggactatatatagagttgttttgacatttgtaattgtatatatgtatatatttcatatttattttgtattattatatggcaataatttaattggaccacaatatatatagctaataataaacagtacaatttttataaatatacatcattaattatttatgatcatgaaaacaaatgcacaattcgtacaaatagtattacacatacatttttacttatatattttaaattcaatatataatatatttatatattaaaaattatggttgtacttgtatttgaaacataaacataattaagtgatataaacagcattaattataattaatacacagtactttgcagaaatattttttatatatatagttggaatatatacaaaattaataagttgtaatttttatatgcatataaatataaattatgtcagaagtaaaattaataaccggaaaacaaggttatatattattaattaaattaaaaaataaataaaacataagatattatgtataattacatatagttgtaattaattatttatttaattaattaaaaatatatatataatttctaaggaagacatatggaataattaaggtgactttggacacaagacttaggatttgattcattcaagaaaccaatgattaatattaaagctcattttgtcacttgtatttatttatgttttttatgtgttttaaaaaattggagaatattaatattattattaagagaggcatattctactgcgtagattcaggaaatgattcacatgattcatcactacactctttattaattaatattccattaataatagttaaatttatctatatatagtttatctagtttttgaatttatccccttaattaatttattataactatagttcttctactaattcaatgaattgtccactacataatttttattattagtatagtttttcagttttattaatttcaatttctatattaattaattatatatattacttaagccctaaggatttgtattaagactaatttttgtattttttattctaatttatcagttattaaacaaattgaaaatttactaaaatccttggctaataatttattataggcacacttcttttttcttcaaaatataaggtaatgtgttgttatatatattaggaccatattacatggtataaatctaataaatgatttataggttaaaattaattattacaataacttacactttcataatgttaaaaacaaaatctttttgcttattaattatatttcattttcacaacatttgataccaataataaattccatctctctatatttttagtttttgtaacaaattaatttcaactagcaataaatacatatctagaagccatggctttcaatatatatatatatatatatattttatttaattaaaattacaattacaattagaagaaaaaaaaataccaatattttttttttggttctttcttctttgttagattggctaattaattactagatacaaagataaaaccaaaatggttgctatgaaaattatttcctaaatgtactataaaaattagaatattagatggagatagaagagcaacattattggataaaaactagctaacatccaaaaatcaaattatataaaatattagattaaaaataaaagaaaaaaaaaacacgagataaatccatggtgaaaaaatccaaacatatatatatatactcttgttaattaattacataaagcaacataaaattacaaaaaataaaatttatataaataaaaaacatcaaagtaaatagatttacatgaacttgataataatattcatgaaatcttaaataataaaactcaaataataaaaatatcataataatgatcatatatatatataatatatatgatatttacaagtgtatgtatgtatatataaattaagtcatgtgtaatgatccaaataatcaaagcaaaaactaaatatatatatacatatttatgatcatcatcacatgataataaatcataaatatatatataaatcccctaaagaaaatgaagtaattaattaagcaaaatacacatcaaaatatataatattatacgaccacaattaattaataattaactctacgtgttaatcaattaaaagaagaagaagaaagtaataattaacaatcttgttcatcataagtcatcccaaaacacatcttgaccgtcaaatcccgagattaacccatcatgatgaaacgacaccgtatgttgttgttgttgttgttgtcgttgatgatgttcagaaacgacagaagaaatctctgtcgtattgttgatgttgtccgtactc

SEQ ID NO: 19811 - DNA, 3992 bp, Cannabis sativa
aacctcattcatcagttcaatataattccattcccacatttgttatgtaatgagtcttagtgtaggcttaatggtattacatgtatcaatcaaacacttggtgtacaatgcaatgtaggttctcaatatccaaatacaatagttgataaattcatcatcatcatagttaacaaaaattataatttttttttttttgaaaagagaaagggtccataagtcatagacagcacccttccagaacagaaattattaagaagcctcgcttatggcgaaggaaaaccatattacagaaaaacatttagaaaaattagcacaccaaaggtgctaaaaaacagtagagataattaatgactcccctacgacaatgaagtccaatctctacataaatctaaaaaaaaaatcctcaaaaaacttggttttaaaaagccaagtagctgtccagaatttaactttctcccacacgtcctctaccaaattcccaaccccttcaaaaattctagcattcctttccaaccacacagcccaaattgatgctagtattgtcgttctccaaatctttgttttacgtttgctgtcatctaatttgctaactatcagttgttgtggtacaaatcttggcataacccacaacttaaattcctttatcagtctggcccataatttccgggtgaaactgcatcctaagaacaaacgccgaatgtcttccccactagctttgcagcaaacacaatcggctataattaaattacttagttgtcatcgttaaattaaatcgatttatgcacaccctacttacaaaacatcctgcttccttttccaaaaggatcttgttttctccccctttgtattattagaagagactaatactccctctgatatgttacccttatgcttggatgatttttctcaatttattcaaaataacaataataataaataccccaattatctacatacatgcaataaaaaatagcttcattttattttaatttattaattcattattttatgttcgaaactcaacaagaagatatacatttatacattattcttccatatagacgaaaattaagagacaaaaatatcaatatgctatcttatgaagctagtgttggttagcttatttatcaaggaatgaatttggcatttgaattagaatccgacgtttggattgcctgaacctgctgcagcaactcccattccgccaccgccatctgatgtaactcccaacttctcggcgtcacttgagtcccccagatgaatcctttcaccatccaactcatgtacaagctcatcaatctttcggaactggtaaggccatctcacattgtagagaaattggcggaggtcgaatctattgtcctctggtgagtagctctgcacagggacagattataaggatttaatgactaaacaaacaaagtgctcacaaatgaagatgatacattccaactcaaagttcacacacagaatcaactttggtttagcgaagaacattatacctcagcatgataagacggtgtcagtacagtcattttgtgccgattaatggaatagtacttgaagaagaattttactttgtcagccacctctaatggagtcaaccttgtaccccatctgtagcagagattctgcaaaaaagtaacaacaacatcacaagaagtcagaaccaaactgctatgaataatttgatggaattagtttgttggggtttttcggtattcagatattgagactttgggtccttggggttgggagagcgagagatccctctcgaattaccttcaaactttgtacctgactgaaaattttaacaaaaactcgggtcctaacagaaaaaagacaatgagatgtgaaaattaaccttgaacatagatagaggtccgcagcggaaaattttccttaaccttccatagattgagagttcctcataactcattcccatgtccacttcatccagctgaactccacacaaagtttaatcagtttctctctatactaaggcttttttctgtctcagcaaaagcttgagctaatataatacctgggtgtagtcagaacgtataggctccagttcagcagtggggggagctgcttcaatatcagccaaggatgaaaaaccgagatggacagctgcccatcgtagaaatgctcgaagatcttgcttactaatacttccgattggatttatatctgcagagctgcagtcgtactgtgaggaaggggtgattaattagctctagtattcataattcttataactgaataattgcatatcatagtcgggaagaaatcaaactcattaggatctaatttacgaaatttaatggcaaatatctaacaacctttgtaaggtaaccacgtaagccttcatccacattagagctacccagcacaagataaaacccgggtttgctatgcacccatggcaatagtgatgctaacataaaagctagaaccattctaattcgagcttgaatattttgcaaacctaagttctcaatatttgatcctccatctacctgtggaaaaaaaaagtaaaggtaacagcattccttttctcaaatgctaataaacttggttgttaacagcattctgatgagtcaaaagcatgagaaaagagaattttaaacagatttggatcgtggattttctggtctaaatgttcatagttcatctgattttatttattgtcatacatacgtgactacattttgccaaaaactattgtagtttgtgaccaaaaaaaatataaatgcttggatattaattaattcttgttaccttatagcgtggtcgcttcccagtaacggtttgaaacagggttaaaagtgaagagataacaccgtctatgcaaacatcaagatgccatgagccaacctcatctgctagcttttttgcccttgattttgtggcttcagaactgcaataaagaagtcaatttaaaggccttcacttatttcatattaaaaacatttgtcaatttcttgagcgtgtccacctgttttctgttcccatataaactgtgtaaaatacgcgttttgcaaattctctactgtcagtaggaaactgtccgtctgtataatttccaatcctaatagcatcagccttgacttgttcatccccatttgcaatttctacaagtgagtagagtaggccttgccagttagttatcagaagcacatgattattatcatcattattttagcagtagtgatgataacattactgttaacatttaagtagaacatatagatgtaccgaaaatgatcgaagttaaaagtagcctcttaacagagctttgctgtatcgagaaaacaaacctttgacaacaagctggcacatacagccaactatagcagcaacagatgagctatctgctccaccagatagaggaagcaaaaagccagaagctccactccttcgtaaatagtcccagagccagcaaccaggaccatatgctatttcctcctcaggacagtggtaagtaatctatgcatgagcaatgtacaatttagtccatttagcaaaaaatgtacaatttagtccacagatgaatgtctgatagagtcgagcctaatatagtatgtagttactaggaaaaaaaattctagtcaagtattgaattttcagacaaaattaattaaacacagttggaagtgattgtacttcctttctaatgtagacggtggttcaaaatcgttaccatctttttcccattagtaaatgatccatggaaccaagtactaacatatacgatttaagctttatgagaacttaagtagtaagacaaattcattgattgaccggggagttaccttaagtggacttgaaggacacattttcaggttaaaagactgacagagattgtaaggagccatcactgaagaaattacagttttacagcttgcttgttcttggaagctacttatcgaccctcttagactagaaacctgccattaaacagtaaattaagaaaataaagtgattct

SEQ ID NO: 19812 - DNA, 5552 bp, Cannabis sativa
  modified_base (2870)..(2878): a, c, t, g, unknown or other
  modified_base (4006)..(4011): a, c, t, g, unknown or other
  modified_base (5443)..(5449): a, c, t, g, unknown or other
actagttttgtacattactgatagatctaatctaaaatgtctaacaactcattcgttctgccaaacagtggtactgattagcacagacatacatggataaataagactactgaccatattttcaaacctttatctcacaaacaaactagtttttcccgtccgcaatcatgagctaactaaccagttttaacagtatttcacgtttcttttaaactaaattatccacctgattctttattggagactagtaaattctagcaattgctatgtaattccccagactcaaacctcagactaaaattaagagactagtagtaaaacacagcaattactaagtacgtgcccaaacttaaacctcagactttgcaggagcaaaccacatgcctgaacagtcgagttaaaatcgagcaatatttaactacatcatgttagaatcattctgtaaagtttagcaaacacattataaacaagcaataaaaagttgttagagaaagaagaaacctaacgaatcgcctgcaaaagagtgagaaccggccttctctcctcttaaaagagatcataatcctccaaccattgggcagagcgtttcccaattcactggcattcacagtcttcttcttcctcctccaactattccaatccccttcaaacccctccaaaaaccctaataactccgcctcagtcgtcaaccctcgggtccttttcatcaactcctcttcaaatgggttctcaacattccccaatgcaatgaattccgtaccatttccattccctaatgccttcgcagcacatacgaccaccctatccttacccttggcattctcaacagagcgaatttcgcccttacgaggccgccctcgcttccgcttcacctgaccaccaacaatactcgccgccgaagaatcttccatgaccttatcaaccggtacagaaaaactgccaggcttagcactactcaattctgcattagacagtaccggaacagaaccaatatctccaacggaactgcacaataaagaattgggcgaaccactctcgacattacatgcaaattcctgaaccagatccttacgcggacgccctcgcttccgtttcttaataccagaatcgaccacaacatcaatcggcgtgttcggcatcacctcacacaaaggctcgggaaaagaattattataatcaacaggtgcacaaacaagtccgtctgaagattcatcggtaaacaacttctttaaaagaccgattatctgaaacctctcctgatcaaggggttcggcaggcggtggggcaacaacaacggcagaagaagaagaagaagaagacaatttcgatttacgagaagcgagacggaggcgtgagtatgtctgcttacggcttccggcggactcgttgaagacggagcggtcaatcttggggatcgaaacgtcgtcgtcgcagcgacggagtgggtgagaagttgaggaagtgaaagataaggaatatagttcggactgagaaagaagatggaggtcgatgagtggtagcgagtctagccggagatggcggttgtcgtcggcggcgacggtgccggaagccatcgcatggggtttagagagagaaagagaaagttattaataactgacttttcgaattaaaggacaaaagaagatttagatgaattaatgggattgtgattagatgaatctaagtctaccggtctatgactgagaccgcccataatatcgtaacacgtgtcgatttttaattggctttttgttacgcgtagatcgtgtttttgaaaaccgagtgtggacttttccctctttacgcaggattctgggctgtttattgctactttgctaaagcccagcccatttacaagaataccaactattatgtataattaaatagggtatttttttaacattattttgggatctttttagttactattttgtttatggagaaaattacaaattttatgggttttttatattttctgtgaaaaaatatagcttttttttgaaaaaaaaaaaatagttattttataagaaaattgaggaaaaagttgaaaaatatgaaaaaaatcaggtaagggtatccaggtacccttatggcaacgaggagtaaacaggtactttatgctattttttctagattttgaaagggagaattcttactatttcgtagttgatttctttttcttttttctaataaaggtgattatcataataaaaaaaaaaaagaattattttaaaaaatacaaaaacaacaaaaaattacaaaaatatgttgtatggaattttaaaattttgtacggtttttaaaattttattgcataaaatacagtcttttatgtatttttatgttgtattttattgttgattttttattatttgtatattttttttatgttgtttgaatgttatttatttattatttttatgtagttttcttatatttttttgttttgttatgaacaacaaaaataactttaaacgtaaaaatgtatgaaaattttcaaaaataatattttatttaaatttttcataaagaaaattgtaaaaaatattgagagaatggggattggaatatatatttttttttttttgcaagcatgtggattggaatattgaatattgacactataattagtatttagttatatttgttatcttatttatatattttgaaagataactaattgagatttttacaccatatactaaaatttttaaatatttttcctttttactgtggggtaaaatttttttcaaaaatgctgtgtaaatttcatactgtatactatattaaatttttactgttgttctacggttgttttctagttgttctactgttgtttttaattgttccgttttgttgttttacggttnnnnnnnnnaaagacagtatttttgtaaaaaatctatgtgaccataaaattgtaaacttttatcaaaaatctaatatttttgtaaaaatccctaactaatttggtataatgggccttacaaaaaattggtataatgggctttaaagcacaggccaagttcatgagatttctcaattgttatgaacacttgccagacatattagtcattttttttagagaacatataagtcatatttataggtgctttattagtttatggactaaaaaaaatattttattgctaagaaattaaaataaaaaaatagagtagataaatattgtgaattatttattttttttttttttttttaaagattgtgaattatgttttgattaggcaaagtgaactaaaatcctaatttagtacatttttacattataaaatatataatatagttagctgtacttttttggagatgggtgtcagcatgaatttgggcaatgagtccaatccaaaaaaaattaattatttaaaacaaaaatcttatcccataaataaaaaaaaaataattaattctctacttgttaatcatgactcagaaacaactaattaagtaccatttaacatcagtccactgaaatcctcaaataagtacttattcaatattttaaggatatttaatcacttgcaaaatgatgattttagttcattttgatgatgttttatataactatttttttaaaaaaaatatatatatatttatatttatccaacagaacaaaatgatagtattagctttaagttttagataaattttcaataatttgatgtttttttgttgatgttatattaccaaacaaatttattgcacaattttcttttcaaattacagtttttaaactttgttttttttaagagtaaatatcattttgaactctgtgttttacaaaagttattgattaaactatttattttgttgaataacaaaatagatcttgtattttttaaaatagtaaaaataggacctgagcttaatttttgataattttttttttaatataactaacttgaagacaatttctaacatgaacagatacataaaatgtaaataattttgtcataacacatttaaatcgaattattattaaattttattnnnnnnaaaaatcagttcagggtcttatttgtattattttgaaaaatacagagttaattttatcattcaacaaaataaatagtctaattggtaatttttgtaaaacacaggtccaaaatacctttttttttttaattgtaattggtattattattatttatttatttatttttgatactaggagagaaagtaatggaacttgtgtctcactctttctgagaagatatgtaataccatctaggacccaattgatcaatttaactaacacttttttgtttgtttgccaaagatttattgcataccttttataaaataattgaacatttcttttttttttttttgatgaaaaataattgaacatttcttggaaatttatattaattcaatttttcttatatgactatgtatgtatattgtaggttatataatagacatttcaattgttttagaagattaaaaataatttaatgtattgaaaaaaaaaaaaaaaatcaaatgttcgaacttggttttttgtgtcataaattattttaaattttttgaaaaaatatgagatgcctaatataatattataattgtcatataaaaaaggatttatgatttattttaaatactaataatatagatgtctctacatgtaaaagtcttacttgcatttttttatattaggaaagaatgtatttaaatttgtgacttacacaagatgtgctttatcaccaaggccaattctaaactttagtaagttaaactttaggaaaaaaaaatgtggtaatttcaaaattagtaaaaaaaaaaattatttgtattttaaaaaaggaaaacatttttttgggacgtccttaggttatgtaggccctaagcgcaggtggttgatggtagggatactagtatctgtaaggacacttaggtttctcataacaaagatttttacccgaaatttaatggttcttctgccactaattttagcaaaatagttgatcttttgtcaaacaatggtaattagaatgcccagaaattaaatagtctatttgatagagagactctttgctatcttaaaaggaggtagaccctctagccaaggaagagataaatgggtttagactttggaaagtaattgtcgtttctcttgtaaatcagcctaccttatccaagcaatggaaagggctcctcactgtgaagttgctccttctatctgaaataagttgtggattagtaaaactttggagcaccataagatcctttggtggtgtatcctgtctaatgtgctctcagttcgctctgtgctcaacaagagattccatattgaggatgtgggggtgttctctttgtggggttgaggaagaatctatggaacacctgtttctttcctacaatatggccttttatttatggcggtcttcaccgtggaatatctttctgttaattccatttttggcannnnnnnttgacaaaaatattttattattcattgtatattttcggctggtatacattaatatggtttcctatttggtgtattcaaacttgaaaggaaagttgtctagctt

SEQ ID NO: 19813 - DNA, 3382 bp, Cannabis sativa
cttcatattctgaagttctacatgaggaaatgatatacggtaaagtaaattgtcgctgcattccggagaaattggcatcaattgtaaaactgatgagcgagcaacaaaagctaatgatcaaagacataggctttggttccctccttttagagaagccacctagtgtcaagggagggttcatatggtatttatattcccacatggacattgataaatttgagctcaaatttgatggaaaaacttatcccatcacggttgagtcctttgtgaatattatgagaattaaagatggtggggaggatatccacctagtgtctgtcgatgacgaagacattctagtgtggtgaatcaaggcacagagttcagtacattcaactaatcaatgagtttaagtgtacttatttgaggtagatggtattccttgtaggcatatatggtgtgtaatgaaaaatcttgacatgcgagttataccaagttccttaattttaacttgttggcgaaaagatgtcaagagttcttccaatataccactccctgaaccctcagctgaaagtcaaaagatgatccaaatcttaccaattttttttattattattattatttatgaactaaatgttaagtaaacacactttaaaaaaaaacttaagtaaactctaacttatcatgatgtgtttgtacgtaatagagaattctataattaattgtaggtctggggcacttaattctttagcataatcactgagtttttatgcctcacacgacgatgtgatatttcaaatggcaaagattgagctacaaaattggttaccatttctaaagaggcttacgactagagacaaagtactaaaacaggtactgaaaaaataactagagcacatcatgataatctaaatattgtacaagattcaattagggtgaggaccaaaggcatgggtatcccaaaaaaattctagaataaaaccaaatgatggcatacaaggcggtcagcaatgcacactttgtggaggttgggaccataataagcgaacgtgtcacttgagatcagaattagcctctcgggtaggaacatcatcttacacaagaaatgacacaaactttccaaccccatccacacaaggctcctttcattctttttagtatgctcataaataattttgtagtgaaactaaaatagatgtaaactttagaaggtttaacctccaacaatttagtaaatgggtataacgtaccaaattttagaatttaaatagttatactgccaattactctttaaatataaaatattaattaaatataattatttcaaacattcaaattatttataataataaataaaatattataagtaagcttttataataatcaaaatattataactaaatgcaattcaaagtatatataatattaattaaatataattattttaatatataaattatttataataatatgaaaaataaataaaatactatattgtaaaaaatctttaaaagattcaacattaaatcatataatttgatatttactaagtatactccatattactcatataaaattatatttttcttgtaagctaattttttcaaataatctacatttattactcatacaaatttatatttactaataatgtgactatattagttatgcagggtttatattcaccaaataacatgagtatattacttatgcattactataatataaaattatatttgtgttcctaccatacatataaaattaccaaactatccaagtaaataattattaaaagacttcgcgccaacccaccaggttaataaaatcggctatactaggtaaattttattctttcaacaattaatgtgtacttttgacttaggtgtcaaaacgtttatcaatacaaaataacatgtcaaaatattgttcaattaatattatatatatgagctattttagtgagtgactggacacgcaaattaatatttgcgtgactaaatcgtcagcctataaatatatatatatggggactatgtatcttcacattcacattagtatgataattgttgtgattgaccatcacacttaacaatcaagattagatgctttaaaagagcagtgtagaagaacatacacagcaacagtaatgttgcagcaatgaaccagcaaaaacaatgaccaaaaccagtaagaataatttgaataatctattgaccaaaaccagcaagaataatttcaataatctgatgaccaaaaccagcaagaacaatttgaataatttgagttgttttattaatgtggaggaattacattgtgtgtgagagagagagagagataagaaactgtacaaggctatgtattacaaagaattgaactctaactatttataaaattcgaattacagacaaaaacagaaaactaacttgtacccaggatagttagcagaaataactgtcaactaattctaacagcttttatccaaatttggcatgtgatggatcactgtacagcgaatcctccttgatctatttcatgccaacatgtaaatcaaaaaagagttgagaaacactaggtagcttgattaggagagttagtaacatcctgttatatgaagtagatcaaggcagtgtttaaatttaacttgagtcactgccttggtgaacatatcagtacgattgtgattggtgtgaattttttgaacttggacttccttgcttgagattacattcataatgaagtgcatcttgatgtctatatgcttggatctctcatgaaacaaagggttcttcattaggtgaagtgcactcttgttatcacagaacactgtgatattatctgtcttgaatcccacctcttttgctagacctttcagccatacaacctccttaattgcctcagtagctgccatgtactcggcttctgttgaggataaagctactaccttttgtaagtttgctttctagctcacacatcctccttgcattgtgaatacataacctgtaatagatctttttgtgtctatgcaacttgcatagtctgagtcaacatagcctgagacatcaacttttgttttgtagcttttactgtaggtgaggcctagattaagtgtgcctttgatgtatctcataatccacttaagagcatctcagtgcttctctccagggtctgcaatggacctactaacaatgctcattgcatatgctatgtctggccttgtacagaccataacatgcatcaaacttccaacctcactagcataggaaactgagtccatgagctctctaccctgttctatcttgggtgcttgatgtttagacagtttgaaatgtgttgctaagggagttgacacaggttttaagctattcattttgcacttatgcagtacctttctaaggtagtttcc

SEQ ID NO: 19814 - DNA, 2373 bp, Cannabis sativa
cgccactgtcgttaccgttctaggctgcttattattatcggatatagaagaactctccccaccactcccagtcgtaagaagaggcaaagctgagctagactgcgatccagtacccattgacagagaaagagtctgatgagtagttgtactcgctgccgcagtagttgcaccggctccacctcctccaccgccgctgcagtcattcttattattggtagtagtctcagccggctgagtctgggcaggttggttcctaagccacgtcttgatcatagacagcccaatggagcttcctgcagctcctccaactccggcacttacaccgctaggcgcggcggctgcgactgcggcttcggatgagatgttcaaggaagcggcgcatgaggcttggaacatgtagtcggctgtagtagtgctagtgttgtatgtattgtgatgatcggcgaaagagtgtcggccgagaaagttttccagcttcggttgctcgtgttgttgttggttttggttattattacttcccattagcatagaaaagtccgatgagttggtcgagttcatattgttccaatctgcaagcaaataaataaataaataaataagggtcttaacttaaatagggatatgtgttcattatgtatgtgtgtgtgtgtgtttgtttatagggaagaaaagggaatagggaccttgagagtgattattattgtttgatctgttgaaagcttcgagtatgccaaaagaagcatgagtggagtgatgatcggaagtgagatcgaagcactcgccggagacatcgtttccggagatttcatcagagttgaagccatcaaggcggtgatcgtgatgagagactgttgactgagagtgatcttgatgatgatgaggttcttgaggtgaaagagagaaacctaaccagttcatagaacccatattatatatgtagattgaaaagagagagaccttattaagagaagtgagagctaatatggtttcaatggagggtatgtagatgagtattagtccatgcatgaagttgacaatggagataaagacatagaatgcatattataggagtagtgatgtagaagaagaagaagaagaggaaaggtcaagaatttgaagttgaaaataataatagtctcttcccaaagtgaagtgaaaggaagatttatatctctctctctttcttttctctcttgctagatgtccctcactcgtgcacacaaatcataaatgagggcactcgtgttgaagggcattgatctttcaatcaaagtttggctttaaggttaatgacaatagggtatgatgaggtggcaagggtgataatgtaaaagtcatatttttcaccccaaaggaaaacgaaagtgcccaaataagaaaagagagaaaaaaaaaagtgtacatgtatataatctcttttcccattctattgattaaattatttattttgtttaagaagagattaagaattggtaaatctatctctctctctaaatccaaaccctgatgatataactggtatttgcctgacaaaaagaataataaaaaggtacacgagggagaagcaaaaaagaaatgatatttttttttttgaatgaataataagccagtctcgtacacactaactaaaaatgtatacgtagtatagattaaaagatttttatttaaatatctgtgtattgtattataacccaaatgggggaaaagccaataagttaagctttaacttatcttcatgccatgtatatatataagtatatataaacatatgtatgtgttcagtcatatattataaaaacgttatttattgatacgttctacttatattaagcctaacacacacatgtgtcataccctatgaaagcatgtgcttccgtaatcttgaaacaaaattagtagcacctcccttttggactattagtatattattaaattaattaacaaattaaattgtcacacccctaattcgacttaattaattacttgtcatttgattaattaattaataactacaatctttttatctctctcttccttgctgtgaaacacctgtagtgaagaattataggggtgcattgtattcatattatatatttctgacttagtgtgacaaagacctacactacaacagccactctccacacccatttattcatacccacttggacattagtcatttcatgtcagataaaattattatcagatatatgagatccctctccttttcatttctatctcaattttcagtctagagagagaaagagagaaagagagagcagtagtatagtctctgcctactgcagcaacaaacaaacacccataactttctcacattccatccatcccatatatcgcattattattattattatt

SEQ ID NO: 19815 - DNA, 4792 bp, Cannabis sativa
gtttttgctctaattatcaacttaattatatgttttagttcaatggaattttgaattatatatgtgtaaagatatgtgtatgcatgtgagatttgattcttgatttcattagcttaatttgtgggttttgtgagatttctctttagtttctttggtaagggcactttttcttcatcaacaactaataatattcatatataggttcaattgtatgaagttcaattatagaggattttggggagagttttctgggatatgttgtttttgcttggaaaagtattttttgatcaaataaattgaactttttcctaggtgggattgtggaatttttgtgtttgaagtggtttgtaactttatagtgaatggtgttgtttgatgatgttttttttaagtagtatggccctcattacaacttgtagggactgtacctacatgtcggaaaagctaagctggatttgatttaatttcccatgttttcatggaatatatgtttcaacatgtaggccttagtggtattatattgtaggcattaaatgttaactgtcatagctttcaaagtaatgaacaactgttatctagaaatggggccttgaaaattgaagagaattattattattattatggttttctctatgttttttgttttcagattcttatggttatcttgattccaatctcatttcatcacttcttttttaatataggagagaattctttgaaggtttgcttatgatggagcctaatgggcataggagattaagggagggaagtaatcatcatcatagtagtgaacaaaatggtgatgctaatcattcaactgttagtgatgaatttgatccatggacagcatgggcttacaagcctcgaaccatttcgatgttacttatcggtgcatgctttcttatgtgagagttctctcctaataattaagacttttccatgctgcaaaattaatgattaacagtatttgtgttcacatgatcattctctctttcttttttttttcttttgatgcatttaccagttgggtaagtggggtattggatccagaaggaagttcatctgaagatgttgttacatcagttaaaaggtttgttcttattagctatgtttacttacactttttatgtagttttcttctttaaaattaagatgttttaacactgtgattactctttcttgtaggggcgtatgggcgatgatagcagtttttcttggttattgtttgcttcaagccccatcatcgtaagtcgttgaacaatactttgtttcgaactaacttgtggcttaattgattctgttcttcttattttctagcatttcattgtactaagctaccttgatttcaagatagaatttcggtttttggtagaacttaagctgatgatatcttccttttacaattttcatttgtaatctatccatacatgttttattggcatgcccaattatctgtaatttagtcacccttctttgtaagttgtatggaataaccagaagaatttatataaaatatgagtttcatattacattaggattttacttgttttcggggaaaggcattgggataaaatggtcatggaaatgagtagttttcgcttgtttcttcgcaaaagaattagcataaaacattcaaactacttgaaatcaaggggtattcagttaactcatgtttattgttttctgacttgaattcacacagaattctgattagaccgcatccagcaatttggcgtttagttcacggcatggctgttgtttaccttgttgctctcacatttttgctttttcaggtcagcccttttctttcctatctgtatagtgttcccttttgattcactcttacagtctctacttcagattgttcccttttaacacattttttctcttttcagaagcgagatgatgctcgacagtttatgaagtttctccatccggatcttggtgttggtaatgcagtttaggcattttggcattttttatttgcatcagttgaatgaaaaagcttatactgattgcttattcattataattctgcctcgtaattgtgcagaacttcctgaaagatcttatggagctgactgtcgcatatacctccccgaaaatcctacaagcaggtttaagaatgtttatgtatgatttcttctttaataaaatctgtttatttttgttaattctctgatcatatcttctctaagcaaactacttaactttttatgtttataaattttgttaatttttataggaaacactttttgatgaattcgttttagctcatattattggatggtggggtaaagctatattgcttcgtaatcagcctcttctttgggtgctatcgattggtttcgagttgatggaggttagttccttgacataatatataatattggcttattgttatctttctccatctttgagtggaagattaaccatcttttggttgacattttcagcttacttttcgtcacatgctaccgaattttaacgaatgctggtgggacagtattattcttgatattttgatctgcaactggtttggtaagaactcaatgtattaagaattttggcttataattgttgagctctatgcatagtataatttacattaatcgaaaactaaaacttagcttataacatcggttttccacccccatgagccttttgtgtgcaaactttgacaagtttgtttctgtgtgtatgttgcaggtatctgggcaggaatgcatactgttaggtactttgatggaaaaacatacaagtgggttgggataagccgccaaccgaatattattggcaaagtatgctctgattttagtgtttttatttttgaatatttaatggcattgagttactaagttgaaaattcgatattgtttggagtagaaagacatttgttattaacaccgagtcagatgcattttttactgattcaggtaaaaagaacacttgaacaatttacaccggcgcaatgggacaaagatgagtggcatcccctgctcggtccatggcgtttcattcaagttgttagtctttgtatcgtcttcctcacagtagagcttaacactttcttcctgaaattctgtctctggattcctcctcgaaaccccgtcattgtttataggctgatattgtggtggctaatagcaattccaacaattcgcgagtacaattcatatcttcaagaccggtaacactacacaacccttttctcttttcttgaaatgaattcacatttctagtagcttactcaaactatgttcgaattgcagaaaaccagcgaaaaaagtcggggcattctgttggctttccttagcaatttgcatagtagaacttctcatttgcatcaagtttggacatggtatgttatgttaaaaaatctgcaactaattctttgctacattgctatgtttaaatatcgataatgactcgattttcttcggttaatctaccaggactatatccgaaatctatgccattatggctaataaccttttggacatctattggagcattgtttatactattcgtcgtcgcatggtcctggaaatctcacagaagtttgatgagaaagaggcaatgattttgtcagattttcggttattattctttgattccccaaatcttctttctttcttgaggtttgtcttatcactttcttttcttcatgtaaatactctgatcctttttttcttttataaaattgtaaatgtttattctctcattagattagtggatcacattttttcttgatcatcatcatcatcatcttcatcaatagagaatatgcttctgtacttggttgccactattactggcaaaaaaatatttctctggtccaagaaatcccattttttgtagtactcttcttttcttgtgtgatttataaaaagaattaagaagtaaattcaattgtttttgcattcttgtttttataaaaagaatttattagatcatgcaaagtaaatccaaagatatgaaataattacgatatttaattgtaccaataacgatatttgatgtgtactcgaaacatccaaacataaatatgacacagtgtataatatttgtggtggcagtggtgcatgtatcatttgtgtatgagcattgttattaggcaccagtgatgcttggcatcacttagaagtggtgtcttacaatttgttagcgatattttataaaagttattgcatccaattatatgagatctgatactcaattgcactaatatgagcatttctaaatgtgttatcttgtaattggttagcgatactctctaggagttattacatgaagttatgagagattctatacttaattacacccataacaatatttacacataaaatagtaccaaataccattggtctcttttaacattactcgtacaatatttgtgtgtaagttgtggtgcacataatcatatcactatcaaaaagaaaaatcattggataaaggaaaggagtgtgtatgtttgtgtgcatgtgtttaggtatcttttttttttctcttccttacatataggcttttattatcttatcaaagccttttgaattcagtaccttcttaggtgtgtaggccaatcaaggttttctttttatttattttttattttttagttactcattaaaaaagcttagggtggcatactcattcttacattgttatgaaatgtgttgaaattatattattttatagtttcattttgcaaactggcatctatgtggaaagttattttacaaaaaataatcaaaataaggttaatgatttttgttttgaattactttgtaaa

SEQ ID NO: 19816 - DNA, 2900 bp, Cannabis sativa
  modified_base (75)..(79): a, c, t, g, unknown or other
gtcacttaacaccaaaaaatggacagaaaggactaactgctaacagaagctgggtttaggaggttttaccaccannnnnttagaattgggggttagttgcaaatacctaagcacttaaggaggttatgccgcaaataaccttttaataaataccaaaattcggtgataaaaatcataattaatctaaaaataaatataggaaatctatgactatgttttttttttttcttaaaaaaataaaataaataaattgaatgcaatatgttggcgtgttaatatatttattggtaaaagtaaaatacgttgagagacaacatgtatcgaaaattgaaaaaactgataataaaagaaacggataagatgataaaacccatttcggacgtaaaatcccatttaaaaacggttaataataaattttcattccgtttcggaaaacgacaacaaaatcaacacactctctctctcttcctcttcgtcttttaccactggactttctttctcgtctctttcatttttctagagagagagagagaagaagaatacagagacacagagaatactcggaaactgagaccagaagccaccactaagcttccttttcctccacattcatgtctgctactgctacttcttttctggtgagtaaccgactccgaattctacttacattaacattgtttcgttaggttttgagtgtttatggaaaactgttttatcgttattttctgcgtatttcttttgcgaacgtaatggtgtttattttgaagaactttttggatgaaattaagtaataataatatatttataatgtagctttgttttcgttctcagagagcttggagttgaaggttactggcttttttcgtgtttcacaggcttttttgtgtaaaagcaaatcgaatctcgaaaaggttcgtttcatgttagagtaataatgataacagtcttttgttgttttctgatttaaaaattacttttctacgaagagagaaaaccacattttaatgatattttgcttctgtacttctgtttgtttggagggaaagtttttctcgagaaaattttagcaaatgtttttctttgttgtactaaggactatattgtcattttgtaacggttatttgacttaatgagctagaaaggcatagtggttaggaaaaaaaaccttgttgtgcttctcaaaattcctagtcctactattaaaataaccggtggactagttttttttcaacctttcacggcaaaactggaggaggaaatttttccctccattcacggagcatttaatatttaaagattttatgtggggtaaaggggtataattgtaatttagaaatttaagtctctgtttgcttgctgctgtgatttgattacctcaataatgagccttgacctggaacactgtagtgttactgtaggttctctgtctttagcaacttgcaaagcattcattttctttttgaatttaatcacaaatcaataaatccttttacgttggtatatatcttttgccataatggcttccttatgtgatgataaggaaggagcacatgtgtccttcatgaaacctatttattgcttcacgtattatcacacattggatcccactgtctcagtttgtgatttttcagaacgtttcatcagggattgtgggtcaggtagcatttcacaaaagtaactgaagcttaaaattaacccatcatcttcgtttgtgggtgaataggaaaattatgcagaccacaaaagcaaggtataacctcacaaacttttccattttagctctcttcccttaaaatggtcatctatacataatatatatatattgcaatatgtgattatggtcatgtaaagcagattgcaactttcttatatttgtttatcatcatgtactatttattatttgtggtgcactaaaggagtgcggtgacggttctcaattctctactgtcggtggaacttgatcgttcttctctatatagttttacaatttttgttgttgaatcctttaagtctattagactcaaccctcagcccttcgcatttggcattagagtattactggctttggtttttgcttgaaacgtccatacatgtcctgtgtacttcagttaccaataacttgtgaaactttcactttttagcttatactcaaagcctatatgtggtaagccttgttggcgaaaatccttttatttgtcagcttctgttcttaagtcttccctatgcaagaccctcttgtaaattgtgggtgtgctaccccctgttctactaaattaccaataacttgtgaaactttcactttatagcttatactcaaggcctatatgtggtaagccttgttggcaaaaatccttttatttgtcatcttctgtttttaagtcttccctatgcaagaccctcttgtaaattgtgggtgtgctacccactgttctaccaaattaaattaatggggcttctttcttggactgtataagctatatatcatattactttaattccaggtttatgactgacgacttattagttttgttataggttatcttactgttatatgtaacatggtatttaatagtaccgcagtgcgtagcaacgtcgttatcatcttactgtcattatggtatttttgtcgaagctttttaacttatttctctcacctggtaatagttttttagataactatagtttaatgtcaattgatttacatatttatttattaagtagaaattccaagtaacccgatcaatctatttggatgaacaggggggatgcatttatttatatattttcaccctgaattgcagaaatagtaccatgtaatggagtcaatatattggacattttatcgtttattatacatattcttctagttactagatgtggagttagaatattctagttac

SEQ ID NO: 19817 - DNA, 5190 bp, Cannabis sativa
  modified_base (1721)..(1732): a, c, t, g, unknown or other
acattgtcttacaaaacttattacttgccaaattaaatttataataaatttttatatgcaaaagtaaaaaataatttaagatttaattttttgtgaaagatgagtgtgttggtgtttatgtgttttgtacaacaaaaaagattttttgaaaaaaaaaaaaaactttaaaacatgaagtattgaggtggagtaaatgataaagttataaagttatttctatttttttttttttttacttttcaaagaaactcataaaaaggtcatccatcaccttattaataatatatatatatattttttttgataaattacactaaatataatatttattcaattatcaaaattttattatggaattatatatgacttagtagttactaagatattttggtgagtttttttttctcttttaaaaaataaaatcccatatggatttgaagatattgtgggattgcaatttcaaattataaataaatctacatatttatatgaatttaaaatacctaattaataaacaaaattaaaaataaaataaataataataaaacaaacgagaaattatttgtaagaaatttgaagaatataatttgactttgtttagagaaaaataaaaacttagtttgaaagaattttgaaaattacattaatgcttacttaccttaactaaaaatagataataaattttacaactataaacaatctcatattttacactttattataagagcgtgttacattgtgtttattaaaatttgatgataaactaatacaatttatattgttttctttttaaatcaaataaaagttaattagtttgctaaatcagtcaacagacaagattataacttagtatgaatatcattcttactaaagattcgatcatgaaaaaaaataaagagttctaacaaaattatgagcaatcttgttaggagatagttttaacaaaaaacataaaaacattgcttaaattatgaaataattagctacaattatcaataactaaatcaaaaaatgaaaccatggaagagacattgcttcgaactgctttgacacaacatcccatccctgatagcttagccactacccagcttaaagcctctttaattccaatggcttcaataacttccaaaactactctactctaccatattgcaacccaatcagagcctccaccaaatattcattagcatcccgagccactagcccaaatgatccataagcattttggacaccaaagagtgccacatccacaataattttgatcacatttagatacgacttaaccaaagaatctgctccatcactcctaatctcaataggcaaagaagtcgaaaagtgttttccttctccacacgcttcttcttttaattccaaactaacgcatttctagcattccataaaacttaacataccaattgccttttcacacaccttttctttactaagatttcaaagaatataatcaaatcaagtggagaatccatcaaaaacagtcaaacacacaccaagttgaaccattttccaacgacggactagaaacaagtaagtaagaccatctttaatggatgatgtatattttgagttaactttggtccaaaatataccataaaactatatttggctcagttttttgtatttgtgttttaatatgcaaggtacaaattagttataaaagtcaatactaacattgatgctcattgaaaatatacaaaataattaannnnnnnnnnnntattttaatatcttataaatataaaaatatttttcattgatgaatagtattaatgagtgataaagaggtaattaaaaaatagaagtatttattgtgggttgaaatttggctcatgctattttttgtgccaaatttgacacaatttttagctcgagccaaattttacacacattaaattttaacaaaatattctaaaaaaatgtcaatacaccacatttatagctctccaatataaatgctctaaccaaatgatgaaaattagtttcatcacctcaatgatgcactggacaatcacaagcaatcaaaacttgtgtctgatgcaaattacgaacgaactttagggggaactttaaggttccacaattttcgtcaggaatcctgagtttgatgcactacgcactgtatagaacaaaaatataattttgattaaaccaaatattgtagacacaaaataggtttaatcaatctgctatctataaaaatattgtaactaggcggcataatacaccaatcaatatcaaattgagtgagcaatttagcccacaattcttctacaaaatcacattccaagaagagatgaaagatattctctcgatgcacatttctcatttgtaacattatgtagcatagaaacgattatcacctcatatatatattttttttgaatggaaatatggcaattttatttaagtagaatcagccattacaatgtttaataactccaaagaagagttatgatgattaaaaatgtgaactggcgagtaacaagcactatgcgcaaggaagtgtgcagccttgttaacagaacgcttaacaaactttaaagaaatattacccaactcagccatgagttgtttacagtcccaaacaaccgtcccgaatgcagatggcatttgcatattactgttgatgccttgtactgccaccaaacagtctgtttcaatcgacacactatgccaagatttgccttttaaccagctaaggacttccttaataccacaagccttagcagtctcaggagagacatggccaatgctgcacttggagacagcttctagaattcttccttcacagtctctagctatgaaaccaaccccaaaagaattaattgatgcaaatatagctttatcaacattaacattaactgtgttagtgacgggtttagtccaatgctcaatatccaatccttgatcattttgaagaagaataggttccattcgattcttctgagcacacaaccattgattaaggtaagatcttgcttcaagaactacactaactgttgttctaactcttcctttccagaggacatcattccttgcattccatatttgccaagccaccattaggatttctgcagaaaaattggcagtactgccttgtgtaatgtgtattgtcatcaaaccagtctttaaacacgcttgaagctgctggtttgagattaatgacagatctatgccagcatgagagagcaaaaggacagaggacaaaaacatggaggattgattcttctgcattattacaaacaggacaagaattattgacatatacatgctttgtttggagctgggttcgagtaggcaagcatcctgatatagctctccaaccaaaatgcaagaccttcggtggtacctttagtttccaataattcttctaaaaatctccatgcagttgaacttcatcttcattttgctgcataaacctatatgcactctatcctgagtaatgtcctgaggtttcaaaaatccaactccaatgatcagctgtatttgcattaggaaaaggatccccaatataagagcacgatccctgttatggaacagattagcaacaatatcatcatcccatctggactagtttatctgcattaagctagcaacacggttcccagccaaggctgggtgagaagaactaatatagggctgatgtatgttaggtaaccaaggatcagtggtaatatgtgtgctcaagccattaccaattcgaattctcgcaccagcattaatgagattctttgtttcaaatatgtttttccaaatgaatgagggattatttccaagagaggcctagagaaatgatccatcagggaaatatctagatttgtaaactttgcaaacctgggaagaatcctcagttaatagtctgcatgcttgtttccctagtaaagctaagttgtactctttgaaatctctaaagcccaatccaccaactgttttatgcttgcacaatttttctccacctgatccaactaactccatgcttttcttttgaaaattgccacaaaaaagtactcattattctctcaaggctttgacaagtttccaatggtagcaagaaaacagacataacatagcttggaagtgcttgtgctactgttttaaggagagtctctttcctgctttggagagaaacaaaccttcccaatgtttcactctattttgcaacttgtcctttagaaagcccaaaatttctttcttgttccttcccacaatataaggaagcctcaggtacaaacttgtcccatctgcttcacgaatatgcattaactaacagatacgacttctcgtgtcatgggtggaattgctgctaaaaaagattgatgatttattaaaattaacaatctgccctgaagcatcttcaaaagtcttcaacaaacggatcactttagaggcttctctttcattagctatgtagtataggtagttatcgtctgcgaaaagcatgtgcgagataatgggagcaccgttagcaactccacatcccttgagctgaccactactttcaaagtgcttaattaatgatgagaagccttcagcacagatcaagaacagatacgatgaaagaggatctccttgacggatgcctattgtaagagttatagggcccatctctcttccactattaagaattgtgtagcggacagaagagacacaagttagaaccaactatatccaatggtcattgaatcccattttgcacatcatatccctgagaaattgccactcaacgcagtcataggctttactaaagtcaatgcttagagccataaagccttctttaccccttcttttccttttcaagtagtgcatcacctcatatattgttatactatgagatagtgtaaaggcttattagtaatttaaaattggtgtgtaaagtctataaatatgtaattagagagtcattaatagatatagaatgagaagtagaacttcgattcaattaggagattgacactgtctcgaatagtgcatttgaaaaaatttatcatgtctcaaaaaagacccattattatgatatatgtaacattatagaagaaaaaaaaattgaacaaatagattataatgcatgttatgaacaacaatattcatgcataatatattagctgttaattaatctatgtgacctatacccggccctaggtataggtaggttaggcctatgcatagggcccacct

SEQ ID NO: 19818 - DNA, 1546 bp, Cannabis sativa
ataatacaatacaatacaattcgacctaatacggcgttccaaacgagccctaaaagatttaattccccactaattttttctccttattattttgtagatttaaagattcatatagctagtgagaattcacaggcatcaatagctggaggtacacaatctagctagctcgattctttattttctatatgaactttatttaagaaaaagttataaagacataaaatatagttatttttattttaaaaaaaaaaaagcaaatcttacaaatataaatatatgttagattgtatttcaacattttagatacaaatataatcgagttatattggatatataaatgaaaaaaaaaattataaaaagaaaaaataaatgtttggggttcttctaataaattaatatacaaattaaggcatatccatattttattctaatattattcccaataatttgtacgttcaaagattctttgaggaagaatacaataaggtcatataacgttaatttgaactgtgaacaaaaacagtacatataatttataataatatgatgcgttagtgacttaatgatataatataatgttttttttatcttttaaaaataaatgaaattaattataatatttaagggtaccaagtacatataatttaatttattattaatcaaacaaaatctcatgaaaaaacaaatttagatcccttaaacagataccaatgtatagccacacaaaagatatatattataatgaactatgtgttaggattaggtgtatgagattaagggttttagggttttatggtgtatgagaaatataatctattcattttatatatatagtatttaatttctacacataaataatctaagactaattctataatactatgacaaattatagttactaataaattgtataaacaaaaacgcgtgcataaccattataatgtcaatatgttatccattattattattatcgacacatattgcatatatatatatatatatatatatattgtgatttcactaatcttctcatcttattctttattttgcaacgatgtaaaattataaatttaagatgcttcatcataatatactgcaagaaatttttttagtcataataaaatttgtgactaaaagtaaaaatattgtgactaattaaaaagtggagtgctaaggacactctctatcacactctcatttgcattctctatccaatttaataacaaatattatcttttactggtgtcgttgaagattattttagagagttattcattacttcggaaattaattgggaaagggtcacggcttgtgtgcatagtcgggtgtcgactgctatgaatgagactcttgttatttcgatcgaagctgagaaggttcagaaagctcttttccagatgcatccagataaatcacctggtccggatgagtttaatcccggtttctatcaaaaattttgggatattgtcagcaaggacatcatccagttagttcaatacttctttacttttggtgagttgtttgatcatttaaaagaaacaaatat

SEQ ID NO: 19819 - DNA, 6316 bp, Cannabis sativa
  modified_base (5965)..(5965): a, c, t, g, unknown or other
atataattcctcaattattcataatcatctaattaggatttttctaatctattttctaattctagggtattatatatactgtcttaaattaatctaattctgacatattaattaattttatttatattaaatatgctaactacttttgttgactcaattaaagatttaatttttcaatgaataaaaaattaatcgacgtgttaaaattaatttaatttaacacaaataccaactttcaacagggcaaccacttaaaaaagataaaataaaagatattttattaatgccgacataaaatcattcatattattataaaagtataaaaattaaataaagtaaaaaaatattatcagcattttgaattgtattcataaactaggagtggagaacgtgccacggacatgtaacctccattcaaatttttgggttataatcatatagtttactttcaataattatgtttataaaattatcaaaaaatgtatatttaaacaactatctaaagaaatataaataagcaaagacatagtgtggcataggttcatttattaaatctaagatcatcaatcgtcctatttaaatgtaagcacatgtgatttgttctactattatctactattgaaaaaaatttagaagaaaaattaaataataattattaaaaattatatatatcaaaaagaagaataagacacaaaaaaaattaatgtcatgtgtatactcgtaaagtattctacattattatatatttacttctctaccgagattatcggaaaactaattatttaatattagagctgaagaaaatacaagatcgataaatgaagaagatactcagagtttttacgtagttagagcgctaatgagtctttttccacgagtcagtattgttgtcggaggaatttggacaacaccaaatagaaaatgaataaaaaatatttaataaaaaaaaagcgagtaatcaacttaaaacagggagtatctgaacgagactgcctagacaatagaaaaatagtaaaaacaatgaacacaaagatgtatagtggtttagtcagatcacagtctgcttactccactgttgccaaggatttccccctttgtttattcatgttggatcactcctttatatacaaagcaagtgtccttttagttacacagaacttaatcggttatagaacccttttacattaaatattaacattaaattataataaacgtaaaagaataaatgaagaacaatttacatccgtttcactaaatacaacaacgtatacgacttctatggtgcaagttgtctgttctttttctcactcaagctcgcaggcttgagatacgttttatcattctaatgagggctaacgggcctcgtattaaggtatcattgttctaagcgagttgcatatatggatattttattaataagcgtcgataacataagacatgcgagtccttctcgagttatcgaatacgctgagtcatttggaccaattcatctagtaaagaaacaatctttactaggtcgcatgtgaaggatacttaatcatcgcatatacctagggatatgcatgacttatataaactcttcttggtcctgcttatttcataatacgcgaagcgtaataatgcaactagactctgtcacagtcacattatctctggagtttagttcaggagaggtttattcttaaggagtcacttcttgacagctcagtaatcctcaagggatgtgagtccacgtgtcactcttatgggagcctggtctcgagtttttaggcaaaataattgcactataacacatgcccctactttcgcgtgcaattaacagctatgtcattagggaaactatgagagagaggcaggcgagttgccgtcatgagatggtgattcttggttgtcttgttgagtgtttcaaaaagacggctgtaattattactttaattttcctctgagattccacgtcatcaaaacccttgagggtatgtgaaggcgtgttctttggagacagttggattggaagaccttaggcattcccttgccacgtgtctatatcccactaaatgaggaatatcggtatttaaaaagctcagatacaaaatgatcctcattcattttccctcacatttttgacttttccttcccttactcaaaatatcaaatttctgaattttttctgaagcttcaaatttctccatacttaggatgatctcgtaggtttgatcacgtacaaaataatcctaggaagaatattcgcattcattataagtttttagggatagaaaatgtatggaatgatagggcccatagatagatttttgcagtttaggcaaaatatggtatttttctaaaaaatacgtgcctcaaacttgaatactcgcgagttttaggaagaacttcttgaatacttacatcttcatgctaatatcgttttgcatattcacacttttacttcacctagagcaacttttttgaccttattttagtgttttaactcttaggttatatctagctttaggttatgtgcattctaattgattgttaaaactatctgagttctcaaaagggtgggactgtcacattaacttaatgttcatgcaatcacatgccccttgagatactgtgacacacccagccatttcttgagacatgcgattagttttacgagctcttactttgaacttttataatttaggtaagaacactttctagtcaaattacactcgtaccatggtgaaaaaatcttctatcttttagatgagtgacctatcagacagcaagagacacgactctggagagggggctttcgcggatgagtctcaaatagcgataacttcatacctgtcttgctatgcgatgacgagactcctataggtaacttttcatatacacggattgccccagatgttgaattcaaagtgatgggtgaggactttgaacaatcaaatcacgaggtggaagatgaggcaaatggcgagtgtagtgaaacagattcatcggacaatgctcaattagacgagcctttttcctgcgagggcctagtctcgtaggttaagaagtatgatttaacaacatttgagaggatgaatctgattcatactgctacctcaaagcccatatcaatgcagcgacctcatcttccatttaccgaccccgcgatcatcctaactcaaaatattgtggtttcaattcccattctttgctatggggtgatacttcctttccaccctttttaaaaggccatcctaacgcactacgtcgtttccccttttcaacttatccgaaacagttttcgcataatccttgaattctatgcgatgtatatggaatacacacaaggggaaccaacagtcgaggattttagattctttattttgtgatataaagagtgttggtcatgataatggcttctactgttttagtaaatgggccaactttgagatgaacggggtagaaggcacggttttcaatatgagggattgaaaattaaagtggttttatgtgtttaagatgctagggatcaggattgactttaaccatcgacctcgtacatcacatacttttacacttagcttttattgttgttattttgcagaagctaatatccacttatatgttcgcaggtagaccagatcaatctgtactagatcaaaatcgtttggaaatcactaaagttttaagtggctttctagtttgagatcgcgactggcacttgctatctacctttgcaaaattgcaagaacaaaattgattccagcctgactccatactccagtgagaaccaatatataaataaccttttgaaaaacaaaatgagaagatagataagtatcttttcaaaaatacttcgacacaaacatcaggtaacacgatttagcgactactgataatattgtcttaatattttaaattcttattctcgtgctttttttcacagttatgatgttcctgaagcaagcaccctccttcaattgcaaggctaaggtcaacatcgcgactccttcagctgtgacacctcaaaagaggaaaagtgaatttgctaccactactgtggtcaatttgttgaagaagcaacagaaggtcacacatgacaaaggaagaaggttaggatcgaccatgcgaacatagctcgtaaattcgtggctttgcaaaagcaattcatgagcgatgacatcgttgccaaagttgagggggctcctactgaggacaacctatctcgctcagctgaactcacatcacagttcatgacgttattttcggtggcttttggtgcaagtatcaaggatcttgagcttttgaagaaacataactcggctcttcaagaaggtttttttttaaagaagacaaagttggatgttgctgcaaaagagaaggaagtcgacaaagatcttggccaagccaaagattaggcggagaagaggcagtcaaaagataagagtaagaggctagaggaagaaaatcctacctttagttgcaatctcgagactaagaaggagaatgcaaagaaagcctacaattagcctgtatttgactatatttacaccactcttaccaagatgccagattttgacttcgttgtttttggactagagttcggttgagatggccaatgtctttcgtaccatgtagcctactgaaactcagggggtaggtggaaacctttttcttgatgatgcaaaagatgcaactgctgctgaagtcgcagatggtactagtaaggtcgcggatgatcccaatgcccctgacgttaaatccttttcttacatttttcgaacttcttttgagtggtacacaggtacacacattttgtacttagcagtattttaagacaattatctttcttttgccttgttatgaacaatgtatcctctcggggaaccattttacttttaagactatgtgcttttgtcatttgccattaaatcttatgtgtttacaaatgcaactcggtgcttcaaaacacttagattttcatattcgttgatcgcaattctatctacgtgactatccttcacagcttggtgtgacgaacatttttatgttcatattcaaaagtaaaaattccacaaaattttctaagtaaaaacatgcgagaagtataaaaacttaaaaaattattacttcattagataatcaatattacattaatacaatgtacgattattgtaaagaccgctcaattttaaatatagaaattagtagaaaattagggcttaattattaaataaaattattaattatgatttatgaatttttttggtgatatacttgaattctagctgtgctaactacgttatacatgaaatttcatgtttttcatattttattcccgacaatatgagaaggcaacatgtttcataacagttgcataaacatttgctaacagttatttcttcacatattactattaaggtacaagtaatcatctatcagtgacaaaaaaatactgacaaatagtttcttacacatacacattcacatttaatatttttagttgcaattaagttgcacattagttgaataatggtttgctactacaatatcatactattataaaaacagggcttgaaattgtcaaatacgcgacctgaacagataaaacacgattgttgtaatatttatttgtattaaatatctagaattattagttgttttttggttttatgttagttgattcgcaacagatataactgttccattacagtttcatcacagttgccttgaaagttgacttcttctttcttttggccatcaaagttgaaatttttttaggcaaagacactttcgacttcttcttcattggacgacaatcacctttagccacgcggaagagcaaaatcagagtcaatattacaaaaaaaaacttacaaccggccaattaaataaatatacatcccaaataaaaaaattaaataaatacctcttacacaggggcggagccaacatgaaaagttaggggggccaaactatattntaaatttaagtataaaaaatctcaatacttttattaaattcataattgaaattaaatacagaatgtctttcttgcatatcacgaaaatcatcgataagtgaatctatactaaattttttggcaatttctctgccaatatacacgagcaaacaataacttaaaaattcatcttccatcttgttgtgaagtgtagtctttactatattcatagctgaaaaagatcgttctgtggtagctatagaaaagtataaatataagagttatcactttatacacaattggaaaaatatctccttttctagtttttaccaaccactaacataaatcagaaatggttgccaaaacattaaa

SEQ ID NO: 19820 - DNA, 3433 bp, Cannabis sativa
cagatatgcaacttgtgttataccgataagtgcctttttcgcttcaagtctttggtaagcactcaaatgcttattaccctacttcttaagttgatgttgaatctgttgatgtgatcagtaatgtgggacagaagcgtgtgtattatttggttagatttgataagtcttttatatcttaaaaagtagatgtttgacttttgaggaagactttcaatcgttttcatgaatgttatatcaagatactaagcaatttcatcttcattgtatagtcaaaagttcattcacttgaggctacatctagtagtagtggttgggtgagtgtgtgtgaggagagagtttggggttcaaaaaggattctgctattctcgaacatctattaaattacatcttccgtagtttaaattattagtgtgaaagataaaaagatatttgaactgtaaactgaagaaatatcgattttcatcttctcgatcttttcattcgatggttacaggtttggaaatactgcttacttgcatatttcggtagccttcatccagatgctcaaagctctaagtaagtgtgaagacacaaaactaaccttttcccgattatcatttttgtactcttaattgtaagatttgacttgtttctaaactttgttgttccagtgccagtcgcaacatttataatggcagttatgtgtggcactgacaaagcaaggtgtgacgtcttcttgaacatgctgctagtcagtgttggagttgtcatttcctcatacggggagattcattttaatgtagttggtacactttaccaggtaacgggcatctttgcagaagctcttaggctggtcctaacacaagtcctcctacaaaaaaagggcttgactttaaatcctatcaccagcttatattatattgctccatgcaggtatgtattttcaaattatacctttggtgttttgggggagagggtaatcgaagaggcgatatacctgttgtttcaagtggtgctaatgtttgcttcctgtcattatattgtgaatgcagttttgtttttctattcataccatggtttctgctcgaaaagcctgcaatagaagtatcccagattcagttcaatttctggatctttttcagcaatgctctttgtgcgttggccttgaacttctccatcttcttagtgattggtagaactggagcagttacaattcgtgttgctggtgtcttgaaagactggattctcatagccctttcgaccgttatatttccagaatcaactataactgggttgaacatcattggatatgcaataggtagttctctaccttgacattcttttagattttgaaaatttcggttaaccaatagtttctcatctagtctttttgcattgcagcactatgtggtgtggtcatgtacaattacataaaggttaaggacagcgcttctcaactgcctgccgaaggtcttcctgatagaatcgctaaggtcggttatactctaagctgaattttacttttcataaactcaatgaatcttacaaaaccattgagctaaaccgaatgacatagtgatcgaatatgtaatacaggactggaagttggagaagaaatcatcagatatattcgtgccaaataacagtagcgatatcagtgggggaacaggttctgcaattgaaacatttggtgatgaagaagcacctctaatgccgtcggcaagattgtcttaccttggaagaacacagcttggcaaaccaaatatataaatatatttttatattattatatacatatatctatatatatgtgctcatgttttgtaagggaagaaccaaaccagactaggaaacaaaggtgaggcagctatagtgcaatttcaactatatatattctttcctgatgggagagattctttcttagaaagcccttaggaaattcgttttgtaatatttaattttgtattgtgagaggtgagtggccttttagaatggatgaacaagttgacaccacctctgttgatgatgaatgaaaaccaaagggggtgtttggtattggtatgattgtttattgggttgggaatgaggatgtttagtatgggttcttagaaagttttagcttatgtttacacttatctcagtaatttatgttttccaagagaacaaaaagcatgtctccaaatcaatatataagttaagcatttcttgctataaggctcctaatatcttattgtattggaatttgttattaaattgtttcaacaacatgaagtgtttaataacccttattaattcttattgggaaatcataaatcataatatttattattgtgtgtatatatttatactcataaatgaatgaaatcactatcattacaatgttattaatgtagtagtaatgtttcttacatgtattcataattgttcaattatcaataatagtaaaagaaagtgttaatactattttagaatctgtattttgtaaaagttattgattgaattttttgttttattaaatgataaaatagatattgtattttttaatatagtacaaaataagacgttgagctcaatttttgacaatttttttttaatataactaatttgaagacaattcaatgtaaccagttttgtcataacacctttaaattgagctattataaaattttattttgataaaaaatcagttcaggatactattttgtactattttaaaaaatacaaagtctacaaatggaccaatcaataatttttttaaaacacaaagtccaaaatagcatttatccttaaaaaaatgctgaagagcacccatagtgactagcactttcgtgatatgtaatatcggtgcaattcaatatcgaatcccacatattttactttaataaaaaatatagagaactcctaaccaattatagaacaccactaagcagcaaggtgccccatagctagcaactcttatagtaacgtataattaatttagttcatacaaactaatatgatatttatatgattcaaaattttaaaattgtatttataaataaaattgtacaaatcacgtgttgtgtgatgtagtagtactagtagggaagtctttactagtctcctttcttgtttgggtcaagagttcgattctcaccaagcaattgtgagagattatgtttagcccttgaaaattgatgttgtggtaaactatatttggaatagaaactaaggtgtaagtaccgatgactcaagtaaaataagatgaggtataagactcttctagctagcacgtggtcgtcgaaactgccattggccaaagggatgggaacagaatttgcaccacatgatccctttttctctcagcaaaaaaagacacattcttttgttttgtccaccaattcacacaaccaaaaacagaaatatagaggaagacagaaatatatagtatcttcgtctgtacataatatagcca

SEQ ID NO: 19821 - DNA, 4950 bp, Cannabis sativa
cctaattaaatactaaaacttattgaaagataattaattagaaaaaagataaactaaatcaaatagtaataaataatcatgaatgatttgaaacatcctaaaaatgaataaaataataaaagacaaattaaagttgaccaaaataaagtaatagattaaaatttacataaaataataataataattaaaagaatagtttaagtataaaataattatatgataatttatcgaaagtaaagtttcaaacttttacatgtactaaatcatgtcagctgttaaaaattattgagattgttcaattcaagaatttttgtttcaatttttagtaacagaagcctaacatagataaaaatttaagggagtaaaaattaacataatttggtaaaaaaatttgaatccaacaatcttaatagtttgagagaatttttaatggtctgaaaagttcatggcccaaaaatcctaaataattaccctatttaaaatgactaatttgaagtagttattagacatgggaggtagaaaagatattttaaaaactggagggtcgaaaagataataagaaaagattcgagggttagaaatgttattttctataaaagaaccgccttggaaaaaaagatattctattaccctatatattcatgtgttacaactttgagaacgcgtaatcgtatcgagaagaagcttcagcaccagaagccgtttcgtctcaaaatctctctcggttctttaattctctttctcgacggtaaggcctttctttacctttgaaaatattcaggaagatctgcacaaatcgacgtctagggtttggcttctcgatttgtttttgtttttttttttgcttaatcttcgatttgtggttggttttaagttgtagtcttgattgatcgatcttttttcttaccttacgttccataatccaatcttgtgttcggtattacatgttatctgtgtgctgattcaagaaaaaagaaaaaaaaagtgttaaattctggataattgatttggggtttagggtttcgaagaaatttgggattttttttttctttttcaaaattgtgttgagaattttgtggtgttcggtaatatggcgacaggaggagttgatctattgagaagaagagattttcgcagttctgaaaaagagtttaatcatggaaatgatggttcgcttgttgtggatgcgagtcgagttcgtggttatcgctgtaggcgtgagaatggttctgtttcgggttctagacgtagtgggttttgtggtagggaggcgtggactaatagtggtgaagcctcaaaggttgaagatgtagatgtagttcaggtccctcctgagaataaaagaaaaatttcccctatcatatgggatagagaggaggataggaaagtttcttttaagaaaagagtcctaccagctactcctggacatgagagtgtggttaaatcagtttgccaagtatccgaagttgtttcaaaatgcgaggcttctgaaatagacaagaaggtggagctctcaacacaggttgaggctgccgcagctgatgatttggtggagccttttctgcccaagatctcaggtggtttttcttctgaagaattgattcatcagtatggaggtgttcaccagcaagatcaagtgaaggaagatgttaaaattgagactcgaaacattttaacatcgaggtgggcatctgaaggagattctccgcagcatgtttctgatgatgtttggaatgctgataggaggaggagctcaacccctgaaagtggggagtttcaaagagaagactcagcaggttataggtctgcaatttcttgctcagatgatgaagatggtttccatattggatctggaagtggcagtaggtgttctggtagtggaagtagaagcagatcttctaaaagagagccatctttggactttatggatggttatgacagtagggatgccagaacaaaccaggtttattgtggtgaagaggatgatgatgagcttttacagattgaagaacctgcagcatctaccagtcaccgtgttaacatgctccagggttgcagaagtgtgtttgagtatgaaaaacttaacaaaattaatgaaggaacatatggtattgtgtataaagccaaagataagaaaagtggagaaatcgtggctttaaagaaggtgaagatggatgtaaacaaggatgatgggtttcctttgtcatctttgagggaaatcaacattctttcatcgtttagtcatccttcaattgtcaatgtgaaggaagttgtgatggatgatgatgatggagtttatatggctatggagtatatggaatatgacctcaaggggctaatggagactatgaaagagccattcagtgttagcgaagttaaatcgttgatgctccaactgctagagggtgtgaaatatcttcatgacaattgggtgcttcaccgagatcttaaaacatcaaatattcttatcaataaggatggtgagttgaagatatgcgactttgggttatcacggcagtatggtagtccacgaaagccgtatactcctttagtggtgactctgtggtacaggtgagctgcaggctattattgttttgtacaattttaagttcagtttatgagtgcaaagctgactgtgatttttcttttcagggctcctgagcttcttcttggaaccaaagaatactcgacagctattgatatgtggtcagttgggtgtataatggctgagttggtagccaaggaacccctatttagagggaaaactgaagtcgagcagattgataaggtattttggttcagttttacttgctgtttttcaattacttcatttgattttatgttcttagcttcatgttcaataggcacttgctgattttaatagttggaatctttgcagattttcaggactcttggcacaccaaatgagacaatttggcctgggttttccaagttgccgggttccaaagccaaatttgttaaaaatccgtaagtaatttacattaaaaaaaattaattgggttcgtcaatgttataatttttacatataataattgctatctggtaataactgtcattgaaaatgtttcaggtacaacctattgcgtaggaaatttcctgccacatctttcataggttctccagttcttaccgattcaggatttgacttgttgagcaaacttctagcctatgaccccgagaaggtaatgttattttctcaagtgttttttttttgatctctaagcagctttttggtcatgaatcttattttagtcattatcctcgtctttgtagcgaataacagcggaggaggcactaaatcacagatggtttgttgaggctcctctccccagatctgatttcaagccttctcttccagtgctacagggtaaaaacaggtacccaggcagcaggctgcgtgaaaaattttcacatctataatcctgacaaaaagggatcttctaatttttatttttctatttgaaaaagaccaaatatttgactggtcacttgagaagaactaacaggcatctagatacatagcaacaagcaacaaaaggggtaatggtaatgcaaggattttatatttgttttgattatcttattcagtcgatctgcagttttttaaactgtgagtgtcagtgccacgaagcagtccgcagttgtagcagttgctccatgtgaatgtttggaacaatttactcaggtggaatgatagttattgatattttatttttaaaatgtataatattttctcttgtaaagttctcgactatgaaagtaatgaagattatgaattttactgcatctattcatgcgatttgttctttctgttgcatattcgcacattatttgcaagtgattgcgggcccttaaagcaggggtgcattactgatgatggaaacggttacaccactctactcttctaaggtatttcactatgtagtgtattatatatcatatcatactacttcattagaaaatttatgttaagactgttgattatttttcaggatttgaactctctacataagttctataatggtaacattggtaattctgcatatttctctacataaattagatttgattatacaggaagaatatattaaaacacacttttattttgcatagctagttgaaatgcagtcttgctgttgaattcttcattgctcgcaaggtattgaggttcatgaatattgaagataatgtgttgagtataaatggggtgaggtatttaattttttttttttttggtctctagatttttgctctttttaatgtaattttcttcatgttctttgtatcaatggacctaatcttggttaggaagtcttaatatggtaaacaagggttgcgttttaagaaattgttcatgaggtaaatcgtgcgttactctcaatctgtccactttgattttttttttagccatctaatgtaatgtaataatgtagttaaagattctaatgatactatatatgtgttgtatttaattgggatgcaaatgggggtagtcagtgttattttgtgtatatttttttagtaagaaataaaatcagatctgacttgctttttagctgggtaatttatgagcactcctaccaacctctctttctctttcctattttttctatttttaaaatatattatcatactttttattcatcagctgagatataaagaaaaataattaaagagaaatttgcggctaaagctccctatgtttcaattgttacacacttaaccccctaatctttgtttttggagataaaactcccttaagttttattctgtttgcaaatttactattctgttaattttactctgttaattgcttattagatgtgtctagtcaccaaattctcttacatggcatatccacatggcaaattataaaataaatttactaaattatataaaaaaaattaaaagttaaaatcttaataattt

SEQ ID NO: 19822 - DNA, 1922 bp, Cannabis sativa
cacaaaagtcaagatcacctccaccagcttcttccaacaacgcaattcccatcaccgccagttcgtccgtgccttcctctcctaggaccacttccagaggtttgacaacacaacagagtagccctcctcctccttcaagagccactagtactaccattgctccatctgcccgtttgaccagtcctgttcagtctcccaaagcagtaaagccaacgagtcaaactcaaagcaccttggcacgtgagcctccgcctactttcactctgcctcgtgctatgagaaccaccaatgcagagcctgaagcagagcaaaaaaccgttcttgttcaaaagacagttgagaagcctaggcagtggttcagcagtggcaacaccactagccaaagcggtcaccttggctccttgaataaaccaaaagaaaaaagctctgacaaacactcttccgactctgatgctatgggaatgaggattataaccattgcaggtgaaaacaaaggggctttcatggaactcatcaagtctcccagtaaacatgaatcaagtgaaaaatccagatatatttacaaggggacggggaaattcgcgagaaatggcggcgagtctgagcgcaaaagcagcagcagcagcagcgggagcagcagcagtagtggcgaggaagggaagtcgaagaaggacaagagtttgaaagctagcaaggccaagaatggttcactgccaatgagtgctttcatgaacagcaatgttcaaggcattaacaattccattatgttcaacagttcttgcactcaccatgatccaggggttcaccttgctcttacaaggaagccaaatggaggtggatttcaagtgaaggaacgtgtctctggccatgatcataactagacatgacacaactgagaaagtcacaacccaagcttctcttttctttttctttttttttttaattttatttattaattatatgtttgaaattaggagagaaaaaacatatatgcttgtgatggtggaataataaaaagcgtgatgttctatggtgaggttgtgaaaggaaaaaaaagagggtatggtttccgattctttgcggtcagcttctcctttggtggagtttgacgtaaggtttttagtatctatggcctattgttagataatataatataataactctggttcgttggcttagcagagatcttttccagcaaggtaactattgagtgtgtattgccaactgccattgataaattatatgatccatatatactatcatatttcttatgatggtttctatttttagattctaaataaagaaaatgtattgtcatttgttcttcctttccttgttgcttccatttttcttctactatatactatacagatactgttattagcttctttaatggagagcgaacacaactgtgacactactcatgaattcatttgttactattttctttatttaccagtttgtttttaatttggtcacttttgagatggttagatagtccaccccagtaactggtctggattccaaccatttaagcgccatctttttattatggctacagtccatccattatgtatatatttatatagtttagtgggtgaaatcaggcatcttctacagcttgtaccagtgctggcttatgcttttgaagataagcctacttgacaatgttccaactaatagcacagatatctatgactatcaaaccatttcattttaaaaaagaattccgaagctttcatttttcttataacacattctctttcttaattgttttatctggagttttaattcttatagaaccagccatatgtaaactctttattttaagtcgaatttcaagagaactctaagaaaagtgaagggagagttttgagccttgaacaaaattcggtctgagagcttttttgtgctttttttgt

SEQ ID NO: 19823 - DNA, 8183 bp, Cannabis sativa
ttgatccatagatttgatggagagaagatgttagaaaagttaaggaacaagagagttgtatttgctggtgattccatagcaaggaaccaatgggaatccttactctgcttactctctagtgctgtttctaacaaatcctcaatctatgaagtaaaccggaatcccattaccaagcactctggctacttgattttcaagtttgaccatttcaactgcactgtggagtattacagatcgccatttctggtgttgttgggtcatcctccaccgaaatctcctcctaatgttaagtacgctttaaaagttgatcaaatggataggactgcaaatcgttggaatcaagcagatttgctcattctcaactctggccgatggtggacttatgagaaaactttaagaacgtaagtatacatacatacatatatatactatactcttattatgacttgttcaagtgttgtattttataatcaatatttcagtttaatttgttacattttcaaaatatgtgcatcaaaacaattattcaatagttcctcataagctcattttagtaaacctgcatttgattagagtgtataccaacaacaagtaaaatgagaggtaagatacttgttctttttttcctccaacaacctccaaaacagtatgaaacatgctatttcgttaatgattggggtctgcaaaaggttgttggctagggatttcatttcaacatagatggaatacatttttgagccaaaacatatgagatacatatacttatttgaataaataggattctttaactaggattttcttggagttttgccttcaatttttttttttttttatgtagcaaaaattttcccaaactataaaaatcattgcaaatatctcccttcagttacatggtcatgggtcacaaatatttttgaagtatgatagtctattgacattaaacattgaaacatgagatctaagaataaatatacatattatcataattcatattaaactgctatttatgcatttaatttttttaaactccgctagattaagattaatgtcaagttagtgctttgttaaaagaaatgaataaattgcttaaagaaataagtgaaatgtaacttggaaatgatttttatagttcacggttaatttttgcagtatatattcgactgcaaagttttacaaaagtcataggggagataaattctctttattctatttattttgatatccttagaattgggcttagttattgactagttttatagtgtttggtggtcaatgggctgaaccctgaaccccattatggtctccaatgtaataccataattcaactaaatccacatataactttcctaacataagttttgtgttgtcaggggttgcaacttcgaagaagggaggaaaatgaagatgaatatgagtgttgaaactgcttacaagaaatcgatggagacagttgtggattgggtcaacactaaagtgaacaagaaaaagacactagtctatttccgaacctactcaccaagtcatttcaggttagtcctaataaaaaaaaaaaacactagtacattggaattgagtttttatttagttgggggtactgatttgttgagtgtatttgtgaatgtaacacagaggaggtagttggaaaaatggaggtggttgtcacatggaaacgttacctgagttaggaccactgactagtaatgaacactcttatgtgaaaatagtgtctgatgtgttatcaagtaagaagaggagttcaaacttgaagatgttaaatgtgacaaacatgtcaatgagaagaaaagatggtcacccatctatatataacagcaagggtgataagaacaagtcaccttctcatatccaggactgcagccattggtgcctccctggcgtgcctgattcatggaacgagcttctttacgccatttttctaaagcgccaactgctcattcggacatgaaatttttcatgtgtttgacccttttttttttctttttttacttttgcatattacttaattaggtagtttttaagattagcctacacaggactcatttttaacacataccaatcattctttacactttggatcacatgtgtatactcacacacgcatcattcatttacttcgaactgtgatttagaagttagaataaatttgataaattatgatttcaatttaagggtaattacacattgctctacgtttaatcaattttataaatgctaataattgttatgagcgtgaaagtcatttgcaattaatataatcaatttgaagttaatttttagtatgaataaatgaaaaaaaaaaaaaaaaaagaaaaacataatcggtgtgatcataatactttgaaggtaggttaatattaaattttaattgatgaaaatgaaactcaagtactattttataccattttaaaatagtgtccaaattataatttaatattataaaacacagttaaaatgttatttatccttttaataatcaaaccaaatgaaaaaaaattgacaataaataattggttaattgggccatttggaaagctcataatgagcttatttggcaaaaccgtaagatgaaggtagaagatgtacgtttgtttctaagtctcttgatcaatagttgaaagttcaaggaagagataatattcttctgttgcgtcctctttatgatggggatggcaaagaatttcggtctaaacccgattcaagcatcaaggttaacaacattgacgcaactatctttgaggcagacagtaagcatggtattggctttatagctcggatgcagctagtggttttgtggttgtccatgcaaaatgtttactaggtattgtgactctagaattggcaaagttgggtatcaaagaggtgttgagttggatcaagcgtaatcaagccatggccatcgtgattgaatcagacagcttgctggtggtgaacgcaatccgaagtacaattcagctgtgctctgcttttagttttttaattgataaatgtaattgtttgttggatagtttaccaaatgtgtttttattttaagcttaccaaatgttttttttattttaagctttctgttaatcaagttgcgcattatattagtagaaactctgtttatcctttttaatcaactcatttcccatagctcgttacccaatcgatataaattttattttctctaacaactttcttctacctcactttatcaaactttacttattttaccacttgaaaaaaatacattttttaattttaatagcaaaaaataattatcaaaaatgcacattcttactttttaaaaacaaaaattgtattttcatttttataatttaaaacaaaaaatttacaaaaaacttctcttagtttttaaatgtaagataataacaaaattttcaccgataaaccaattggacttgcaagttatttaagatagtatatgccatctcgacatgaactccctcggctccaatgtttaaaatgcttgagaaccataaaacaaaactaacataaattttaaaaaaaaaaacaaaatatacatcaaaagcatgagcggcttgaaaatctatatattaatcaaatgtgcaactagaaaggtgtaaaatcacactcaggtgtttcactgcttttctcattctcatgatctgctgcttaaatttttttttgcttgaacctcacatctctggatgtaaaaatatcagaaactcggtcagctgaattctcgcagtagagagagtataaaatgacccgattgatcaattttttatcaaaatgctggctattgaaggggtggcgaaagaatccttagtacaacatttcttctactattcggtcactcatcttctccaagtcttcttgagacaacaaggttttcctaccactgctacctgccttgtcatatggctgagccatttttctaagaaactgcaatcagagaaaacaaagcatcttagattttctaggaatatacatgtagagaagaagaatcactgttatttatttgggcaaaactttttcgaaaatctatgttgatgatgaagtctctgaagtatcattgataagaatactatcaagatcatgaacaaacaagagcaagtgatgcatatgaagagctcgctatggggtataaagaaaaattaacctctcgagctatatgaagagccatgtctgtgctcaaattcaggtgtgcatcacgtaagtgtgagagtatccatccaggcaattttgagcgcttatcatgacgactatacctgaaaaataaaactccagtgatgagatgattatgcactaatgaaaaatgagttcaaacaaaaatactacactcaatgctagagataactacatctacctcctcgaaagcactctcttgataaataataaaataaaggttgagatgcaatgtgattgtggctacatctgtatctcaagtgttactttgagactgaattcaaaagtttatttccacttttcaaatgtttattgtgaagttttctctaatatgcagaattacttaagcaaatgataaagctgttatactaaaattggaacatcagtcaacattatttagttgactatttgatttgctcagataaaagtagctaacatcacaatagcataatcagctttagtcgtcgtgattagaacattcagaaataattcaagtaactttagccaaatctttagcaaattaaatagagtaattaaataaatgttagtcttattggctgaagttagagtagcggattcatttttcaatatatgaatctgaagaggtttcaaagaaaataagtgaaaatggtactaaccttttgtctgcaaaaatcatcatgccataatcagcctttgagcggataactcgacccacacattgagctgcttgcctctgttgaatttaattttcattaataaaacaccttcaataaaacttgtgaagtcaaaactagtacaaaaaagtaaacacaaaatataccaaagcatcaaatgtcaggaaatccccttcctttatttgaaaagtatcccgtaaatattccaatcgtgcaagcaaaatcctaggaaacaacatttccacatgtcaagttaagaaaaaagtaagttagtgaaattaatcaatagaaatagctcaaatccctcgcaaaccaacctcccccaaaagcaccctgacacacacacacacacactcacactcacactcattacttacttgctaagtgtgtattggaaaggaacaccaaacatgatgacaagtcgtccataatggcgatcaaaatctattccttcagctacttttcccctgcaaaagtgtacatgtattattcatgggttagtaattactgttaggagtaacttcctaaagatttctctattatctgacctgatgtcataatattagccgtaggattgcatgatattgatagaatgaagggtgcaccaatggattttaacagctaaagtataatgctcaaaataacacgataactacagatatgtcaaataatcacatgtcaactggtgaatatatgctagagccagcaacaacctagagcattctggcaataacttctttacaggcaaacagaaaaggttgtcctgattttgaatgattacatacctcgcaacagaaaagaagacagcacctctcccgcagtcacaagccttacgatagttgtcaagagccaaagtagtttctaccacatcttgggtttcgataaacacaagcttatgttgcatgatttcctgtgacataaaagacaaaattaatgacccctgacgactagtttcctttcagtagaatataaaaatagaagagggatagagggataaaaaagttaattgtgaataccaaaagaaaaaaaatagacatgattaatgcagtcacctttagaatgccggtctcgttccaactatttactattccatccatataagaataactgacaaaaaagcatacaatgccatctggaacaacagataccatctccagcaagagtctcccatagtttcttactacacccaggtcacttctcatatcaaatttggtacttactggaagctgatcactgaaatgaaaaccataatattaacgtacagacaaagtataacataaaatagtcaattcttaaatgccttttatatctgacaaagtaaaatgcacaggacgttgtaatgatggatttatgataaaattaagaattgtcatctttaattgagctatgctacaaaaattaataaaatgcaagaaaaggctgtttggttgaatctttaccttccacgagtgagaaccattgggcatatgcaatctctagtcaaggacattgtaaaacttcgactgacaactggattgaaattgagaagacgggggtagagatcaattgggctaagggttccagatgtaatcactaccgattgaaatcgatcaaacacaggctttattgcaagagaagcatcgtgacagctaagctggaaagtcatagtacaacaagaaaatggtcaaacaatttatatttacaatgtgagaagtaaatttcgcttgataataagatttaaaatctcattccttgtcttcaaaagctgaacatgtacatttgtaatggcagatcaatgagtatcatgtaaatgaaagaaagctaaagttgggaaagagctatttaacaatccctaatacttcgtaatacaacatatagagatgaataaagatgattcatatacacaaaattttatccttgactggaatccagaagaagttccaaaatgaagtagaaaaatgcacttggaatgtttcaaatgataacaatctgattcatggacatacaagaacaaaatgcaccaatatattttccaccttagaacaattacatttttccatgtgttctcacaaatgtaaactaacaacaaaatcaaaaataaaaccaacctgcaaaactggatcaggaatatgaggcattctctcatcaaaaggttcaattattatagagaaaccacgggcatatgttcccacaagtgttgcaaagtcacatattgtttggatgtgtaagaactcatctgtatctgtaatttctaatgtcaacatgagtgagtgcaggcgatcataacaaaactttaacgttttctggtcaattccagcatgtgtcataatggaggaaacaaatccaatgggcccttctttctcaacattttcagtctctagacgcccttctagatactgaaccaatctacgtagaacatgcaggaaatgctctgctctgcgtatattaccaggcacagcttccttcaaaatatcatctggtagggctgggtttgcaagccaggtgtctgatactgcataaattaagtataacttgtgtgaatttatggatgtagaaaacataattgcagcatacataattgaaaactgagaatggaaatccagccttctgggaagaagtcaaaaaaaaaaacatactgggaagatttcctctttgtgccaaaccatcaacaagccggttgtattcagcacgcagtctaccagcatcagtggccttgaacctacctaacatgtcaaggaaacaaaagaatatccaagttaaggattagttcaaaaattactctagaaaaactatagctttgattataacaaatattggtatattactgagtcagattacaaggtgtcgcaatgggataatcagtttactacaatatgcctcacaatcatccattagcaattgtggttcaccataagatcaaatacaaagataaaacactccattaaaggtgagtttttgtgttaagctggcaaggttaaataatgcatataagacgaatcaagataagaataaaagcattccttaacattctttaataagaatacagaactatcatcaccagaacaagaaatcagaagacagcacctacctgtcaatctcctgacgcatcttattaagattccttcttgccccttcaagcgtctgcctcctcacactaacactaagtgcttcaatacacacattgtcaatattgtgagcctcatcaaacaccacaacagattccttctgcatttccttggagataatcccagccactttcggatcaagcaaatactgataactataaacaatcacattggcaaactgcaccatatgtcgtgccaagaagtaggggcaccatcctttctcctttcccacagccctcaaatcctaaatttt

SEQ ID NO: 19824 - DNA, 5931 bp, Cannabis sativa
tgattttacttttgagacatttgaatctagctaggtttagtcgaaatttgtacatattctacgtatgattattaattatgtttttgttgatgtccatgaaagatttatatgacaaattaattaatgatacgattaaaccaaagaatatatatctgaaaataaaatgaataagagtttacacattaattaattggttgtcaaagtgtgtggtcggtaagaggcgagtaccttgcctctacgtctattcaatcattttctttcatatatatttttttgtttttaacgttttctcataattatgtgtaataaatacgacctgtcctttcatattcttttttgaaacagtaatctttttcagcctggtttcctttttctttcttatattattatattatacatgattttaaatccaggaaaatcgtaggaaccttcaacctttcattatgtcatgttccccatgttgtgttatatgtttatatatatattatatgcccttaatttcaatcatagcttagtattcaataagtgccacatattcctctctctttaacatatacaagctagctcagacataaaaaatgaagatgtatcaaaccaaatcaaccttttttctgctcttcgtgatcatattctcatactcatttataagatcagtcacagctcaagaagttggtacgtaattaatatacatttatatattaataataatattgcttttcgtttagctcttatatatatatgatgattataagttgatatatatgaaatattaattgaatgcagaggatgagagtgagtttgattatcaaaaaggtaataagggaccccatcgttggggagagattaaaaaagaatggtctgcctgtaaaaaaggaggaatgcaatctcccattgatttgtctaatcaaagggttaagattattccaaataagctaggcaaggtcacaaaaagttacaagccttcaaatgccacccttaaaaatagaggccatgatatttcggttagtatatatttacatactatttctaattaaattccagtttttttgaaattatataaatatacatgggaatatacctatgaagagtaaaattttataatcaatttattaaacaaacattaattaaattacgtagtaattagtgttcaaaattgaccaaaataccacatttctgggctaaattctaggaaagaaacctaatatatcacctaacacttaaatctaatttatataattgtccattaataaaatattgcatatatcttttcttttggtccatttagtttgtcttttcttcgacaaagaattaatttaaatttttggtaattcagctccaatgggacataggtaaagcagggtcaatcaaaatcaatggcactgagtatttccttcatcaatgccactggcattcaccttctgagcacaccattaataacagaaggttcaaatagatatattttaaatatttcaattatcttctaataacaataaacaataaataattacttatttcaataaatattaatcaattatatattattcaattttatcaacagttatgatatggagttgcatatggttcatatgagcaaagataacaaacttgctgtgattggtgttctctacaagcttggttgtcataatgttttcctatcaaaggtacctaacaatttcgcaattatatatataactattattcattaaaatataataatgatttaattaatggagctaacatgggattattatatgatcatgattagttgatgagtcatataacaagtatggccgatacacatgaagaaaaacatttgggtatgattgacccatcacagataaagcttggacataagaagtattatagatatatgggatcactaactgttccaccttgtacagaaggtgttatttggaccattagcaagaaggtacgttatacataattattatttaataatacacaatattagtgatattaatcgtgtattatatatatatatgagcatcgctacttctctaacactaattatattaaattatatgggtctctacgtttaattataccaataataatataacaataagaaaaatactaaacaccactaccactagtacattttagtatttgtggtctagatatatactacctaataattcaactaattcattttgaacactatgtacaggtaaggacggtctcaagagagcaagtaaagcaacttcgagtggctgttcacgatgtaagtatataatctattaagaagttcttattaattagatcttattttcattatggaagaatgatcggagaataaattttatgggacacgattttgtccggtaatgtactttcacagaatatgtacattatatgggtctgagggtacattagataggtagacgttaccattttttaaccctaattactcaaagatcaatcccagccctctgatcaaataactcccccatctaacagttatcgtacatcacggaatacattctgtgaaagtacacgggacaaaatcgtgttattatgctttactgtttttgtaaagaagcagtttataattactttaattatatacatattctcatataagtatatatatgattttgcagtatgcggaacagaacgcaaggcctctacaaccaatccatagtagagatattcacttggttgacggtgtaatttcaaaaggcaaaaattagttatttaaaattaattgatatgatattctcggttggtttatcaacctgatttttttatttcttttttttttttttgatatttatctgtagtctttgaggaaaaaaaaaacatcatgttattccgtagacacattatgtataatgatattgttgttttatacattaattttaattgtagttaattttatgaatatttcgcttcttaaaaaattaaaaataaatataaagacgtatttatttttggacaccttcccaaaatgcttaattctaatagagatattgatcatgtttatatacctatgatccttcccatttctaatcaacatgggactctggttgcatactcgtcaatcctcatctcaaacaaaaaacgccatcttgactctccctcatatgatctttccgttaactatccacaaactagtgtacttccctccaatatgttggcacacatgccttacatggagcacaactactatctcgagagttcttgctcttttttcaaaccaactccttcagagcacaccacctgtctaactaagcacatccaaagatcctatatatatcgtgagattagtgaggcttatctcctttgtttggcattctgaggattcattcaattggataactttggcatccgaacatcatctgccatctatctccacattggtatgatatttttcgctttgagcgtaagccctcacagattttttttgggaacctttccaaaaggcctcattcaaatggagatattattcgtccttacatacccttgatccttcccatttctaactaatgtgagactttggctgtacatccaacaattcttcccatttttgacaagaaggatgcaagaattgtcacactccaattggtgctcacttcaaactcaaggcactgatagatcaacaagctacttttgaagaaaagaaggagcttggagtgccttactctaatactgtgggaaagcataatgtatgctatgatttctactagatctgaccttgcatatggaataggtttagtgagtaaatcaatgggcaaatcaagttttaaacactggcaagcagtgaaatggctgctaagatacatgaagggaacctcaagtttgaagatctactacaacaaacatgatcagatggattgcacaattactagttaccgagattctgattatacggtgattttgataaaagaagatcactgacaagctacataatcactattggagagaatatagttagttggaatcaaatttacacatttagtggcattatccactatagaagcagagtatattgccctcaatgaagttttcaaggaagctctatggttaaagggaatcataacagagttggagtttgattaaagggatgtaagtgtggattatgactctcaaaatgctatacgcttagctaaaaataatgtacttcatgaaaggatgaaacacattgacatcaaactccatttcgtaagacaaatagttaacaagggactcatcaaggggtgaaaatggccacaaagatcaatcatgcagatatgctaatcattaaagtgatacaagttagcaagttaaatgctacattggacttgcttagtatcaagacttgattcctggaactttgccaagttagttgctaattcaattgtctgttacactcaaagcaaatagaaaccaaaatggagaattggggaggattggtccctatattttttgaacattcattgactcatctattcaaactcttattgcatttgaagactagctagttgcaacaagtaatctaagtccaagactcaagactcaactaaacagttcataacagaatttgttaattcggctacaacttactttagcttatctactctctttctcaccctatatatatattagactccaaacctaatcaacttagaaatgagacattgattgtatagtgaaatttttaaagagaattttagagagagaagttgtatcaatgagagaaatttgtaatggtagtttaagtgaggaagatcatttctgatcagagtgtgtaccacatttccacataatgaatttgattcaaggaagtgccttggcctttgagtagcaccaatcacattgactgagatctaacccaagtaaaactcgttgtgttcttattttttttttcttttcttgcatttactcttcttgatcaccaaatattgatgcataaatctagacagagaaatctggctacacctactcgctagattggtgagaatgtaatgatagttaagtataaataagagagacaacaaattcatagaagttcactccccgtgacgcgatagtaatagagctacgtctactttgaatttttatttttcacaagaatcacgagaaatggctaagtgtaaggcttacatttctagagagagaaagtagagagagattcttagaagaatgtaaaaaataagctagatgaggtctccttttatatggaaggaagtccatataaatattaataaaaaattacaaaattatgaaaaaaaaaatatcactttaggctgatcgtagccattaatgatgatccaatggggaaaattgactcatggtaaaaactgtcaattttcggagtttgaatctggtgcgtactgcaaaaattgcaactatgttgaagaagaattttggacttgaaatattaagaattacaacacaagtgtgagacatgactttctagatctttaaaatagcctctaaatgaaagtagaagcgtgtcaatcagattaatattgagggagttatggtatttttactaaatgtttttcagcaccctacgaacaggttgagatcttgatgtcaacctagacacggggtgagtgaaaaaacatccaagacttgtattttttttatgcccaagtgatgtgttgacaccacttagtcagattctgtgttctggtaaagttgttcactagttctcagagatgttgcttttttgtgaaattgggaagactcgaaactccccaatttttttgatatattccaccttgttgaaagggtgaaatgttaaagtttgaattggacctatcataagttttagctctagtttacaatgaaaaattagtttactgctcgaaacaaaatcagattccaataagcgaaacccagtggaccaagttaagatgtcaaccttggcgttgagtatttctcggggctcattttgatacttctatgacatttgagattatgaat

SEQ ID NO: 19825 - DNA, 3961 bp, Cannabis sativa
aattaatcatatttataagataaatatggacttatcacataatgaccatgttatcttggtcaatgacaacacagccagctactcaaacgaggaattaattgaaatagctgatttaaaaaggaaaagattggacatggtttcttcaagtggggccgaggtttctccaaaagaaggaactgaagctgaggtggagaataatcaaaatatctctgcaaatgtgattaattcaaaaaatttgataaggggggtcttagattccaggcccaccaaacattatgagtacaatcagttggaattgtagtgggctcgggaaccacaggcccaacaattcttagctgacatttgtgtccaaaagaaacccaagtttgttttccttagtgaaacttcgtgtacaaaagatgttgttgagaaagtcagaactagattgggctttgaaggatgtttctcaattgatgttaatggtagaaaaggtggtttagctatgttatggtgtgactcctctgaagcccaactccttaattactctcataatcatattgacatggttgttagtctttctggtatggatccgtggcgactctcaggattgtatggggagccaaatcgcaacctcaagtatcgtacatggaatttgcttcgtgatatagtgtccaaatctaacttaccctggtgtattattggtgatttcaaccatattaagagtaatgaagataagaagggaggtcgcctttacccctcatccctaatcactggcttccaagctgctgtacgtgattgtcaagtcatcgatttagagctcaggggttatccgtatacctgggaacgaagtagaggttcatctcgagcagttgaaattcggcttgacagggctatggttacacaaagttggctggatgtttacaatgaggtatctcttactaatcttgagttttcatcctctgatcattccccaatctttttactccctgaaatgtctaccggtacaatttcttctgccccatttcgatatgaaaatgcttggcatagggagcctctatgcaaacagattgtgtccaatgtctagggctcaaaccagaccgaaagtgtaatgaaaaagattgaactctgtggtgtccaattggctgactggggtcgtcatttgactgggaatttcaagtctcagttgtctaaaagtaagaaactgctggctaaattcaaaaactctgctaatgaatttgatgctgaaaactttattgtggaaaaaaataactatttcaagatcttagcacagcaagaactttactggaaacaacggtcaaggcagtactggttacactcgggagacaaaaataacaaatattttcatgctacaggtagtgctcgtaagagatcaaatcatattcagcaactacaagacaacaacggcacctggcagagctggaatacagtcctagaatcacttataaagcaatactttgaggagctttaacattccacagactcattttctgctcaagttattgacaatgttaaagtttctgtcaatgctacacacaatgaagctcttttgcaaccaatacaagatgaagaagttaagttggccgtgttttctatgcaccctgacaaagcacctgggcctgacggtatgggacctggctttttccaacaccattggaatatcgttggctctgatgttatcaaagtcgtgaaggagtattttgacattgaacttatgcccgagggacttaatgccaccaatctcatgttgatcccaaagaagaaacactttgctgttatgggtgatttcagaccaatatctctgtgtaatgtcctttataaggtcatctcgaaagttttggcgaactgcatgagggatctaattgactgtgttatctctgaaacccaaagtgcttttattcccgggcgactcctctgggacaatgttatggtagcttttgaagtcatgcactattgaaacagaaaacaagaggtaaaaaaggtttcatggctcttaaacttgacaggagcaaagcttacgattaggttgaatggagttttcttagagcggttatgactcgtatgggctttgctagcaaatgggttgatctcattatgggttgtgtatctacagttcactacacagttgttcataacgggcatgtgattgactctgtctccccatccaaaggtatccgtcagggagatccactttctacttatcttttcattataagtgtcgaaggcctctcagctcttatccagaaatttgaagctaatagacttattcaaggatgtcgtgttcctcaacaggcaccttctataacacacatgtttttcgcggatgacagttacttaatttgtcaagccacacgaggtgttgctgatagtatctcaaatctcctgcatatctttgaaaatgcatctggcgagaaagtcaattacacaaagtcttcgatcttcttcagccccaataccgatactaccagtcgtaatatggtttgtgctacactccatatgtctgaagctcttgaatgcagtctctatctaggccttccaaatattataggccgcaacaagaatgttgtgcttggctttattaaaaataaagtcattgctcgaattaatagctgggatggtaagtttctttctcgtgctgggaaagaaatcttactcaaaacagtcatacaatctttgccaacatatgctatgagtgtttttcttcttccgattggtacttgcaatgagatagaaaaattgatggctagtttctggtggaagacaaactccagtaaagggcgaggcattatctggatgtcgtgggatcgcttagcaactcctaaagaagaaggtggaatgggatttaggcatctccacgactttaatcttgccatgcttgccaaacaaggttggcaattattgtgtaagcccgactctcttgctggtagaatctacaaagcaaagtacttcccaaattctgatttcatttcatctgatctcggacataacccaagctttgtgtggcgtagtatttggggtgctaaggatttggttcggcttggggttgctcgagttattggtgatggtacaagtactaaaattttgggttctccttggctaccatcaacaagtaacaaatatgtctcttctactcatcctgggcttagcacacacactgcaagttccctatttacaccaaacatgttatgttgggatgctggagtagttcgtgatttgttttctccccaagaagttgatctaattctcaacattccactaagttctacagctagacctgactgctggtcttggacagcagaacacaacggaaagtttactgtaaaaagtgcctatcatcttctgtagagccaaaaaccaatcggtccaaggccaaacaactcttgtttttggcgtaaattctggcatttgaagatacctcccaaagttctgaattttttgtggcgagctatagcaggttctctcccaacctgtgtgaatcttgtcacgaaacatgtcccaatttcttcacattgtccggtctgtcatactacagcagaaacaacaacccatgccctgctgtcttgcggctttgctgaagcttgttgggctagttttggacagcctgtcatgattgactcctcttcctcgtttggctactggtttaagatgttgcgcatacttgcgatattaactttatttgtcctgcagcaactctttgttgggccttgtggaaagctcgaaataaagttgtctggaataaacataagtctactgtcaaagaagttctggccaattcttctattacttttgaacattggaggaaagctcaaaataaaagtgctcttttaacactgtcgtttagcaatagtgatgaaggggctgagctttggacaccacctgcaacaaacaacctcaagataaatgtagatgcggccctttatcaacaagacaactcttatggctatggagtagtggcgagggatca

SEQ ID NO: 19826 - DNA, 3338 bp, Cannabis sativa
aattgaactccaaattttctcttcgaaaagtctcagccagccaacaaaacttggctatgcaggctgaaacctgcaatggctctggacccacttccctttttgtcaccggactaagtaatggttctttgactggatcgcttctgcccaattcttcatcttcttctcaattggctaaggagtccccactgatggaagaggtgatgagtctgattgcttttccaaaattttgtatgataacaataataaatctatttaagctttatgcacgctattgaactcagaagctatgtccccagatcatggtttgcatttagagcatgatttgattttgctagcttaattattttattctcacaaactgatgattattcatatttttcataattgatccaacagatactagccatctcccgctcacaacgtcagatcatgcaccaaatagataatctgagcaatattttgcgtgaatatccaggagatagatttcgccgaggaagaatagaagggacaagcagcagaaccattgatgctaattcattaagcgtgcctcttctactaaccatagcactaggtggtttaggtatcttcttgtttagaaatctaaatttgccgaaataactttcaagattagcatacacttccagcttaatgtgaatatcaacaataccaacaataatcttagtcggcaagctccaaaataatgtgggacttgggctagttgggtgcaaggctgagtcgctcagggttcaaattctaatgtcactttcaataataatagtaataataatgataatgataatgataatgataacaacaataataagagtgataacgttgtccggagctttcctttcagcgaaaaaataaagctgtcctgtgctctgtggcatatttatgtttcaagtaaggcatgtttttatattacaattttatttaaatagatatgttttagtagaacttttttggacaaaattatgatatcatattttaagaaagtgatggtctttattttcatatatttttaggatgattgtcaatgtttaagcattggccttaattgcattaccaggatggcttaagtgtttttattagaatgtaagcacacagaattatactattattttattgatactgaattacaagaaagaagcctttagtatatacatgcattgaagatgtgcaaaacagaaatcgatgacctaactaattggttaagagggataatctcccgtattctttctcagagattaagagggatcatggacaaagctatatctcctctccaagccgccttcatccatggaaggttgatagtggatgctaccttgcttggtcaagaggtggtgaacactgtgagaaagaacaggagcaaaggtggtctaatagcgatcaaaatagatatgcacaaggcgtatgaccgaattgaatagaagttcctgcaaaccattctttgtgctaatggattctttgaataggctattaagagaataatggtatgtgtcacgagtacatcctatgccgttcttcttaatgggaaaccactcaagaaatgtcttccctcgcgcaatttatggcaagatgatcccatctcaccttttttattcctgtgttttgatgtgctttcacgattactacaaagggctgaagaaaaaggagatatcaaggggatttctattgcctgttgtactactcctatctcacatctcatgtttgctgatgatactatggtatttgcttaggcaagtaagaaggcggttgtttatttgcgtgagtgtatcaagaagtatgagatgtggtccagacagctctgcagtaagaataaatcaagccttttgttctcaaattgctgcccaaatggtaggaaaaagaaatcgaggatgagcttcagacaaagataacagaagtggggggtttctacttgggaaatcctatgttgctgtccaaaaataaaagcaacgaattctcctttgtcattgataaattgaagtcaaaactagaaggatggagattgaggaccttgtcttactcaggtagattggtggccattaactcggttgccctggccttgcccgtttattctatgtccactttcttactcccagtaactgtgtgtaggcagatggatgctcttgttaggagattttggtggactggtgggtaggatagatatcattttcttgcttccaaaagttgggagactttataccaactgaagcaaagaggtgttttgggattcaaaaaatttaaagataatatcagagtagtggctaatctggtgtgggaaatggccagcaatgaggagaagatttgggtcaaagtgttccgtgagaagttctgctcttgggaatcgttttgggcggtgagacctagaattggagatcctagtatttggaaaggaattttagaagcaagggatcttatccttgatggaacttgcaccattattgctaatgggagagacattaatatttggtggcagccttggatatcatggatgagctatgtagaattctgttacatcatggagcaagttaaatcaaggccccgcggctagtggctgatctacttgatcattcccagtgtggatggaacataaggtacgtttgttacttgtttggccatgcgctggggatgaaaattgcatccattgatattgttgtatgttgggaagggacaaggttgtttggaaaagctcctcgaatggttgtttctccgttaatgctgcctattggatagagcagggtcatcggtttggacaggctcatccttgctggaagttaatttggtcgaacaatttgcatccacgattgagcttgctgttatggagggtgtgtagtggagccctccctacccaagataaggtatggagtgagggtgaaaggggctgtctcctgtgcaattgtgctacagagagtccaaaacatctgttctttgagtgtaactaggccaaagttatctagtttggtgcccctttgtcggttagaacggaggatctgcagggatagaatttgattgaaattttgatgtctctttgcatgaatctcagggatgaaagactcaaaagttttcttgtttgattctcagtgatctgtgatactctgtggaattacaaaaatgttgtcttgtttggtggaaagcttcgagaagtgcgaagcatagtggaagaagtctcgaaaaggtttcatgagtttgtaagtgttgaactgactggggggatcatctctcctaaatttgtgttgttgataccggggcccccttcaattcaaacttcttattcactgatggagccttcaaggatggctggtgtggaatggcagttttgtgagtgagcaggggaa

SEQ ID NO: 19827 - DNA, 4591 bp, Cannabis sativa
  modified_base (1036)..(1038): a, c, t, g, unknown or other
agaaaatatattatttctatttttatgaattaaaagtgttttgaaaatactatacaagtaatgatatgtgcacaaataattcatatacaaacttaacacatatttatataacaagtaactttaatcaattatttttatttgggatagatcccacctatcaaaagtaatgatatatcatttttgatacaaagagtatggaacaatattttagtagagtttatataatatgtaatatgtggttttaaactccaactaatttaaattaaattatttgagattgaattaaatgaattcagtgtaaatggtttggtcaattcggacagtttataattttttgaattaaaaacaataatattaatcattataatttaaaatttattattggcggtcaatattaaccatctttctagattgctatttattacggataattttaaaaaatatatataataaaaacaactaaaaataatataaaactataattgtatagaattttgaaaaaatttataatttttaagattttatttacataaaaacagtcttttaatgtgtttttatatggtactcttattttttttttttaatttttttattatttatacgttattttttgtgtttttaaaaaataccatagaaatataaaacaaaaaaaactatttaaacgtagaagtataaatttttatcaaaaataatttatgtaatatttttttattttttattatttgttatttttttttatgtatataacaatctagagattgttatttttggtagtatagtagtggatacgtgatggcatgaattttgcacactttaatatttatatttaattatttatttatatataatttttgtatttataaaattaaaaatatatataaaaatcaaattggcaattgagaatgattatatgatagtgagagagagagagagttgaccccacaaaattttcagtcagtagacccactaactactatgattaaaatcaaggccattattaattagtgaatattcaaaattatttatttatttattnnnttatttatttatttatttgaaatgaaaaattatttatttattcattcatttattttaagtcttttattttctgttcctttgttatgaactcttaattcaaaaaacataagcatcgttataacaccaataataaagatatgtatgactattttttttttattttaaaaaatggtgtatatatatagttctacatatctttttctgtgattaagattggtgggtttgaattttagattttaatattgacttattgtaatgcttagtaataaaccaggctaaataatcctcacctatctcttaattaatttttaaataattcttcactttttcctttattaaagaaaatattataatattaatatttgtttttttcaatgatatatatttgtagaatattcaaaaaaaaaaaaatagaaattatgagaattattttaattttactattacatgaatttaatttaataaataattgaaaatgtgaagattgtgaacaaaggaaaaaaaaatgtatcttgtattgagacagaaaaaggttacagaatttatatatacaaactttaacaaccaacaaccaagctaactaacacacggttacaacaagaaaagtcagttaactaactattataactgacaaaaataactcttaacagctcccctcaaagtaagtgtaagttgggctaaacacacttagtttgtttcaaggaatggcaaattgattactagacaggggcttagtgaggcagtctgctatttggttgttagcagggacatgttggaccaaaagttctttgttgatcactttatctctgacaaagtacatatctatttcaatatgtttcgtacgagcatgaagaatgggattagcaaccaacatgtctgagcaaagattgtcacaccagacatgaggaatagtaggttgaggaatctgtatttcagtgagaagagactaaatccaggtgagttcagaaactacaactgctatgcttcgaaattcagctttagtggatgatttggagattgtaggctgcttcttggttgccatgagataagatttggtccaagatagagacagaaacaagttgtggaccttctatcatctagatctgcagccctcacagaatgcttgtaagtgaagagagggtgcaggttgaagatgtaaaccaaaatctaatgtgccaaccaagtctctaaggattcttttaactataatccaatgtacttgaagaggattatgcatgaattggcagactttgttgacactaaaagtaatatcaggtctagtgatagttgcatactgtaaagctcccacaatagacctgtattgagttaggtctgcaacagcatcactgccataactggataatttgagcccactattcattggggtgatgttggttttagctccttgcagctgagctttgcacaataattcttgaagatactacttttgggagagaaaaacaccaatggtgtgctgcagaacatgtatttccaagaaataattaagttgtcctagatctttgagagcaaaagagttgctgagagaagaaaccttgttgttgctgcctgtgattagtatgtcattgacgtaaatgagtacatagatgcagccatgagagttgactctaatgaacagagaggagttagttttggcagaggaaaacccaagatgtattgagacagcgaagagtttttcaaaccatgccattagtgcttgtttagggccattaatgacttttttcaatttgtaaactttgtatgggtgctcaggattaacaaaatatgtaaatttcttcatgcaagtccccatttaggaaagcattgttaacattcaattatctcacagtccatccatttgtgagagcaatggtgagacaactctaatagttacaggcttgataacaagactgaatgtttcattaaaatcaaatccagtctgttaatgataccccttagctaccaaccttgctttgaatatggaaacagaaccatatgtgttttctttcaccctgtagacccatttacaatcaattggtgttctttcagaaggcaagtaaacaagaattcaatttttatttttttagggctgtaatttcatcttgcatagcagcaagccattttggatctaacatggctgctttgacagtgagaggatgcaaggaagacataagaacttttggttttctgatgccagcttttgatcttgaacacataaggtgattgttggcggtggtatgggtgtaagtagggttatttggttccttattaagagttgtagtggtaatggtgggtgagatgggggaaggagggttaattgtgttgttaacaaggatggtggtggagggaagaactatgtttagggcaatggaagatagtgcttctgtattaggcatggacactgcaacattggtgagaggggatacaacagcctgaggcatttaaggtttagctattatgttttgcacagatgttgtagcttgattggaaatagaagtcgtagcattgatgggcatagtgacagcagtattggttaagataagtgtaaatagagtagtagaagtagctaatggaaatattgtggagctatgtatgttggaagtgacctgttggatagtgtgagcaaagggaaatatggtttcaaccctcaaaacaactctggagatgtataccttgccatcttttgataagtatttgtatcctttgtgagataaattgtagccaagaaatacacatggaacagacctatattgaagcttagctttgtttgtaaggtctgagatttggataacataagcatccaaagacttttaacatgaggtagtctagtttagtttggaacaaaacttcaacgggagatttgtattggagtcgtggagttggcattctatttataagaaaaatagcagttctgtaagcttcattttagttttttagagggagagaggcttgagctaacaaggttaggccactttcaactatgtatgtgatttctctcagttaccccattttgttcatgagtgtgtggacaaaaaactttatgaatgatcccatgagtgcttaacaggtatgtaaacgcttaatactcatcccctaatcagactgtatagcattgattttataccctagttacaattcaacctgtttttcaagcttgtaaaggttagtaaggcctcattctttattcttagcatatacatccatacgtgtctagagaaggcatctataaaactaatataatacttgtaaccacttgaagagactgtaggagaagggccccataagttagggtgaaacaactgaagtggttcagtatatatggtgtgtgattgtggaaaataaagcttatgatactttccaagacaataggctgcacaaaagattagaataattatcatcaattttcttactgtttggaatgttacatgatgagagaatatgttttacaattttgacagtgggatggcctagcctattatgccataaggtgtattaaggatttaatacaggaagttgatgattattacattgaattggcttagtcatagtagactga

SEQ ID NO: 19828 - DNA, 2827 bp, Cannabis sativa
agagagagagagagagagacaagtgggttcaactttgaaattggcataataagaccatgagagagggagaggggatctcacggggttgcttttattttcactatatttgcttatttttctttttaattttatttttacttgtcgcggtacctctgaccaaattagcaattgcacaaggaaaactacaaagctctaaactttagataaaattacttttatatatggatgacgcgccggtggttgatatagaacttattgtacacgaccaagataatccgttcgacaaactttaatctgtctcctctagaaatttaggtcaatttgaccctctacatcaaggcttactatgttagtttaattcttgcgttacactacgttatttgaaactcaagaacatgaatgagattgatagtatagcaatgagatccatcggaatggtctagtatgaacttcagtcgctgccctctctgcatgcttgccttggtggttgaatgcgtgtgtgcttctgctatacacacaacacaaatggtataattctcaatcaagtttttcccccagttaataaatataaaaaaaagtacaactacgaatggggtcaactctatttatccttgtataaatttagtttagacacaacatttaagggaatcttcactccttgctgtagggcaaggatcagtgaggagctaatatcgcagctgaaaattgagatgaatgagttcataaatactcatccgcatcgtcctttgaccatttttcagaagttttggccaccaagttgtttgagattataagggacgacttttgaaacatatgatttgctccataatgcattttggtataacattcttgattgactccgacaagttgagcatgtcgctagcatagttttttagcaacatatatcatgagctaactgactcagtcaagggaacctcatgcgtatcttgatctttagctatcttcacagcagttagcatctcgtgtctcttctgctcttgcgctttcctccgattgctttcaaggatgatgagaagagcagtaatgtcagcagggctcaccccgccaactctgcttgcttgacctatggtctgtggccttacctgaaagcatttactaaatccaaattacaacgaaacaaaatcattcttaagagttctggagaaaaaaaaaatcattcttaagagttctggggaaaaagaaatcattcttaagagtttctaaagacattgtgctcaaccattcttagattacaaatgaatatttttgcctttctggcttctagttctagacaatattcttatattcattgtttctatgacaagttgtatagtaatggttatagtgaaattctcacaccatgtatatagattaaacaacaaatgtaatacatttaacttataaaggaagctacatagtgcttttccttctataaaattgaattaagatattagagatacgtttatgagagataggcatgttgtcatgaacagtataaatataagtttatgggctcgtttggttgtaattgtattatattatattatattaagttatatatcatatttttatataatactatgttaaattttagtttatactaaaatattatatatttatgtctataaaagtcaataccatacatagctttatataaaaatacaacattatataaaaatacaacataaaatacaatttaatataatactatacaatataatatggcgtactaaacgaaccctatatgggctacctactcaccttcgataacttctcacgtgattcatgagacaaagttgtcattgcatagtaatccaaaccgtctggaatcagtttatgttgtagatggaccatctaaattgatagtttgaagaaacgaaaatataaataataacactgaaagtggtagctgaaaatatggtgatgacttacaaaataaatttgtttgtgaaaggcatgaatagctcagtgtttaagttctttataaaacaaagtgccattcatgtttctttacctgttgaagttggctctgctgacgtgcaatgaagccctcatacttgatatcaacctcaacacattctttttctgctcttgataacatttcattcccaaaaccatgtttatcaaataccttatattctatgtgtggtttcttgagaagactttccagtgttgaatggtccttcacgggctgatttgatagacgagtaatttcagctgctagttctcctcctaagaataaaaaagaaacttgtagcaaattaaaaaaaaatatatatattgacacttctggtatggatcagtatcagtattcacatgtacatcagcatatagccctatggttgagaattcaatgcacttgacatttactgtgttacaaaattactccccaaattgtttaactgcaatctcaaagacagtagagcaaattaacctgagattctaacacttttcaaccgctttttctcctctaaaatttgagcttgtttgtcctggtacagtttccagcgtctatcatctattaacccaatttctcggcccaaaggcgtgagacggctatcagcattatctgatctaagcagcaaccgatgttctgagcggctacaaagaaacaaaacacagacagaaatgaaaaaacggattgttacgagattcattcaagatcaaaaactgaaggcatctatcatttatatgcttgtaagaaaaataatgtgtaagtgtagaaaaatgaattacatcaattgaccccaagtagaaaatacacaatccattcaggtgcaattatatttacgcaataagctttaccatattatgaatatgatcacac

SEQ ID NO: 19829 - DNA, 4117 bp, Cannabis sativa
ttaaaaaatattttcactttttcaattttaaaaacaaaaaattgattaaaaaagtgttaccaaacgccacctaaatctgacagtttgtgtgactgggttttcaagtttcgcatttgggtgggttaggtgctggttggtccgggtccgagtgggttgggaccgggtttcgggttgggactctttttgaaaaatatacattttttttcttcataaaagtactcaaatttcagcaacctttcaattttttttttaaaaaaactgttattttggcattttacaatacaatatttgtaacttctatattataaaaaatcattactacttattattaactattctaaacttattaaaatttctaataagttaatataattcaaaaaaacaaagtccatactccaaaacaaaccaaaatccatagtccaaaaaataaaattcatagtccaaacaaagtctaaacaaaataaacaacaaacatataatcaaatcaaaatatcaaactatcaaagtttgatatgatcaaagtccaaactaaaactaagcaagaaacacataaacaaatcaaactaaattgtctaacaaagtcaaaaattaaagtcttggtgtagaataggataaagatgtcaaagtagtactaaagtgcgtggtggagatagaagctgagccttgtgagctagtagtagtaccagcagctgctgcaccacctctattatcgatcttctctacaactagtcaattaaagttaaacattagtataaaagtgattgtaaattgaattattattagaaaactaaactaaagtgtaataaaatattgttttcaaaaatatcttctggttgtagctcggcctcatctagatctagatcatcatagcactctttcacaatgatggattgatgtgatctactccaccaatttttcaagaatattagaacttcaactgtcacgaactcaatgaagtcctaaaaggatctaaaatctgaccccatggagaaagttgtctcagaagctacagtggtgacaggaatcgctaaaatatcacaagcaatgcttgacaggattggatattgtgatgaatttacgaaccaccattttaaaaaatcaaacagaccccctgcaccattggttcaattgggtctaagaagtattgctcaacttcattccttgtatttccaccatactctttattttgtctgcaaaattcacgatgcacaatagcaacataactctttttgctactcagtaggcctagactagacatcaacatagaagattcactttcactagaatgatcatgagaatgaggagttgtctgagtcacaggtaaaggtgactactcttctaagatagtggatgatcctgtagcatcacaatacaaatcaaacagctcacaaagagtatattcaatcttgttcaccattttaatgattgtttctgcatcatgaaaagtactaaaagaatgtttgaggtacttgatcttgtatccagggtcaagaactaaggcaataaaaagtgtctcgttacatttgtcaacatctccccaatacttgtcatacttattcaccatgcctacatccatttccttcaacaagaggtctcctatattatcttgccatcatgtacaattcttgttgcatcttacttatttcaacaaaatacttatttgtagtaacataagttgagccactaaaccttaatatcacttgataaaacctctctagaaatttaataaagaccaaagcatgagctcaaatttaaatcttcccatctttgtcaaattcattaaaataatttttgtaatttaaatcttcgtcaaacataaactaaaacacctgtttaaatctgtcaacaagtaaacatgaggaatgtcgatttccaccttgttgggacatctaacgtgagaagtcctctcgcttgagcacctactttggtgacaaattctttgaaagttttaagcctaataggggaagacctaacatatctcacaacatttctgatggcagaaattgagtagtttctctcctttaaaccttcaccaacaattaggttagtgatatgagcacaacatctcatatgtatgaatttcccatctaaaatgagaacattttcattttctctaaaaatatacttcaaatattgaatgatcacatcatttgaaggggtgttatctactgtaatagtaaacaacttgataactcctcacttttacaaacagtattggatttctttgcttatggtctcccccccgtgatcaacaacttgacaaaaattaatgattcttttaaataattagaatcaaaatcaatccaatgcatcgtgataaccatataattgatattatgaataattgtccatgtattggtggttattgagatccttcgcttaacttttttttctcttcttcaaaagcctttgaaacatctctaaaaatagtcatcctagaagggatctcaaacctaggttgtaaggtcctaacaaattctttgaaaccctcccccttgacatgtttatacaacgattcatcaactgccaaatatttatataaatcaactttgcatgctattttgttatatgctaccaccactagactcttatcccctcttaaacttaaaatattctatttattttcgtcattattacaaggactcttctcacatacttgcttaaagtgatttcataaagaagtactcccgtgctttataagatgacattttaactcagcaccacaataattgcacctacacttggggtcatcttctctgttttaagttttggtgatttctcgaaatggttccatatattagatctagatttagaagctcgagagagtttagtagctttcctttttttactacctctatcatcatcagtaggttgtggcagttggggggaggaacaattttattttcttgatccaattctatatcttaaaaatgagcaaacacatatacaataataaaaattataaacaataattaacaatttcaagatttctgccaatccgatcgcaatacatttatttgcagaacctacttcactatggatgaatatctaagatattcaaactcctctaaaattttaaatatataaaataacataatatgtcacacactcacaaatataacaatatatatatatttatatatataacttattacattaacacacactcacaaatcacaaattaacaatgcatactatataatttttaaatatatataaaaattttgaaaaaaaataaatatacaggcataatatatgaaaaataacacattaataacttaacactaacacacactcacaaatcatagtttcacaatcatagattcatagttttcattttcaaaacaaatatatatatagttatatataattttagaaaaaataaatataaataaattaacacattaacacccctaatatgtacatactcattactcattaatcacaatcttacttttcaaaacatatatatattttataacataatttcaaaaaaaaaatataatatatatttatttaccattttcaacatgagaggaaggggaagaacacaccgatcgtaagagattaaggggaaaaactgaagaggggccaaaaaaattacaaaaaaaagctagaagaaaaggaagaagaagggaaatgcctgcggtgccagtggtgtgccatcattagaccttctgaggcggaggatgggcttgggcttgatgaagcaaagggacggagggtgggctgggtggtttggttggttgggtctggggtgctgctggggggaagatgggttagaattagttttttttttttcttttttataatgttttagggaactaattatatttagattttgggggttataaaaaaatattatcaatatttttgggttttcgagtgggtctgggtataactcgattttttgagtgtcaatttaatcaaatctgcacctggtcgaaatagttttgggttacacccaaacccgaccattattttttaaaatcctattttttttgggttttatgggttcaggacgggtgggtaggtttttcggatccaaatgttcagccctaaatagttttatttcaattttttttaatatatattgtagaagatgatcaagcttaca

SEQ ID NO: 19830 - DNA, 2061 bp, Cannabis sativa
ttagaataaatatcaatttacatacaaataaaataatatatcaataaaatattaaatttttagactctatcacttgattcaacggatctcacactattccccctgaagttcttaaaaaaaaagctcttgcctacctttaggaattccatcaccacactaacaaacaaacggtctctaacagacatggcagccactttctattggtatgttaaaacttaatgttaatgtctcaattgactatgaggggtgtgatgggtatcagaggtattgttcgagactctaatggtattgtgattgttgctatttccgagccaattaaagagtgcttacatgttaaataaattaaagttaaaactatttcagcttgcttacaatggttgaagtctatatcattgaaacaaatactcttattgtttcgcaaagtattaatgtctatcacaaatattatagttgatttaatgacttgattctcgatgtaatttattagatatcctcttttctagttatttctttgccgtatgtcataagactacgaacttttcgactcttaatcttgctaaatatgctcttaggatggattctataatcatactattattgtaaatgaatttatttattaatattataatagctttctctaaaaaaaaaaaattaatctaatagttcttttattttcatttatttaaaaaggactaaattgataaagaggttgaaatttgaaactaacgacccatttatactaaaactcgataaatttcaagaacactctcgtgtctttgttggtgctacttcgaatctgtctcacagccatggaccctctatcagctttgcgagaatacaccattagaggcgagctcgataagatcattcgatacaacgatgagttccgttttggttcggattatagctgcccttgttctactccgaccgcttaccgatccaaacaaggcaatctctataccctcgataccttagtttattacatcaaaaaccatcatgtgaagcacaccgagtacatccagcacgctcgcacgcagggcgtccaaactgtcaccttccccgatcgaaagcccctacttgattaccttactggtaaagtctccacttccgattctatcgaatttctcgtcccccaaaaccctagatttcccgatttgccccttccttcgatcgacgaataccgtccggacgatgctgttgttgctggttcgaacgacgccgttgagcctggcattgttgatgatagacctagggtttatggggagcccgagagggtcgactatatggcgttgattagatcgagcgagcgaccactaaaggaccgtgaagctttgttggagagcaaaggtaggaattttcatagtgttctgttggcttcgacgcggcgcgaggaggaacgacagcgtatcgagtcgcagcagaggaaagatgggttggtggctaagagtcggcttatgaccgccgacgacagaggtatgggtggctacggcgatgaaatgggttacgaccctaacccgaaaccgaagatgcatatgaagggaggcaaaattggggaaggggttccaataattttagtgccgagtgcgtttcagactctgattacgatgtacaatgtgaaggagtttttggaagatggggtttatataccaactgatgtaaaggcgaagcagatgaagggactgaaaccagattgtgtaacagtacagaagaagttcagtagggatagggacagggtggtgactgcctatgaggttagggacaagccctctgctttgaaggctgaggattgggatcgagttgtggcagtttttgttttgggaaaggattggcaattcaaagactggccttacaaggaccatgttgaaattttcaataaaagtgagtttgagttccattttttaagctgtcttgtgattttgattttgcatcggcatttctatttgctgttttgatatcacatttcagataatttgagctattttctatgcagttaagggattttttatgcgctttgaagatgacagtttggaatcggccaagactgtgaagcagtggaatgtg

SEQ ID NO: 19831 - DNA, 2806 bp, Cannabis sativa
gacaaaattttattttacatctaaccaaactggtatagaccgttagcagaaaattaaatttggtaaaagaaaggaaaagagacgtattggtgtcaatgtaaaaacataccgatctaatataaggttgttgtagcaaccatccaagaacaggtatcctctgcagaaaaacagctagtgtaggccagaaaccactgcaagatagttgcaatcagcaaacatcagaagagaataaataaattactgtgaaaatcgtgaaagtggagattgaatatacctgaagagcacaatgaacccatacgcctccaaaatcatgccacaaatgggccagcctataactaccaagaaaaagccaagaccgaatgaaattgttccctgtacagtcaacaaaaagaaagcaggtgtgaaaaagagatatttatacaagagcaatgaattaaagagaggagagattaacaacttaaaccttgaaattttgaggtttcatgaagaattgcatagaggactttagtcctattgtaagagtcacccctgagaagaagaggatctgattaagtaacaccaagaaataacatgttaagatagtacctttcatacaaaaagtaaaattatataaatagcaaaagaaaaaggaatacacatacaaacaaagatgaaggctactgggaaggaaaactacatttgagaataacttacattgcccatggcaagtaatcctttgtcaaagaagaagataattccgagaaatgagaagaaaacgccaaatccggtcaatcctattccaatctctgatccgatcaaaaatttccagagttaatgatctcataatattttacaaacgcattacacatattttagaaaagaaaattaggaaacagaaaaggccagaaaactattcataacatatttcatattgtgtgacttatagtaatggattacattgctgatccaagagaaaacctaactaagcaaattttattaagcattcatcctaaatatgctgcaattccttctaatatcacaagtaagtactagaagaacaagtaagtgttgaatcgtagatcaatttacatggtcaccgattccaagtcaagtaatcaccaccttacaaatttcttgctttgaagaatgaaatcataattacaagttttccatatcttagtaataattgcaaagattaattcatcgaaagatgttaatttcccagcagtaacgtttcttaaaagatatataaaatacaatcgtaagcgataacaacacagcgatatcaaaaaatatgtatatatatatatatatgagacgaaaattcaaaagtaaactcacttttccgatcattcatttcgaaggaaaccattttgtcggacgatttactgcatggaatcacagaaaatgtaaaatttagaattaaaagatagaaaaagagggagagggagaaaacaattatgatgcaagaaatgaaccttagaaaaccgtaaagtggagtaggaaaactgtggtcggaggcgtagagagtgagaaacgagaatggagattgagttgggttgggttagtgagggatcggatctaaagtaaagaaaggaaaggaaatggaaatgaggccctaagggtaagatggagaagagaagagaagagaggatgaaaagtgaggtcaggtgtggttgaatttgaagaaaaacaaacaagtgaacttctcctcttccctctttgctagatagatgaacatcaaattgcccaacacacaggagttcagatggaatcgtaaaatttcaaatgcacccctaaaaaataaataaatgaaataaaaaaccacaaattaattataaaaatttgctcttaatgttttcttttcccaatgttttgtctctttttttttcacaatcttttacaacaatagagaaaataggataagaaattttctctcatccaacaagtgtctccatccaacctaagagcatgtttggctaaccagtgagcagcttggttagccgttctcttaacatgagaggtaacaatactaagaaaagaggatagaagacaacgaatatcaaagattaaatttgataaactagataaatcccaagtttcataatttaaaaaattggaaacaagagtaaccggcaatgcgagttgagataaccaattaagtgcatggaagagagtttttgcctccatttcatctgatcctgaagtaaccttggacagatttcgacatagccgcaatgacttcaccattatggttcctgacaatggcaccaactcccaaaaccttagaaagaggatttaccgcagcatcaacatttagtttcaagccatgcatatcatgtggtttccaaggaattccttcggttggtagagttatagtagttgttggtacagtcggttcactaacagcagtggaatagtttttttctttttgataattctccatgtagtttgtaatataattagctagagcaaaaccatcacgccttgattcaccatgattgagtgtgttccggttagtccaaattacccacatgatgacaaataacaattctaattcatgcttgaaaaatataatctccaccaaccatactacgtgctttgttgaaatcaattgggaaattgaagtgtctccaaatagttttggcatgactgcattggaacaaagcatggccaatcgactcccaggcttgtgaacgtaaagagcacgctacagaagtgagtacttttttcttgaaaagtacagcaaccaccggaagacagttctgaattacacgccacgcaaaaatcttgatcttcggcagtagtttgagattccaaaataatt

SEQ ID NO: 19832 - DNA, 1659 bp, Cannabis sativa
  modified_base (967)..(979): a, c, t, g, unknown or other
aagttacgaaagaaaatttaaaaagaaagaaaaaaatcaaaaagaaaattggtttggcttttggacaaaaaagttatgaccattcgtagtagctatggtattgatgatgatacacgtaattgtttattataggtatttagtattggcaatatatattgcatagttcaaattgggtatcttgtatttatttataatttttttcaaaaaattaaataatttatagtaattgaaatattgttcaattaactgttttgtgtttttatataaattttaatcatatatataatatttatttaattattaaaattttattacaaggtttagaggtttaggttagcttagtagcttacattaattagaatttttattcttgaaatttaaaaaaggttaattttctttttaatctttaaatttaaggagttttgtttaattttattaatatagtgattatttatgtactaaattatacgacccgaattttaatatttaaaaaatcgtaccttctaactttgacgtatcaaatcgtattatttaaacttttaaacttctgttaataaaattagacaaaattttttaaatttatcaattttaataatttcgagagaatttataacgatcttattagttctgtgggtaaaatttaatacatattaaaattcgaggaataaaaatcttaattaactataaaatagttacacaacgtatatttacattttatttttaatattgtaaagtatacaaaaataaaaaaaataaaaattacatgtaattcataaataattataacatttacaatcataacaaataatttcactaataagtttgaatgaataaaaaataagtaatagatgtactaaaatggtctttttagaagatacagtagaaatatcttttagtatttggtgggtttgaagtttttaataatgttggaattttggataattgtcttttattattattattattnnnnnnnnnnnnnttattattattattaatttaattgattgtataaaataaaaagttttgatttttaaacatattttttgagaaagagacaaacacagctttattagtatagatcttttaccagttgaggatgttcatatttcatactcaaacagctcactctttgctgtatgaccttatatatatatatatattttataatttgatttatatataaaaagggaaatagtatatattatatgcttaatggctcaaaagatacacttggattggatcatgggtcaacatgatacgtaaaattattgtgattttaatgccatgtgcactcttaattgtattatattatatataaacaatatataattagattatcaatcaatctaaattatcaatatataaatatatgagtattatgtccaattacgtgtcataataataatattgataaagatcacatgggtagtggtgtggattggaaaattgcaaattttgagtgaaaatgagtttattggaataactattttgattttaaccaaattattaacctaaaacttgcaaaggttaagacttgagagatgactaagtaagagaattaaatattaatatattactcgttaatattattttagaccatgtgttttataaaaattactatttttattttgttaaatgataaaatatattctatatttt

SEQ ID NO: 19833 - DNA, 2221 bp, Cannabis sativa
  modified_base (2191)..(2195): a, c, t, g, unknown or other
ataatgtgtatttatcattttatggggggtgcaaatagagctctccaatacaaaattatacttttattacaaatttaccttccgaggcatggattaacttttgtacattctttaatattttatttacaaaaatactatttgcacacacataagccttctatgctcatgtcattaattatactataatgacactaactatttttccttctcttttatatgtacatgttgtctattttattctcaattttcattttgattgtgattttcatttcagattgattttaaattatttctccacgatcaaaaccaattttttttttccaaaaaattgctcccctacgatctccaactgccattgaagctccaccccatattttttcttcctgtttttttcttcttccaagctatgtataaatggttgtgtcttgtgcttcttcttctctatctcgtcgatgaaaaaactcattaagaagctcatttgcaaaagttctaaacatgcaacaatgagtgttgaatcgttgtcgaacaaaagaaaaagaaaacatgttatagttaaagatgatgactctaatgaaaattttgttgaaccagcaacaaaacctcatcgtggtcctttgaagaaaaaatcgaaaaggaatgaagttggctagagttcaattctagaaattatgagggggaagaagcgtgtggatcaaatgcctacggtttgatttcagtttccttttgcttttgccctaattttaaaatgttgtctttgttttgtttagtgtttatgcttctagggttttatatattttatttgttttgttattttcttagtgatagaattttttatttggaatattgttagatttaggttgttttttagttttttcagcataaaaagttattcattgatgtatttaattctgttaaatttagactttattttgtaatgaatatttgtatttttttttttatgtttttccatattctttgggcattatttatcattttgttagtttggtatggtgttgtttttaaataggttgctaatagatgtattgtagtttatttatactgtgatcaccatttgcattcattttgatatttttttgtttgattttagacaatgaatgcaagtaccctatttttgatcactataaatcgaaagtggcctcaaattgcaattacagtgttattgagaagcttaattccactcttttgaaaaatgccaaggctttgttgcgtgcaacacacctaggtaaattttaaatattcctccattcaagttgtaccctcaagttgttcatggtcttcttttaagagaggtgcaacaatccagttaaaaggaaatttgggtgaacattgatgtacctacgttcgttttagtgttgaagagttcactttggttacgagtttgggttgttatgggggattgtaataaaatagattttcgtcatgattcaaactaaattattgacacttattttcgcggtgttaaagagatcactcaaaaatctatagaagatgctttttcgggttgtgtatggggtgataatggtggtctgggtttaaaggtggtaattctatattttatatattgacatgattagtagggtagaaattgacatgattgatagtgcgagatatgatggatattgctgggattagagagtcatttgagttgacattgcactctttcaagggtcatattgctcatggcatcaagagtaaaaataaacatacgggagaaaatatttatcaaggttggtatagaatattgagttttccctgtatttttcaaaattagttttatgaatgttgtatgaaaaggatagaagattttggtaaatgattatattctcgtattccaagaattttgaattggagcgatgataattctcctgctgttggtacactgactttacttgatctcactctaaaaaatttttatttgcctctgaaaaatgataatttctcaattattagttgtctgatagttgtttaaagcatgatttactattcattttctatttatttattgatttttgttgttctttctttcagttacaagtgaagaacttaaggctgacgtttgaagaatttaagcagtttcctttaaatggtttgtttgaggatgtttcaattgatgatcgttccctggtcaagtgtattattgatcctcgttctgttaggttttatgccctannnnnaactccatttcaatgtaatctatttt

SEQ ID NO: 19834 - DNA, 2347 bp, Cannabis sativa
ggcctaattagcaaggaggcattaccaacagtacctccatgtgccaaacgttgtcggagggcccaatccctcctggctatgtctcagttgtaggccttcccccaggctaggctcatatcattggagtgtcatttgggcctcagaaaggaccttcaactccctcaacaccagaaataggaggatatgaaccatacctctaaaagtttgcctcacaagccagtctgagtatgtccctcctctccacaaggagggatatgatgtgattagctctatccttcagctgaagatgaaaataaaacgagcatatgtaggcccctctaaaagcagtgactgacatatctaatatcccaggcaatgaaatagttatgggagtaccgtcttaccttcgacatggctgtttgtgttacctaacaattactaacccatctggctaaaatagaagatccaaactggccttgttttggaacagagttcacgttaaagaaatacccaatctcatagggtgagggctacggccagcccaactttgcataaaggaaaaaagtatcgaaaggtactttattcctttcgaggtgatctaagtaggacacaacccaaagtagttggcaatgtccctaaaatacgaatgtaagagagtatagctcctggtaggcttatcacagcgaacttctctcacgagtcctccactccttatctcatcaaactttctagccgacaaagacaatggaggggatatccatctctactgctccctccgctcaagaatttgaggcccagtagactcgtccaagacatggtctatcctgaccactgacggatgaccaagagcattcaaaggtcgcttgacctcatcaaaagaacccagaggggttttcaaaaatatggtacaagttttgtaccgcctcctaacgggtacagccttttggacttcaaatatgatatctatcctaatcaaagcgtcttcttcttgactagccacaagtagctcagccatcgattcctcgacctggtcgactcctgcctaaacatgttggggttgttaatcctcctcaacaatactgacccttttgctcgtcattagcacagtgatgtgtgggtcataagggggtgccctacaacatgtttgtttggtccttgccatgatagactcagagtttatagaaatggtaatcgtagtctctatggtagggagatctctagctagtgaagttgctcaaccagtgggcaatatatcgagtacaccttcccgaacaatataggtccataaactagggaggaactgcctccacccttggttcatctcccagatgaatcgaccataaaattcacttcctattcgctccgcgtatccttgatgctagactctaggctctagggaaccactgctaacctaaagatcactcgaggaactactcgaagaaccagctagatggtggtcttcaaagagaagactaagtaaatcttcgtctattcgattgtcacctccccaaaagtcacgcgagttcctttgcatacaaaagataaggggaggtgaccaactagacaaagtgacaagacttagatgaaatacttgtcaattgaacctaaggatactagccaggaagttctatggttcaaagctaaaaatcagcaaagtacgagttccaagtgcaagaacttggatggacattgattcttaagttgttaattgacaaagatagacttgccctaagaagtgtcatacagagtatctaagggaatcaagtactagacaagagttgaacaggctcataaggccataataaagtacttgctagagtcaaagaggaccaaaaactggccattatgtttgcctcaaaggcatgtgccagctagggttccaaggcattagcatgtgccggctagggtccctgatcaaagcaggaactggccagggttccaggcggaggcccagaatcagaaagctccccgaaatggctccatgtgccggccagggtgttctatggatcaaaaaatatattttttgaaaactcgaatatgttcttcgtgttctttgtgagtcaaagagtcaagaatcaaaacaaatctcaacgtcaaatctttttcatcaggttatcacacattatgcatcgtaaagctatcacgtggatcagaatgtggagaagattataatctaacgtaagaatcaaaaatgtaaaaagcttgaactcaataatggttgattcaagaaaacaactagaaaatgggatttgaagagttacccactaatgaagtgttgggaaaattttactagtatctagatttactaaccagtatgttgattaacatcctaaatataaatatctataaaacaatgaaattaaacaca

SEQ ID NO: 19835 - DNA, 2749 bp, Cannabis sativa
  modified_base (2385)..(2386): a, c, t, g, unknown or other
aatacaataaatttagattttgggagttcgtatatgaaactttttgagaattttgtgaatccattatttggtaagaaaaaaaaaaacgtaatatgacatgtaaaagaagagtatgtgaaattatttagaagatgaatttgtgtgaaaaatataaaattattagtgagtatttataaaaaaaaaataataaaaatctaaatttaaaacggtaaaattaccgtttattcttatttttttttttttgaaatctaacatcattcaatgcaaactctttttaatacattaatattatatatattcaattattcaattttaattaaaatattatatattcattttttgaaactgtacaaaatatttttataatactttactattatatatatttaaaaacgtaacactattattatatatgtaaattcttttattattattcaaaaattatatatattttctaatttttagcaataataaatttttagttttaatattttattaaaaaattatgatcatcaatgctactgtatatcattcccacaaattcctagaatgacatctttttcactctaatggtatagcatctcaatattttaccacatcatctatccacctaagcaagcatcctcttttttttttaaccattggagatgctctaaaccttgaagcactaagagcacaccatgacatataccttctcccttgatttcttgttccgaccccatctggaccccataggattcagcggttgaaaaggaaatagccaatttagaaataagttgtgtattgataaatttatgggtggcaccacaatcattcaacaccactacttcttgatcttggatgctgcttaataacttcatagttttaagagaagtcaaccccacaactgaattcaaggagacctcaactaattgtgcttttgtcatgggtgaagggcaaatacccaaaacttctttgatgggattttcttaaagagattcaggctcctcttggataagaataacttgtaactcaacggctttacactcgtgatcacgatgccacttctcatcgcacttgaaatatactccctgatttttctcttctttcatctccgtctcagatatcttacgataccctacaatttttccagaagaagtcactatagaagatggggaaaattagatttggatgttgaaggaactaacttacccatataattagtctcactataattaatctgaagaagtaaaaggtctttagtatttattgtgtatttattgttgacttttgatttggcttggtgagtgtgtgagtgttatatatatatgtgttgaaaggtgtagtgggtatgcttgaatattgtcaaagatgaacgaaacgattgtaaacaatcccctcgtgcattggatgaaattgtcaaaggagcaaggcttttaactcttccaaagtttgtataagctttcgcgagttctcccatcaaaactagtgcagagttgctccttacaaacacaacacaacgacttcaagttgttgtgctaccgacaactgttgtaggccaaaataacgatcaaccctatacgtccagtcatctgggtcagcccttgaatacaaggacagttcaatttttcgagctcgaaactcttgtcgtcttccaccaactttgttgtcgactgttgactggatttttagccaaccaatgcggagtcaaaataaatgagatttaaaccaaaaactaccagtaaatatgaataatgacactagaattagcaattaatgtaaataaagacactagatttaaagaggttcgaccccaaatgtcggtaataacctactcccttgtgttttattgatcagagttataaaatcaagaacacgctcttaaatgcaaaaaataacaatggcagagtcttttctctctaagtactcaaatttttggatccctttcccaggtcatgggtgaccctttatatatgggaaaaggtcgatgcttctctctttaggagacgcgaccaatatggagtcatctcaaccacctgcttggtttttggaggtggtagaagtctaattcttgtgatagtatcctgctatttttgtgggtttataatcatcatcaaacttcttacgggatttgaatatttgaactagccactaatgatgagggtctccccaaggtgtggtatgaccgttaagccctttcagctaatacttaggggtgacacccctaagacccaacatgagaagggtgtcggtggccatctcggggtgacaaccccgagatcccttcaatgttgtgggtagccttggtgtcatgaggatgcactatatcaaccatgtcttacgtaggtggaatgcatgacttgtaccatgagggtgtaggaggtaggggtatacccctagactaannctttagggggtaaggggtgtacccctagactaaccgtttagggcttaaggggtgtacccctaaactaaccatgagggtgtagggggtaggggtatacccctaaactaaccctttaagaggtaagaggtgtactcctagactaaccctttaggggttaagggatttacccctagactaaccctttaggggataatgggtgtacccctagactaaccctttaagggttaaggggtgtacccctagactaaccccatctagatcattgcataaaaggcaggggtagtaatatataccccttagaatggtttgacccccgtaggtgtgcggtgatcatttatcccgtttatgagggtactagtgttg

SEQ ID NO: 19836 - DNA, 5075 bp, Cannabis sativa
  modified_base (4602)..(4607): a, c, t, g, unknown or other
gcttggttgcttcgcatagcttgtcctgaaacaagactgtccgtctcaatttgaacatgttgccaattattggtctttacccaactgagagcttctttaatccccatggcttctttaatttatataaataattagtagaatagactcaaattataaggagtagttcgtcacacaatatacaatatttatcgatggcattcaaaaataaaaatacaaaataaatataaattattgatattaattaaataaaaaattaatacaaatctgaaactctatgaaatcaacatgttgcctaaaaaatagatactttgtcttataatttgactgttggtcgaacaaatacgaaaagttgtctaaattttgtactgagtgtctaaaatgtagacgtcttgtcaaaaaatttgatacggtgtctaaatttttgagttttaattttctctaaaaattacaaatccaacaattttttttttaagattttgaaattggaagctctaaataactctagaaatgagtttaattacattctaatactattaatttactaaaagaatgattaaatttcatttaaaattgaaatttacataaacctacttttaaatatgcatgtgagattgtgaggttgacagtgattgacgacaaggttggtggtggtcgtcgccgatggtcatcactaaagtggttgacgggaggaagtcgttggcagtttgagtgtgggtgagagttactttgttgaagtaaatgaggaaaaaaaaattagaatttattatgttatgttcatttaagggtagaaagggcaatagcaaaaattcattaatgaaagaggccatttagctgaatagttttgagagtacgccacaatacaaattgacctaataaaattaggagtggcaattctattataacaagcgagtttgacacaaacgcagcttgagattttacgggttcgacataatatgaaaattatgcgcatcgtcctcaagttcatgttttataaatttttcgtgtcacgagttgtgtttgtgttagtcatttaaaataaatttaataactcctcacaacataataatactaaaataacaatttaaattagcatgacaagagactctacgagattgacactacacataatttattcaagtcctgttagtgttttataaaattttgatatcagagttcgtgttcgattcaacaatttttttcaataaatttaagacctcaacacgatccgaacatgacatgccaacacaaattgccacccctaaaagtaggctattttgccaatatatataaatatggatatattaataatgcatattattttacatgacatattgcatatcattttctaataatactttttgtcctaactctaacctcgatccaaccctaccctgacccaatcttaatccaaccttaattctggactcaaacttcagcctacctcgtcaatccaaacccaatccctatccgaacctaaccccaaactcgtactctgacctcaactccaacttaggtctaaaataatacaagttaataaagattatttattatttattaaataatacgatcgatattatattaaatttaaaaattgtaatagttaatattaatggtgtaagttcgtgtgtgtcgtgttagcccgatatgtatttatccgtgcttttcaaaagattggtcgtatcgtgccgtgccacaaaaaaatgtgggccgtgtcgtgtcatgccaatatttttaaaggataggtccggtacgggtcgtaggtccggtatttttgtatcgtgctcggattcatgccgtgctttgctcctgccgacccgtatttctttaggccaacctatttttatattcaggtttaaattcacgctttacttttttatatatattttttacaattattaaattatatgtatctttgaaagctttagctatatttatataacttttgaacaatattttataaataatgatataaaaaaattattaatatttatttataaatacttaaatttttatgtcacaccctataaataaattaatatataatctttatttttcatgttttaattatagaattataatattcagtattatatttaagttttattattattttaacttatttataattgatgaattcatctaattattataattaataaactataaggttttttaatatgtcgtgttgtgcttttcagacttgttgtgtgtcgtacttttcggattagtctattcgtgcttacgtgctgtgctttttcgtacttctcgtgctgtgttgtgccaatttgtaacatcgtaccgtatcatgttcaaacttgtatttttttgtaccaaatcgtactcgtgcttttcaaactcatgtcaaattcgtaatgtatcaaaaaaaaaaacccaatccgtacttacagcactacttaatataacactgaattcaatcaaaacatattttacatatttaatacaataagacatctttatataataaatattaatatgttttttaatgaagaaagacaaaaaatattagaatgagtcatatgttcctttcaagttgaccatttttttcttttaattactgtaaatacctattacccattatgtatatataatcagcagatttccaataagtttacttatattaaagtataaatttaagaaacttatctaattgacattgtttatatcttatttggagggagaaaaggcatgaagattgcaacaagcaatgatgtaatattacacttcaatgaaaaatattattaacttaggcccgttcgtcaaccattttaaaaatgggttttttgtttttataaaaaatttaaaaatacaaataaaaattatatttggtaacttcattttattttttgtttttaaaattaaaacacaaaagggaaaaaattttaaaaataaatttttaatgattctaaaaaaaattaaaattactttttttacttttgcttctttcttggtagtcttacttttaagtattttttatttgattttttttatgaattttttacatttaaaccctctcaactattattcagcttgcacttaatacttcatactcaaattttggtagtaaaacccttcaaactactaaaatgttaacaaatttaaggtgttgtctattttttatagttaacagccaacatgaattacttatgtatacactcttgtacacgtgacacgtttatattggtacacataatattattattgaaaaattataatattttttatttttataattttatgtaaggctagagtgaaaggtagataagaaagttaatttaggctcaactcacaccataacatacatatacaacattctctcaaataattcacatttgtattccctcatcactctcctcaacaattcaatcttgtatcatttttttagcataaaacttattatttcccaacacttaacttgttgtaagtattcatttatttttcattgatttttttttttttaatgaaatacttacaacttacaaacattggaataataattttttttcttatcatcacttatacataatcatcaatattttccccttaacaaaattctgacacctttacaaatacataaaacatcaatatactatggtgtaaaaaaaaatgaaagggattttcttattgtttttaaggctcaaaggttattgtatagggtcaaaagaaaaacaagatttcaacattaggctcaaattgggtaaaactaggaaattcacaaataggctaggcttgaaaagctcaatcgatctaaaaaaattacctatatcatatcacaaaatcatttgtaatttattaattttgcttcaaatgattatcaaacaagttttacagtggttgagactttaaatcgaaagtcaaacatgtattcatctttctaaacattagcaaatataataattcaactgatgtgcaattttttttaaaagaaattaagcttgagtagtaattaatcatgagttaagcactcaaattatgagaatctattattttcttaaaattagaactatcacacaattaagaatttcatcatcaacaaaagatgagacattatagtaaaaatacacatcaaacaaacacgagcaatcattatcaaccaacaaaatttcattcaaaccatgctcgctaaaattaaagaaagaaaaactaatataaactaaaaaaatgataaaaaaaaataattaactaaacaactatggaaaaaaatggatagacacgacaatgaacctttggaattcactattttccaccaaaatgggctaacattccttcaattgactctaaatgcatgattagtctttaaattagcctaacatacccaattttaatcacactaatcaataatttaaagaatcaatttaagaatattattacataaattaactatatttataagacaaaatatcgacttatcatattcccccacacttgactcttgctcattctcgagtaagttaatgataaaataaatgatgcttaaataaattgatctttatgaaaaataattttagctttaaaaattgtgcatccacttataattccaaaaaaaatccaaactcttcaatcattagaatttcaattcaagannnnnncttttcaaactcaattttttttttgtgtgtgtatatgttcaatcaacttatcatattacgaacattcaaattaattcatgcatgcaaacaagcaatttttatctcaaaataaatgtgtattttaacaaaaatccactccataagctttattatcaaaccattcttcagtaatgtaattacacataatctaaagatcaataggactttataagcttataatgtaaggctagagtgaaatatagataagaaggttaatttaaactcaaatcacaccataacatacatatacaacattctctcaaataattctcatttgtattctccaatcactctcctcaacaatttaatattgtatctttttttcagcataaaacttattattccccaacatttaaattgttgtaagtattcatttatttttcattgatttttattgattttttttttttatgaaatacttacaactta

SEQ ID NO: 19837 - DNA, 5565 bp, Cannabis sativa
tcttttaccatccttacaggaaacaagggatgctcggtagctgaagttcaaaccccgtcacatggcgagatagaatcatctgactcggtctttttcagttccacaaggaatgtcagtgtaaatcaagtgactagaagatttggttttatagactatgatagaccaagcaactgggaactggaatatgtgagagacatagtcagcaatgctgaattagcactagaagattttgcattgggatatgctaacaaggttatctccccaccaactctatttgatgatctcgagaacgaggagaattttacagaatggaatgaagaggagtgttgctcgaagctcggacgaaaggttttgtttgattgtgtgaatgaatctctggaattgagaagtctgcaaatgttaatcggaacatgctctagaaaaggtaggctggctccaaggaaggagtggttagccgaggaaatccacgaagaaatctcggtttggaaagatatggcggaattgatggtggatgaccttgtggacaaggacatgagcacagggattggaagatggcttgattttgacaatgaagcatttgaggaaggtgtagagattgaaaagggagtgttgagttgcttgttagatgagttggtttctgatttaatggtcttttaatctacccctgttggtgttcttaaactcaaactccaatgggggcttcatgcatcaagttgaaagtctcaactgattgctcttgtattactttgcattgttatccaagtttcagtacaatattttctcttctaaattgatctaaaatccatagtgacacattggtccccttccctagtctctacttgccaaaatttatgtgaaaaatctatttatatgctaccaaatattataggatgttttacaggtcactcttgattttagttggttttttttatgatattgtatattatagttatttaaagtattttataaagttttgagaaattcgtaataacacgcgtataaaataaaagagacacacttgcaacagacagtctgaattttgttttcagtatgttaaattgttttgaatttttcgaaaatttgcattatctcttagataactacaatatatactgtcatagaactagacagtctgaattttgttttcagtatgttaaattgttctgaatttttcgaaaatttgcattatctcttagataactacaatatatactgtcatagaacttgagcatgagtaaaaaccacacccgaactcgcttgatgaagctgatcgggttggacctgacttgcccgtaaaaaataagttgtttcacatagttgagttctacgtgtcgtgtttagggggttgatcgggtgcaagtcaaactcgacaaaaatgttcagtcctacagtactacatagactttctcaatattataagcctaaattgttgatttcatcatataaatagtaaccccaagtatcccaaaataatttgggcctagactagagatagagaagccatttaggcatgactcatcttgtagctcttcaagaattggattgagattgtgtcttattgtggtatggaaaaaagaaatagtactattcttcttgttgaaggttccaatgaaggtgtgttttttgtttcttgggtagtaggagttgtaggaccatgtaatgtaatgtaatgagagttgtccaccaatcaaaccatctatctctatttttaaattgaacaaagctgatttattatgattaacattatctttcctctaaagaaccagcttttttcaggctggagacctcatcaaactactgcccttcttctcagggtaataaggcttttaaagattcgatttgtcactcataattcatcaccaccatgtcttataattttatttttattttttattatttatttttatggtatcaacatcaaatccaagatcttggactagtgaagacaagtgtgacatcattaaataacattgctattaggtaaatggtgcaatattctataagtgatatcttataaattgtgagtgattacttatattaaattatactaatagtaatattacacatcacaatatcttttttattacctttttgtatattcatgatctttataataagctcaaagttattagtattaatcattgtaatagatcttataatagtattgctcatgtcttggctaagcttactttcactaaaagttggccaagcttactttcactaaaagtagtagtttggtttgatagcggatgctatctttgaataaattctcgccccacatttttagagtacttgttacttagtagttgaaattttttcttaaaaaaatatatttttaaataaaattatataaaatctaatactaaattttactaataaatactttgtgatattaatattccttttactattagaataattacattaccacattattttttataaaaaaaaattatatttttaggattaattttttatatatatatttttaagattttctatagaaaatgaaaacaataaaaaaaatatcataaaaataacatgaaaataacattcaaataatatcaaaacaataacaaaaaatcaacaataaattaacaagattacaacataaaaataccatattttttataaatttcatacaacagtattttaataatttttttgttatttgtatgtatttgtgaaatatttttttttactatttctctattattaaaccgtagaattagtacatatatacataatacaattatttttaatttttttttaacaaaaaaaaaaaaatgcatttacatatctgtctgtcaccttatcatgaatatcattttattgtacaataacaattatgtttagcgttttttataataacaacaagacataattataattattatgcattatggtactatagttttctgttcttgtctgaaatacacctttccttttatatatttacatataattaattataattgttcaaaacaaaattattatagggtgtcacatttatccatgtggtacggctatttatgtttataacatttgaagatattatatctaatttttatattggtttacattatatttcttttttaaaaaagaatctaaatgtaatttaaaaaaagagaattcaaaatagttaagttgagaagaagatacacttacagttacaaatgaatgtttaaattgtgttttggtaaaataattttttctatatttttcgaaaacagatggagtggcttttataactccaatacgcattaggattattcctataattcgtaatttatggttccaaactctaattaatttggaccaaagtatttgagacaaaactaaatgaatttggtgtgaatggtttagtcaatctagaccgtttataattctgtagttcggtcattgttttaaaattctcggtgaaagttcaaactaaatcaattcgtatatttcttttatacatacttaatatatatatagttcggtcattaatattgaaaaacaactttagataaaatattgatattaacttaatattatttgaagaatttttttattgttatttatgtattataaacttattaaaagtaaaaaaatttaccaaaaaacttaataattacttaaaaaaaattacaacaactacaaaatacaaatcatgatagccaataacaaattagttagttataactttacttttctgtgtcttgacttgtaaccaattctgttacaagagaaatcttgtttgtacaatcactataaattaaacgtttcctcctcaaaatgtttaagcaagcattctaagttctcaaggttcttctttcatctctctctgttttcctttttttgtactctgttttgttctttcaaaccaaatcaatccatttttgagtagattcgtttagtttgatttggtttaatcatttaattggtatgatttaattttaaaatttttcaaaaaaatcgcaatactaatttagtttgaaaaaaataaaaattcaaatcaaaccaatctagaaatacccaaatacacgtagtcatatacgaaattttgaattatgatttatgatttgaagtgtgaaaaataaaaatgttactatggacagagacatagtcggccgaaacattgaacagcttggactactgcacaagatcttttatattagaagtccatttttttttttgttgtctcaatatggttctaaattgcctattctattttttttctttgttaaaacctaaatcaaatatttatttgttaataaaatgtccaattttaatattgtgcccaaaactctcaaaccgctctagccgacctaaatagagacaaaagtaatatttctactataatttaaaatttataaattttttcttatattccatctataatggtacttaaaaaatagaagtattaatgacaaaacattatttaataaggatctgtaaacttcaaaagcctcattattattgactagatacagtacataaagtttgtagtaaaaattaaacttgtttcagaacctttaaattctgcactcatcttttaacagagaaaaacagcttagttgccaataataaatatgagggtcacctttcacaacttaaaccagccataaaaaggtgaagccaatttttcatgatccagaattttttgccataataaaagaaaatcataaaaataaataataatattaacaataaagtcttatgagactaataattgatgctacctaatttaatagaaacaaaaaagaaaattcctaaagatcaaaaacctattaggtggaataacaaattatcaagaccagtacatgagctaagggactaaaaaagtctagtgtgactaaataataagataattaatggagaatgttatcaaagatcacatcatgcaaacactatacaaaactaaacagaaaattctataatacaccccttgatgtacttatatttattttggcatttaagataattttgtagtttaatttttttccggtggttatataaactgtattatttaaagcatcttgcaaaaatttttaaaaaaattaacacataaaatatgattcaaacaattaatttatgcgtgtataaaataaattatttaaatattaatttctatattgtaaattaatttaatttttttaaaattttacagtatgtttcatagtctattttttttcttccaaaatgtcaaaatataacaagtgcatcaattaatgtactccttccaaaatgatgttttaaataaatataacgtacacgattattaaaaaaaaaactatttttttgtcaaaacgcctaaatatataaaaagtgcaacgatgtactcttttcaaaagatgcatgagagaaacacaccctttaatttagaacattgttatgaagtgttgctctataattagttaataattttttataataattattaaaataaaataaataaaactcgatattaaattataccaataacaatattatacttttgtataaaccattttaacacttctctttaattattattggggaattaattaatgaatgaagaatttatatccacaagattag

SEQ ID NO: 19838 - DNA, 5030 bp, Cannabis sativa
  modified_base (564)..(569): a, c, t, g, unknown or other
atgctgccatttttgcctctctcttcaaacatggctccgggtgtgtggtgaggaactcggatggtggtttgatctctgcctttgcaggggttaaagatggttcagtgtccccggaattggctgaaatcattggtattagggaggctataagttggctcaaagaccatgcttccacacgggctattatagagacggatagtcttgtttgtgttgaggctattcggagtgaagaaactttagcctctgcatttgaattggtggttgatgattgcaaaaatattcttaaaaatttgttcaatgtttcaattttgtttgttaagcgttctgcgaaccgtgctgcgcactatgttgcccggcactctgtttctttagctgaacgtgtgttttccattaacagtgttcctttgaatcttatgtctatcttggaaagcgattgctcattttaataaaaaacacttattcaaaaaaaataaataaataaataaatatttattattattattattattattacattgatattttttggtattttaattttatttctagtgtaactctatttannnnnnacctctcaattagaatataatttatttggtcccaagtgtattcttgaataaaagttctactatatattaaaaaaaaaattgtttgatagtaatttttttaatcactatgcataggcgtgggttataaggaaatagtcaattgcttaaaaaccaacccttccccaaaaaaaaatgaattgtaccaatcacaataatttttttttttcttttgaaagactaccaatcacaatacttgatgttggactctaattccaaataacaatgctctgtagcatgaatttatcgtcataaatgggactgatgaagctccatttcaatgaaagattaactccatttctatgagagcttgtgtctgaaagaacgtttcagattcttctagtgttcagaaaacgatgataaaatattacacataatagaataatctttggctcatggcctcatccatacccgcgagaagagatacatgacttcctgtacatagcaacaacattcctatctacaggacgactagtaagaacaaccagaactaaaaaggctaatctacttctacaagtaacaaactaattaatactactattagggtcacaagggtacataacctagaaagttaatataggtacatgtcaagagttttgacataattcacatatagcatcctaaccaagtaacagcatgtccaccttacatgtccataacatcaaaaatttctccatcttcctcgtagcgtagatcatcgatgtggaattcatcagacaccatgttactacagcatagagccatgaggagataagcctcaaaagaatatcccaaatgtaataactgtaaaacctcaaaattctaaggagtttgaaggaatgtttatccctaccttaaacagcagaatcggaagctcacaacccgcttaagttttctattatagaagaagaaattgaatgaccatctgaaaggagtacaaaaaaaagaagaatcgttcaccggtgtggtcatataacagcttgtagtatgtcaccatgagatagaaacttacatagcccctctctcaagaaaaggatctccatcagagtctggactatagcaataaatttcacattccgccaatttcacaacctgtatcaaaaatggcatgaactttcgtcccagtacgactatcataatgtactttctgtatattatactaacctcatctagagccttgtacaaagtctccaacaaggagacaccctcacttgtttctgtccattcctggttttagattacacggaaaccaagataaaatgcttattaggaaactcttaacagtttccagctcatgatgaaaaaaataaacccagtatagcgcatgcattaaacaaaggaaagtacaaatggagaagaagcaaaggtagaaaaaaagaatacaatgaaaggcaacaagagaaaaatatctttcaacaaaaatactaacccactaaccctatgtttggaagttggattttagtgaggaaagaaaaagttaaggaaaatgtaggagaagaaaagtgtggagaataaaaaaaatatcaactttttatgtttggtgtggaaaatattgttaaatcaagtttttttccatacaatttttctttccataccaaacatgagaattgtttttttcactacattttccttacctttatctttcaccgccaaaacccaactttcaaacatagcctaaagcaattctataggaaaaaaaagaatacagaaatgtacagaaaccaaaagccagagaaattcatctcaaatgttaagcataataatattttttagggaaaaaaaatggtataattataaatgtgcgataaaattattctagaatttttaatacctagaagttcgacaacatagctttaacatatttgacacaacaaatctatttcttttattgagcatcgaaaacctaacatcgtggatttcttttattatttaccaacttctacttttctcacataaaaatcatttcaagtatattctcattttaagaagttgggatcatacatgacaattccaaatccgaatagttaagcatgtctacatatgcatgcagtgcatctggagagaagcacataaaataaaaaatatacaaataaaaataccttggatgcttcaaacatataggtatcaaaaatctgcttaaacccatcccaggtttcctctgtgaagaactgatgagcattcatagcactggaaaataaaaaagaaacattgaaaacataaaggagccatttctcaagaataagaagaagttaacgtcattatagcaggcagcaggatgtataccctctcatcgaaaaagcaccagaactttaagaaatttttatgacagaaataccacaattcaactttgggaaatggagagatttgaactctcaactccttcaagaggaaaagtgtcaaaactgtctgtctaacctcttgacaacactcccagtacagttagaagaggatcacaatgcgggttgcaacaccgctcaataagctgacagtatcattacccgtgatcctctaacttagattcttttcaaagaatgtgtcattgatacaacataaaatataaataaagcaattcaactttgggaaatggagacttgaacttgcagctcctctaagagcagtagtgtccaaactgtctgtcacacctcttgacaacatacccagtacagttgaagaggatcacaaagtgggttgcaatgccgcccagtaagctgacagtagcaatacccgtgatcctcttatttagcttcatttaagaaaaaggtgtgattgatacaacataagatataaataaagcaattcagcattcgggaaatggagagatttgaactctcagctcctctaagagcaacagtgtccaaactgtctgtcaaacctcttgacaacactcccagtacaattagaagaggatcacatagtgggttgcaacgccgcccaataagctgacagtagcattacccgtgatcctcttgtttaggtttatttcaaaataaatgtgtgatttatacgacattcggtatgaatacctgaagtcataatctggatacatatgatagagtgtcagaaccaagtacaccaatgtctttcggctgtaagaagcaaatacggaaaaacttgttaaatacaatacaagaaacctgtaagcatgaatgcattttatcctatcaacaatcatcattcacgaccttgatctgctcaaaagaaattctgctggcgaggaagagtctgtatcagaagattttccaagatgatcaaggatctaaaacaaaaaacagcattgacaaatcatcaataatcagcaatttgaaatcagaaaaagataatatgattacagcttattggacgtgaagaatacagccatgaagcatcaaaatgaagttcttttcttttatataaacattaatagtgaaaatgcctgtattgaactcaacaacccaatttttcaaccaagaatcggagtcatttccttattcacaatacaatctacaaaggtcacgcatatacaagttaaaaaatacaaagttggcttcaaccaaacaaacaatacagatattaaaaaagaaaacaatgcacaaataaatgagaccaattggcataatgttaagaataagccataaagaaatcatgtgtgctgattttacctcattttccaggctaaaagacaacttcttatccgttcccgtgtgtttgcctaaacagtaaaattaacaataacattaccaatgtaaataaaagaattctgtttcaaacaaatccaaaaatttaaataactcacaggaataagcttcaaggcaacctttgatagtacgctctccaaaatttaaacaatgcaaaaatccatttaatctgaaaacgaatccgtcgttaaaacctaaaagaattatttaatgaagaaaaactactcgaaaattacctttctaatggagtgtattctagaaacttcatagtgtcccagatattcgttaacgctaaccttaacaactaaaagtgaaaagtgaattaaaattgtacaattaacatttaaatttgacaaattcttcgaaaagtttgaaactgcgaaagcaaatggaacatagatgataaggaatgagataaaattaagaaactcaaattacctcggagcaagcccttgatagattgggggtggtgcgaaattcgaccgaatttgagtaattattgaaatttttgggatcgggttggtttcagcaagccctaaattcgaatattcggaatatgatttgattttctgttgtcattgatctctattttttgccacaaataataaataaattattataattcaatctttatatataataggggtcttatgcaatccctcacatttacacacctcagcctatttcctttgttttttctttttttttttgttggggtaaccgataaaggttaagataacaacggtaacaaaagttacacagaaggaggggg

SEQ ID NO: 19839 - DNA, 4706 bp, Cannabis sativa
ttttttaagaatatgaattagaaagaattaaaatataaattttatataaaataataattattaaaatggagtgccttaagcctttaaaaaattttagagtataaataaaatttcttattatacaatttatttaaataccaattttaacctattattctcataatatcagaataatacaactacatacttactattttcaccttgaaaaacacaattttataaccataaaatgaaaaagaatgttttgcaaaaaaaaaaaaaaaatgaaaaagaatggcaagtgccaagtgcacattttatttttaaatgatcaaaatatcccttaaatagaatataattatttaacataataatattaataaaaaggaataaatattgttcaggttgtataaaaatggaaaattatttttcttctatgatatacaaatttctcttcactataaatagctgcactaagataaatggtaaccttacactctacttatttttctagctgatttttaagaaataagcagagcaacaataatttaagatgataaattttgtgtcatctccccaagtggtaccaaaagctcagacaatgattagcttttgctgtatgaaattgaaactttacttgagcttgaaagatcacttaagatcaggatcagttttgtagtacacaacatcaccagtgtcactaacatagtgatcttgtttcaagcttctaatcaaagtacctatcaagtgaaacggtagaggacccgatttcttcggctctctgtagtatttccctatcactggtttagctgcctcagtctgcaagaaaagccaaaacgaaaaacagataaacaatcagggctctgttggtatttagagaatattgctttgaatatcatgagtagcataattgttaccaaatcataggcaaaaatacttactgcttccaccaagtggtagtgaggaatttgagggaaaagatggtggattacatgagttccaatatcatgatgaatgttgttaatcactccataatcgcgatcaagtgtcgtgagccctcctcttaagtaactccattcctaatccacacaatcaatatatcacaagaaattaacatctttgaaaacaaaacatttcatgtgaagatgaaagactttcttagataagattttcttatgttttttggcctattaaggaaataaccaatatcttgatttgacccctctgaaaacaacatatctaactacttaaccatacctttccgcggtaccatggtaatttttcttcatggccatggtgatgcaagtatgtcactaaatccagccacatgacaaaaacctaaacattaaaacaaagtgagatacaaatccctttgagagttttgttcaatgaaaactctatgatttaagatataattacccaataaggaatgccatagagcttaagcaattgaataggacccatcacaaagcccaaaccaacaagtatagcagccatagctgtccaacataaagtggaagtgatcacatctttcttctcacttggaacaaacaagtcactatttggatgaaaatgggaaccagcctttcctggacttcttccccactgtgcaaagaaaatgatcaattaacaacacaaataatgataatcaatctcatggctaaattgatcaaccaagactattataatataaacttacgaggtagaaaggataagcaagcattggaaatggtagagtaaatctcaaactttttgtgatgttatccagtttcctgtaaattctttcaggtaactgcaaaagcaatatggaaaaaatttatgaaatgggcaaagaagcaagcaatgaaaattgaaacaaataagaggtgaaaacaaaatctaaccggatgccatgattcatcattctcaacatggccatggttttggtgatgagtcctatggctgattctcctgaaaaatgaacattaacataattaaaagacatatatacatacatacatatatagagatatttttggtttaagagcataccatccatgataaggtacaagaattgaggaatgcaagagatgcccaactacactgttcagcttatgatcgtttgaaaagcttccatggccactgtaaaatcaaaaacaaaaacaataccaattcaaacaatagccaaaaccatgatccatccaattgttaaaagagaaagataaagaagaagatgaaagtgaaggtagagaatattaccagtcatgaccaagaacaaatagagcccaaaacatagtcccctgagcagcccagtacaaaggccaaacaacccagttgttaatagaagcagcagccgcagccaacccaaatatgatagccacatctctcaccacatagctcatagacttccatggatccttaacccaacaatgttttggaatagcagcccgaatatcagccaatttgaaaggtggagccgagccaggatcaaatttgattccctcttcttcttcttcttcaactccattaacgatttcctctactctctctcctctgtcttcctcttctacaaaagcaaccttcaatggggcgctcactctcacctcaaaactcctccttttcaaaaacccagttgagaaattcacctttgggaatctaagatccgccgagctcttgttagaactcaaaaaccgagtctttgttgttgggttggttgaggtaatccctgttctgggtcgaggaaaattttgagggagtggctttaatccacattctgacaaaacccaactcgccattggagaagaaaaagaagaacacaccaggatttcagttcctgggtgtcacctcaaaatcttagacggcaaaaaacttcagagaagaagaagaagaatccaaataatatatatatatatataagaaaataggtttgcaatgtaaaatatcttaagaatatttataaaagaaaaaaagtgaatattttttaattattatttattattaaacggtttcacatttgcctaacaataaagactagaccttttcagttttcactattcgactcttgaataaagaaaagagaagactaaaattttttaacagaaaaaactttgaattttgaagtatggtttgttgttgttgttgtggaagtcgtttggtatttatataggatgggtttgattttatttggtgtatgattcatatgtgtttctttttctagtgtgaaatttggctcaacttgttgtgtttgtggtcattgacttgtttctttagagtaagttgaaaaatggtgatccaatagtgttggatttagaggtcggtgactcccataagttaaccattttttttgtctaatcaaaagatttgagagattgggtcaagttggatctaatactctctcaagcaagaccattttaggttttttgataggcacgaaattagcactagcacaacccgacataaaaaaaaaatgtacctaaacacaacatagtacaacacaaaaaaagaaaaaaaaatatagatttaggtacaatatggtataagaaaatatgttggtttgtactgacgaaactggagaaaaattacagttttacaaacattaagtacctatgtcgttaaaaataaacattgaatttatgtcgcttacaaacttaactttgagtacttatgcggctatttaccttaagtattaatatattgttccaaaattatgatagaataaaattgaactagatcttctaaaaaaaaaaaattgaactagatcatatttatatctattctatataaaatgtggctatgtagtaaaatttttggtttaacggtattttttaattttttatgttaattttaaccgaatatattacttaataaaatattctttattagttttataatattattatatatatttaaaaataaaaaattatgttaatattttatataaaaaaatttaattttaatttaaaatacttaaaatattgtatatatttttaaccacatttttaattttgttggttgaactttgaattaaaagaagagataatttcactcaatcaggcacacaacaattcaccataatatcttacttgaattttattgtgcatataaaatactatatatataatcacacccaaataacacaccaacctaactacaataactaaaaaaaaattctcaaaagaccaaaatcttaaatcctatttcaaaaattataaaaaaaatatatattatctaattaaaaaaaatatacatctatttgtagttaacattatctaattaatttgtacatatctctactctaagatcataaccaccaaaaaataatttccttttttggatataagtatttttgacaaatacttataaaaaataaataaataaaattaaatatgaacataaaatgaaacaatagcacctattaaaaaaatgacactacataaaactattttgaatacctctattgaagcattaccttatacaatatatgaattatgatgaataaaatatgttagttacaataatagttattaattaataaacatgcactcaagaaattataaaaagaaaattaaaatatttatgcaaattagttagattttttttctatttttaaacgtgataattaaattaaaatgagataaatattattttgtatttgtgttttgcaaaagttattaattagacttattgtttttttaaatgacaaaatggatcctgtattttttaaaattgtacaaataggatcttgaact

SEQ ID NO: 19840 - DNA, 4346 bp, Cannabis sativa
tcatgcttgttgtaacagtggcgggaatagttgcaagagtatgatttaatgcttcagaatttacatcagtagctgtgaacaattcactaaaataagaagtgataatttcagtcatgccttgttttgaactgacaacagtaccttggccatctaccaaagattttattctgttatgttgccttcgagaggaagcataggcatggaaaaatttggtgttttgatccccattttgcatccaatccacgcgagatcgctgctgccaatacgtttcctcttgggctagcaaatcgtccaacacattttcatggtgcttcatattttgtatagcagtagggtcacggtcagtggcgttattcaatgctgcaacagttttttgtgcttgttttattttctttttaaagctaccaaacttctgctgatgccaaagctgaagtgaattcgcacaccttgtgagattactgataaaaaccgaggctatgtcttcattggaatcctgtaaccagtgttgttgaatcaaattagtagcttcttcttcttgcagccatatcttttcaaagcgaaatctgtggtgtcgtagctgctgctggtttggagaattaattggcaaaacttggacagcaagggcacggtggtctgaacgaaagtaatccaagtgttgagtaataattggttgaaaagagtcactccacagcgagttaacaaagcaccaatctaaccgttctttgatcgcatcaattgaatgtcttcctttaatccatgtaaactgatcaccttcaaaagcttgctcatgtaaatggcagcaatctagaacatgtctgaacttatccatctgagcctcattacgcaaagcaccacccgatttattattattggacaggatttcattaaaatccccaataacaatccatggaagtaaaggagcaacatcttttagtctttccaaaagggtccaagtaagatggcgattatgagcagcaggggcaccataaaaagccgtaaaatgccatgaaggaccatttgcacaagccatgtaaccatcaaagacatttgcattataatttaaaagggttacatcaacatcatctttccaaagcaacattagaccaccactaagaccaacacgagggacttcaagtccattattgaaatgtaaagcattacgaaaacgagaaatacaattaggtcctaacttagtttccataagaaataacacagttggggattgctcttttacaagcaatttgagatggcggaatgcactcgggttccccaaacctcgagagttccagcttatgattttcatggctgcctgcggagctggtactcagactccgcaatgttgtcgtttgcaccaatagaatccatttcatcaatagaaacatcaaggtgagtttcgttatcaactgacaaaggtgtaacgaataattgagtttgatttcccctgcatcttttgagtgtttgcctcagacttaggccatccgaatgcctcttggtaatacgatttggtgacaaattctccttaccctcagcttgttcatacaattaacttttttttaataaaaatcataatattattaagaaaattgaaactagtatatatatatatatatatattttttaaaaaaatcatatttatgtaatttcctaagagaaaaaggcatattttgtataatttcgacattaattaatctcaccactatattttgttttttaaaaaataaataataatatatgaccatttacatatataaatataaaggaaattgctgggttttcatataatttgtgcaaaatatagtttaatttttccaaaaaaaaaaaaaaagtgagaaaagtagttaaggacagccagttacctgcttgggtaattggttaccttataatatttttcttatatttttttaaacttttttttaatatatttcccataaaataattttattgaaaaaagatatatttttataaacttttgccttaaaattataaaaacgaagattctccaaaagtaagactggtttgggctattatggatcccttaagtccaggccccaaattcctttaaaaaaaatccaggccccaaattagagaaagttgaattgattttttaagggtctaataaatgacaattttactgaaaaccatttgtcaagccaatcttgtagtattttttgagtttgtctattgcttatcataaaatagaataataataataatcataaggaaagattagcaaaattcaacaaagacaagtatcaacaaatcctatattttgactcaataaagaaaaaaaaaaaaatactatacgaagatcttctaaataaaaaaagggcaacggtataaatcagaaattggaaataaaatatggaagtgatctgaaataaaccatacaaaaaagtgtttttataaataaataaataaataaaatgtggagtctgtagtacgtacgtaaacaatgtcatattattctttgacgataagacgtattaattattctttataaaaatgccacactaaattgacctactacactttataaccaacaactcttgaatcttacattattattcatcaatcactaaatactcatttttttcccattaatttttcttaaaaaaaaaagaacattgtcaagtcagaatgcagattgatttattctaatttttccactttatcccaaaatttatcccatgggatacaaaagagtcaaagaaaaataaaattcttattaacaaagtggaccacctcaatagaagatgctcgaaatctaaatatatatatatctcacatgaaccaagctgttactttatatatttttataaagtccacactcacatcaagtacacctaccttcacttcctctcattaattctacttttattattattattattattttatttttacacgaaaaagtaaaagatttaatttttaggccgaaaaggaagcgtttcatattaaaataaatacctttagccgttgggcaaattgacttgccaaattggaggaagacttcacatttttttttatcaagaaaacaaaccgccgaccaagtttgactacatttcgaccgccacacttagttttatcgcactatatgtgtctcttttcctcatcaaaacacaatcaaagtacactttttttttttccaaagaagaaactcgaaaaataaattcaatattaacgcatatgaaaaatattacttaatggtgtttgatattacttaaatatggtgtttgatattaccaaaatatgttatatatggtgagtaatttaatattaagttctatatatattttatataaaaaattgttcactaatctttagggacggacccacttgtgttaatggggctatagttcccattaataaaaatactattttttaaaaaatttaatttaatttttttaagggtgtctacacatttagtactctgtgttttatctaaatacaagtttggtaccctgtatttttaataatgcttatttggtaccttgtattttacaatcatacctatttggtacccttaattcaattttttttaataaaatttataaaatacaatcaatagtctaaaattttatgaattctaaattcaaatttatttatttgattacatgacaattgtttggataaattaataaaactgtattgattaaattttattttagggtaccaaatatttacaatttaaaaatatgaggtaccaatttaaaactgtattttattttaaaaatatgtacaattcaaattttattttatttaaagtattattgaaaatataaggtaccaaatatattttggtaaaaacactaggtaataaataagtatattctttttttttttaatttaataataatagactaaaatagtaaaaaagttccacctaataaaaataccatcttattatagtgtccaatacttgatttttaataataataataatcatgtgtaacgcatatatatgagagtaaggaaaaggtagagagataaaaaggagaaagtaagtaattctttttcaacattatctgtaattcttttgataggtacattcttttatttttgggtacatagattttgttttgtctaagttgtgagtttgaaagtggactttgagagttgagcttccacaccttataatatgtagctgtgatttaggttaaatgatagattataggtcagacgttgcctaaacccgcgtgaccgtgtacacaactttttcacctactttgcctaattccaacttaattttatctttaaatcttacacaaatattatattggattataatggtataggacaagtgaattattcatgggaaatttgattttctatacttagaaaatcaa

SEQ ID NO: 19841 - DNA, 1605 bp, Cannabis sativa
aatggtacaggtgtatggctagtacattgccacttggatgtgcatttgccagttggtatgtccatggctttcgaggttgagaatgggcccactccatcattaatactgcctcctccaccgtcagatctacccaaatgttaatcttaaaaaacccaaattacttctactttattactttaattgctaatcttatttatgttacttcgaaaataaaatattgttcattttctcactattcttttatgtataatgtatgttcctgttgtattgttttaatcaagtttgttgtttgaataagaattttttttcatcactttttttttttcttttttaatttaagcatgtgtagagaagcaattggaaagtaaaattaagagaaaatatatcttttattttttttttttttggcaaagagagattcattcaaaagggcactaagtcaaagctacaccatagggggacaacttccaataattaaaacaaccaaaaaaactaagtagaagagcccatttggcgatagaatctgcaagaccatttgaagatcatgaaatacaagtgaaattgcataacaaaattttatttaagaacccaaatgtggttgagcatcaggattgattgccactcaggattcactccagagaatctataaggttcttgcaatccaaaaaaaaaaagagatgtgacttgcactcgaagccataagttaaggcataaagcacaaccaaagcttctacttaaaaagaagaacttgcaataaacaccttagagtcaactttaataaagtagccattgagaaaaaaaaaaaagaaacaccccaatatcagcttgattattaaccaacaaaccatccacacataccccatgaacacctgctgcaattgagagatttgagaatgaacaacagactcagcaatactcatgctgaacagagatgtgctctgctagtaattagtcaagaaaactctccaagtctcttgaagattgtggattgcaccatgggaaaatcgaccttgtgacctaataaatgaccatgttcctttgttcgcaaatttccatgaaaagcacaagctatgaaagcgagggaattatgttctttcaaggaaatatcagctttgtgatacttgattttcgaaatatcaaaaaaaattaaccttgcgattttgaccaagacttacaaatgattaataagttaagaatcctacttgagagtctcatggcatctttaggagacttgaaaacattgactaaccacttggtgtcgcgactcatacacccaagtgtgcccaaactaagatttatgggcccgcacgaacatttttaccctagaaacctcaatctgacaagaaaaccaacaaatacttaattcatttaggcataaaaaggtttagacttgaacataataaagttaaaattgcacaagaatcttatgcaacatgacctatgcgaccactgccacatgaagatggtagtgctctcctttttttggcgagcatgaccacaagaagatggcgattctcgctactcacaaaatatcaaagggaacttgtcaaattgtgttcccttaacatccagtagtacaacacaacactacaaaaaaaaaaaaaa

SEQ ID NO: 19842 - DNA, 3848 bp, Cannabis sativa
aacatgtggaagtggaactccttcaactatcaggtattaaaatgaatccataccagaaattccaaagcagcaacatgtggaacttgaagttcttggactataaagttgataataatttgatattgttggaacttggaagaatagtgtcacatccaaaacttttcaactcttgctttttcaccctttattatctacatactattttaacattgagatcttctgccataggacagccaatctccaagaccaaagagtccaaccatcataatcattagttgaataaattgtggtaaaaaagaagaaaacaaagtggggaaattatatcttggacaatgctaaaaacaaactcaaaaagatcacaatgacaaagaaaaaaagatctatcacattaatattattgaaaaagatttataaggctcttttggctcccaccacgtggcttaaagatgacaacttacatagagttaaaaacaacactgattggtgaaaacatgggtttgctgttaagttatgtaatgctgataaatgcatggagttatcaatgggtccatatactcacatgcaaacactctgtgtttgtggttgtcttcatatatactcaagtcttcatatcaatgaaggccaataattaaatatcccaaacaccttatattattgttattattattatttgacataatgcaatttctgtcagacaaaacttaaacaagtacagagctcaaaaggcaaatttatctctctctcattggaaataaataattatctctagtactccaaattcatagatatgataacaaaaataaaagaagaggattatatttggcactttaaacagagcctaatagcggcactttctagtttccctctattaaagtggattaatagataacaatgtaacaacatttgaggtaaaaaaaaaaaggtaaaaaagtaaataaaaaatttacactttgtcaaatattcaaatttgacatttgggggagggggcaaatacaaaataggcttttgttgtaaacagatttaatgactgcaaactcactcactcatcataatgctataacaataggaggaagaaaaaaatgaaatattatttttcttcctttcttttttaatttttttactgttttttttttttttacgaaattaaaattaacattgtactccagtacggcagttaagaacaccagcaccagaagtaagtgagggaatcaaggaagaggacttagcccctaaacttgaggctctggcatagctggaagcagctccagctcctgatggagtgaaataagctccattcaataatagatctccttctgatctccaattccaatgcttccatgaaccagtgtctgtatcaactctctttgtaacctgttcaaaaccaaatcaaatccattaaaactgcttaaattaattcaacacttgtaaagtaataattataactatgtatacctccttggcaaaagggttaacaggggcaagatatctgttgccttggctgttaatggtggggttagcactaccaccaatagcatacatctcccaatgtgtgtagtcattgtttaccacgtggaaatacccgtgtctacatctgcaaacaacaataaatttggtccccattaataatttcatcacaataagtcagataaaataaaactttggttaaattagatttagattaagtttatttaccttggcattctctggataagtccctcaccaaaatgattgtaagcaatggtcacttgcatttgtttgtctcttgtgtaagaatcactgtgtcctaatagtatgacctgttttttttttatcaaataatttagtattttatcttgtatgattacttgaaataataattaaggaagaaaggaaaaattagactgacctcattgtgatgagtgaagtagttgttagaaatggtaagtgcagtggagcccattatagcatccacaagaccatcagcacagttagacagagaattatgatcaatccaaatatgacttgatccaaaaatggatatggcatctccatcagccattgtcctccaaccataatgacttggtgagcttctaaccatggcattaccagtgggtttgcaatcatgaatatgtagaccatgaataattacattggtcacaaattggatagtaatacaagcaccataagcaatatgaacattcacacctcttgcatcaatggtcttaaagctattcattaaaagctcttgtttgagtgtgatgaccatgtctcttttgaacacaatccacaatggtctatcttggatgaccgcgtgacggagtgttccgggtcttgggttaacagggtcatcgtcgcgagggttgttgacgacgtagtacttaccgtcacggccaccaacggcgttacgaccgaaaccaatggcacaattggctaggtgtttacgccgtaaatgccaacggcggtcgcaacgccagcagtcgtcgattggattccctgttccacatgagaaatatcccaatttccttctttccgtgtgattgcggatattcctgaaatagattcaaacagttgtttatcactaataattgaagcatgtagtagaacatggggtacggacagtgtttacggtctatacggagagactttgactgctttaacctttttttgtcgaagattttcattttagagtaataataatttaatgctaaattttgaagaagagaattatttcagtcttgtacagaacaatggctgtgtcggtggagactttttaaagggtcatttaatgaggccatgctggtctcgttgaagaacatagttctgtcagtaaagccatattctcagaagataaaaatgcaattttgtgatataagaaaccagatctgtgattttgtaactttttaagctattatatgaaatgatggacaggctggtaattgaggggccaatataaagtagtatgccccacttttctcgagaataatacacaaaaatggaaatgggtgaaattttttggcccttgtttagaaactacgagagttagtaacaaaaaatgtgctctgtttaagaagttaaggtgagtaaacttgaaagtattaatggagattagaacaagttcattttcattaattagacaaaaaaaaaaaaaaacattggattccaaggtataatcaatccatttcctaatttttgattcaaaatatgatggtgtagcaatgttggtaacaccaaccaaaaatgttgttttgtctatccattagagaaaactacatgtaccttatttttcactaaataaatatgacatgtggtgtaataactacacaaagaacattttctaattttcttataagcgtggaaagaagggaatttgaaggccagagcaaccaagtatttaattcttagaaaaataaggatgaagagattaaaaggacatgtgtggtaggagttgatactttcaatctcctattacaatctcttagttagtttttgttcccataaacgcatgctagaatattttttccatttgaatagtttacagtgcagaatataagtttaaaatttttttgaacatttggtaatctcaggcgtagaaataatctaagaaattgtaatagagattgtaattactaattctaataataaaaagttgtgttattttaagaaaggaatgagatttggatgaaggggtgtacgaaaatgacaagaagaaattaattgtaaagcgtgacgagcggatctggagagacatgggcatgtgggtaaagagagctggcaactaagaatcgaagagagaatgtgattggttcagaccaagaacatgggtgattgattcttcacactgtgtcccaaaaggaagttaatctggttat

SEQ ID NO: 19843 - DNA, 6820 bp, Cannabis sativa
atttttgtaagttttctttagaaaaaaataaataaaatttttgctcgttgaactgacctttttagagttttaccccattttttttttctagttgcaaaaatctctccgaatttacgttgcaaataatcctctctaattacattcttcttattttttttttataataatttggttaggctattagttatatgtataattgtagtatatacgtttatttaataactttaagctacttaaaatttaatttaattgacattaaatatacaaataatagttctaagaatgcacataagtactcataatttaatgatagactgctaattatgtatttattttttgtcagggttcttgaattaggttagattaacgttatgttaatgctacatcaaattgtttaaataaataaccagattgcaactacatgggagacatttgcaacgagctttatggtttatggagaaatttttgcaataaagaaaatttcaaagggcaaaactctacaagtgtcagttcccataggggagggatataaatcctatatattttttaaaaaaataattgattgccttatttaacattccaagacaattccatttaaaaaatactttctatattaatactattattatataattttgggtaaataatattttgaaccctctgttttgttaaataataaatcagactctgtatttttcaaaatagtattaagtagtacttgtttaccgagatttttggcaactaaatatttttggagcttaagaaagaaatagtaatatgaataattgaataacaaatatgagatttttacatgattcaggcgttaactatccttagtcttcaagtcaattttattaggatcatcgactggtaactgcttttacaagtagggatacaatggactggaactccgtttccaacgtgttcctcttaaagaagaggaaacttagtaggaacattctgaatttttttaggtgtaatactatctggttttatacaagtgtgcttgcaaagtttgttgaagaatgagtcttaccgtcaaaaagatccccttttcctcttgtgctttataagagtatttataggccaacttctcttcatgtcctagcttggatcgatcatcctagggcaaaatttgagcgtttgattggtaggtggcatttttgccatatggcatttaagggtgtcagatcgtacaagctgggcctcatacacgtgtcgtcccagagtctttcctttttgaattttccttatccctacctgttagatcatttggctaggtacaatgagacgcgcatgcgttgtacgattgcgcatcgtgggagacaacccctaacgtcgtacctaaaaaagcctagtcactaggtccatagtctgacacgtacaagcaaggtcttaacgggcaaagggtgtagcccagtttggcgcatcttagcatgccttggtccttctgggaaaagctcatactcttcgtggcaacaaatggcttcggttcctgagactggggaagtcttcggctcacagatactctctgcattgatggcaattagggaactctcaatcatggaagccctttctgcaagatgggacctttacagtcccggagcatcagtttaagaaattggtcagctgatgacttcttgacttttcttgattaaaatccacatgtcgtgattataaaaatatggataacattaaccccccaaacttcgggacgtgacacgatcctagagcttgcagtatctcttcctgagcgagcacgtgggatttaagacaggctctttatttcatcacatcatcaaccaccagctaaagtgtcatttgtcagaaggtattatctcttttgtctttcgttaggcctttaaatgttgaattttgagatttgcgcgcgtgttgggcccgtgtttggtgagatgccaaaaatcgcggcgattggattgagctgactttccatttgtcgagcacttttcacgatgcatgcaatgatggaagccaactgttgggagtcgatacaccttcttagcttcccacttatccaactgtcaaacattccttgggcgaacgagtcgaaccattcgcttctcgtggaaggcaccccttcctgtacttaataaatactttcagtagccatttcacactttacatcttttactgcctgttgtaccagagttctagcatttgattcatctctccctctgtcttgcaagacttttctaacaactccattcttaggcatgcattctgccggtcaagacggaataccgagatcacccacctcattttctcttaatcaatcagtaagttttctttatcaccatttacttgatgtagagttcttagggagttgtgagggtgcatgttgcgtgtgattgtttgctctaggaatattggcactatgcctgaaatctctatcacggggagtgagagtcctagggtcctgtattgtactgacccgttctactccgtaccaatttctggtaagtacattaggactgtgatggaaaggagtagttcctctaaaactgcatgcaatagtggctctggcaggaaaaggcaaatgcctgaaacggttgttgctggaacgggggcccaccccctgtgtcatgatccaccattgaggctgggccagcctcggtcatactacccttctgctattccaaaaataccatttgtggggctcaccttccccaggaaggccattcatttcaatccttttaatatgtaaagggaaagggaagtgaacaaggcattgaaagagcgtttggaggcagagaaggtgttagttcgtagatgggtcgctgtgctctcggcggtgtggaaggctgaaatttcagacgacctgcacatcttgaccccggcttggccaaccgtggaggtagaggccttggaaaagtacctggcttccaaggtagggagagaagatgctcccttttccatcgaactttcagactaggtggctgggagcgcttctgaactgcctatggagacttgggcatcgtgcagcagtacggacgtttacacattgggttactctgctaagcaacatgcgatcggggtaaagtttcaaaagatgtttctttttttactttgatccttaccttgacatttagcttttccatttctactcattatgacaggtggccttgctggctgagaggactgctaaggaggccgacacactggtgacggagctggagcaagtcaaggaagacaaccgtgatttgcgcaatgccaatgacacccttttggccgagctgactgaggctaaacttctaattgaaggcttgaagaaggagaatctgctactggaggctaactatgcttactagactcgcctcgtacggggtatgaggatcgttcacgatctttactaggagacggtggagcagttgtctggagtagaatcttccaacccgtctggtggcgcccatctttgaattgcaacatgcctttttaattgttgttgtttgtttttttatatctttttgacacactttacaagtcacggagacaattttattttgccctggccgcgggggctagatgtaatagtaaataggtttttgccattttgatagacttttaggggccggttatgtccttaaaacacctgattccaacaaccagtatttcaaaccttctcgttagtccttaaatctcttagtcgatttaggaatcgtttatggactttacccttttatccctgaagccataattcttcttcccgctacttgacctcctgcttgggaagaccactcgccaagagttggcccggagatggttttctttacagaaaggagccttcgctttttcacacatatcttcaggcttttattcttttacaaggttgagttccgggagtaatgactgcaactgccttagactttaggcatttttcttacttcggtccttgtcagcatgaagttttagccaattatacaaccgcagatttttcttttcaagaattttggccgaatatgcatcttatcccaagatttgtacttaagtttagcctttgaggaaagaattaaagaacgtttccctcgagaagacttggttgaaaatgtttcctgcttttagttgcatatgtacactaagctaataactttggcaaatggacgtaagacattacagtcatcagcaaccgggcgtaccataccccccaaatgagataggaatttcggtctcttcaaaattctcagtcattttcctaaaattcaactcgtattcttctccagtcttcgaggaggacgttcaggcagttctattttggataacctttgctctgggaagtgttgtttgcactatccatccaggctatgtctttcctctctgtgactacttggaggggaattcttggaggtttggcaataatctcttcgcttccatgaggaaaagccgtgggactgttagcggaaaccaagtcagatggctggctccaaatggttccttcttccaaatagtgtttccttccatgtttttgtaatgtgtcctttaccctgacaaagaccccgtaaaggagagtacaagcttcttcggaatggtaggctttgggtttcccaaagggaaagttgggcctattctcttgcatgatcaattatcctttgctgaggttcgtttcgataagcaagagtcatgttgagtttcatagtggaaaactttggcttttacagggaaaggctgaaggtgcaccaaacattcaagcgatgactttgctttgaaaaggccaaaggatgaaacatcactgagagtgagacagagtttaagcagtcctgtccttccataacgggaaggagggttgaagatgtgccatacccccagtgatctttcacgcacgaaaaacaacatgcgtgcttgagttatgttgaatttttatgaggcaagcttgagcttttgtgagggaaggctaaagctgcataaaaattcaagcgatgacttcgcttaaaaagatcaaagggtgaaagcatcactgggagtgagacagacttcaagcagtccttccattctgggaaggagggttgaagatgtgccgtactctcagtgatctttcttgcacgcaaaacaacgtgcatgcgagaataatgttgaatttttatgaggcaagctttgacttccatgagggagggaaggctaaatctgcataaaaattcaagcaatgacttcacttaaaaagatcaaagggtgaaagcatcactgggagtgagatagacttcaagcagtccttccattccggaaggagggttgaagatgtgttgtaccccctatgatttcttgcacacaaaacaacgtgcatgcaagaatcatgttgaatttttatgaggcaagctttggcttccgtgagggaaggctaaagctgcataaaatttaagtgatgactttgcttaaaaaggtcaaagggtgaaagcatcactaggagtgtaaaagaaattattttgattcacctagctctttttgactcgcccataggaattgtttattttgaatatcaactaatcacatcaaagccttagttgtttttatctcttttgtatagttgaagacatgtcgtacccctagtaatctttcatgcacgaaaaacaacgtgcatgtgagagtcatgttgaatttttatgaggtaagctttagctttcgtgagggaaggctaaagcttcataaaaattcaagcgataacttcacttgaaaagatcaaagggtgaaagcatcactgggagtgagatagacttcaagcaatccttccattccaggaaggagggttaaagatgtaccataccctctcagtgatctttcacgcacaaaaaagacaatgtgcatgcgcctcctgagcttcaagaagccccaagagacacatgcaaccaagtgtgccctaggatctcttgggcagtctgtttcctctagtggattgcaaggagcttttgaggcaaaggcttgggcctccagcaggacaatctccactccaaaagaggcttcctaactggtttttaatggaatatgttactttcattgatgtaactctagagctatagttacattgtaatgacagaagtccctgtcagcgaactttgccaaaaatgttttgcctcaactaacagtaccataaccatgcttaactggaaatccagcaggcgccagtggtactgatggtctcctattagccatcgccattataagatcaatttccgttcggcttcacagctttagtagaaaggtaggggaagtagccattggcaatggatcttgccttcgcattagcatcagtgttggagtcatgagctggatagagttgttgtatttgatgacccttcatgagttatttgtcgtaaccgcgtcaaatcttagcttcttcacctggccgcaacacctctttcacctgcaggggactcgagcctggggatgccagtggccggtcatccctacagagagttggctggccagatctgagcttttaaggacgagtacgagtacgacaagcatttcaagaccatatgcattcatcttcgatattttcctcgtgcagacgaggtcatcaaccctcaccttgggcaacacctctgaccaacgcgttcctgacctttggtcggaccttgggtagggaatcagtagtcttccttcttcttttcttgcacaggttctctttttgacgggcttgagtcggtgaccaccgtgcatgtttctttcttcagctctcaatgaaagtaccaaaatatttaccaagatttttagcaactaaatatttttagagcttaagaaaaaaaatagtaatatgaataaatgaatagaaaataaaatatttttacgtggttcatgttggaatttattttac

SEQ ID NO: 19844 - DNA, 5286 bp, Cannabis sativa
cagagtcagagagggagagagagagtttcagtttagatccgattaattactgccatgtctcagtgtgttcgcattactcgtttgtctaagaagaggtctgcggctgaagccgattcattttccgacgatgaagattcctcttttattagcaatagacgagttgtattgggtgagcttcggaattcagctgctgttgaaaaccctaaacgcagagttaagaccaagaaggttaagaaggttgtacatgaagatgaagatccacacatgtgtggtccttatgtgtctggcatttatgagtatcttcatcaaatggaggtaatttggggattttattttctgaggtttgctttgatttttgttttgttagtgaatttctgatctgatttgatctgatctgatctgttctgatcttcaggttgagccgaagagaaggccattgcctaattaccttgagaaagttcagaaagatgttagtgcaaacatgagaggagtattggtagattggttggtggaagttgcagaggagtataagcttggttcagagactctgtatctatcgatttcttatattgatcgatacttgtccttgaacaccattgccagaaagagacttcagttattgggtgtttcttctttgctcattgcctcgtaagaatctaagccttttgatctaatgttcatgaagatgatctattcattcattcattatttcatatcagattttgattttcttattttggtatcacttgttcagaaagtatgaagagatcaatcctccaaatgtggaagatttttgttatatcacagataacacatacacaaaagatgaggtatttaagctttaccattccatataagaagtgggtttattcaatagcttttttattgattctcttgtattaactttgtttgtaatctttaaaggttgtgaagatggaggctgatatactaaagacacttaaatttgaaatgggaaatcctactatcctagcatttttaaggtaaggattctgttaatactgatttacccaattaatgatttttcataagcattaccattaaactcattatttgcctcttttgttatgcagaagactcactatcatagctcaagaaagatgcaaactagttactaataagaccaaaacacaagctctcaatttgcaacttgaattcttggggtgttatcttgcagagttgagtctcttagattacagctgccttaaattcttgccttcaatggtggctgcatctgttgtttttctggcaaatttcattctccttccagatagtaatccttgggtaagaatttgataccaaaatgtgtaacagatctggttaattgttcacctatatcattacaattatatgattagtagtcactaagctgttttgtgcattttcagtgtgcagaactccagaagtgttctggatataaatcagttgatttgaaggaatgtgtacttacaatccatgatctttactttggtcgaagaggaggaactcttgtttcaattagagataaatacaagcagaataaggtaaccttatttttcattttgatcagtcacattttcatgtcttgttgatttgattttgtttgatgtgtaaagtgaccaatttgcttacccttttttatgtttggtttgaatacacagttcaaatgcgtggctagtttgtcttctccaccagagataccagtttcttactttgaagatttatgttaagtaattaccactgattttgagatctgctaatctcttcataatgtaaccaattgaagagagctgttatacattatacaaccttgtattcaattgaatgagtttcaatctcaatagagcaataacaattttgtcgtataagttcaattagcataccatcttcttgaaagttgtaattatgttgtaaaggaaaaaataagctcaaacaatgaacttcaagaacacaaagatcaatagttaaaacagagaaaagaaagaataacactgaatacttaacattcaatcttcttcaaaattgaagtatccccaaaaaattgcataattcgaagtactcaattctcaacttatcaattcttatagaactcttcaagtgtaatataaaaaagcattgatattaagcattggtattaagcattagtaatgtgtatcaacaatattagatgatgttttaagattggggcctttaagcatttctcataatgaaataatctgaaaaatgtagaagctagttaatgtaacagactaaagagatttttctaaaactccaaaacgtttataaagttatcaatactttaaaaaggatagatctttaatttcagcaattatgtgataagaagatattttgtagtaactaatgaattttttactttgtaattgtgcctaaagagaattaattagtattacattacaaaataatgtagtcttttgtaacaattatttactcagaacataattctttagtgatataacaatcatttatatgttgtatttcaatgaaaaattacaatatatatatataaagctatttaaaatttttatcaactgaattttaatctattaaattacacttcttaattatttttcaattaaaaatttgctgaactagtcataattctgaaatataagacttctattgaattttaacctatatggttcacaaaatgttgatatgacctatacgcaccatctcaataccaaatgtgtaatattgcttataaattaaaaccttggagactaatttatcaaaataaattttgggaacaatttgtcaaaatttatatgtttaaggaccaaaataattttaatatattggtcccctaatttaattttttcacaaaataatccctaaaattttagtttgtattggcaaatttttttcacgaattatatgaacatcctttaactttttgtgttaaagaataaagaccactactaccctttacataactctcctaatataaatttcaacaaacattaaaagcaccaaataactcccaaaatggtcaaaaaaaaatttaaaatttttcgaaccaaaaatctaaataggatgcccaattcacaagagacaagaataccaattaaaaattaaatcaaataaaaataaaaatattaaaatagactaactttctctctgtgtaagcgcgcaaaaactagacctttgagttttggccaaaatcgatttcacgaagccaaaaacaaaaaaaaaaaaagaaaaaaaaaatggcgctttgtttcagtttcaaaaaactcccaacctccctccattttcatacctctacaaatctactatttccatcttcactttcctctccctccaatccaactccttctctttccttcaaacgtaacaagacagacccattttagatctgactacctaactcttttctttttcttctgccatggccgaccaagtccggataactcgtttgtctaagaagaggtctacggaggaagcggcttcattttctgatgaagacccttttgttagtaagagacgagttgtattgggtgagcttaggaatttgactaacgccgccatttctcctctggtaaaccctaaaactggagtgaagagtaagaaggttaagaaggtcgtacatcacaacacaaataaagatgaagatgaagacgatgatccccaaatgtgtggtccttatgtatctggcatttatgagtatcttcatcaaatggaggtaatttgggatttttcttattttggggtttcctttgatttttgttttgttagcgaatttctgataacgggttttgatctgttctgatactcagattgaaccaaagagaaggccatcgccgagttaccttgagaaagttcagagtgaaattagtgccaacatgagaggagtattggtggattggttggtggaagttgcagaggagtacaaacttggttcagagactctttacctatctgtttcttatattgatcgattcttgtcattgaacaccattgccaggaataagcttcagttattgggtgtttcttctttgctcgttgcctcgtaagattctaacccttttgaactaatgttaatgaagatgatatgttgaatttgatttgtttattcatataaagttttgatttttatctttggtttcacttgtttagaaagtatgaagagattaatcctcctaatgtggatgagttttgttatatcacagataacacatacacaaaagatgaggtatttaagctttaccattccatatcagaattgggtttgttcaataactttcttattgattctcttagtattaactttgattgtaatctttaaaggttgtgaagatggaggctgatatactaaagacactaaagtttgaaatgggaaatcctactgtccgagcatttttaaggtaaggaataaggattttgttaataatgctcatttaaccaattaatgatttttcataaccattactacatactcattgtttgtctctttccctattatgttatgcagaagagttactaatatagctcaagaaagatgcaaactagttacaaataagaccaaaacacaaaccatcaatttgcaattggaattcttggggtactatcttgctgagttgagtctcttggattacagctgccttaaattcttgccttcaatggtggctgcatctgttacttttcttgcaaatttcattctccatccagagattaatccttgggtaagattttcataccaaaatatacttcatcagctatatctttacagttatatcattagcagtcaataagatgttttgtgcattttcagtgcccaaaactgcagaagtgttctggatataaaccagttgatttgaaggaatgtgtacttgtaatccacgatctttactttggtagaagaggaggagctcttctttcaattagagataaatacaagcagcataaggtaaccttcattttcatgtcttattgaaattgattttgtttcgtttgatgtgtaaagtgataatcagattcagaacccaatttacttatcctgatttttatgcttggttggaatacacagttcaaatgcgtggccactttgccttctccaccagagataccagtttcttattttgaagatgtatgttgaagtagttgccactgattttgattgagatcaattgatctctttatagtgtaaccaattgaagagaattgtacatgatattatagttttgtagtcaattgaaatgaaaacatatttgtcatattagttttatatataatcatgttatatataaaggagaaataaacccaaatgat

SEQ ID NO: 19845 - DNA, 5054 bp, Cannabis sativa
tggcttattgatatgtatatcagaaacgaatcctaggagatgtagaagatcaaactaaaggcatacttgctttggtttttgaaaactacaagtcgcttgatgagtcttcaacctctggaatgatggacatttttaggcaggctaatgggttggtggcgcctgcattggcacctgctgttaagctttacactcttatgcatgatattttgagtcccgaggcacagttgaaattctgcagatattttcaggtgttgtatcgtgtattttagtttcagcagatcagcttggtcctttcagtagtcgcctcttttaaattccttaataaattcgaattgacaggctgctacacagaagaggttaagaaggcacttgaccgaaacagatgagtttgtgatgagcaacaatgagggaacaccggttgatatctcaatatcttatgagaaaatgaagtctctgattttgaatgtcagaaatgaaatttttacagacgtggaaattcacaatcagcacgtgcttccaaggtttatataaaagatatattgtagtttgatatatttcttactcattgtgggtttacttttgctgccttttgaaattttctgaaggaatgatcatggagaaaatttattactttgctgcattagatttttttggtgtcatctaaatcattgagaaattaatgtcatattttttcgtctctgaagtttcatagagcttccaaatatttcttcttcaatctattgcgtggaactctccagtagattgcgtgcattcctcgttgcacgccctcctcctggaccgtcccgtcctgtttctcaacttgttattgcagctgcagaccttcaaagggatcttcccctctggaatgtcaagtaataacaattttatctcagtttattcttttaatgattgttgtgtttattcttttattaactcgtgtaaaaactttttcagtcctgttaatggtggagttgatgccaaagagttattccactcttatattacccactggattcaagacaaacgagttgatttgcttgagttttgcaaaccagataaggtattaggtgcatttatacgttttaaacaagcattacgttgtttcacagaaagtatgggttactaaacactttttggttactctttaaatagttggcaattgaccgaaaattcaacactttcaggtgaaatcatgcagtgttcggtcacagctttcaacatctccatttattgatgagatgttcaattgcttagaggggacgatcaatgaataccaaatcattctttgccgctggccagaatatatttctctcttggagaaagtattcctctaattagtcctgctgtctaatttttcctttgagacttgactaatatcataaactcacagtttttaattttattgaataggccattgcagatgttgagaaagcaacttttgaagccgtagagaagcagtttaatgatgttctggcaccattgaaggataatttgactaacaagatattgggacacaaatatgtccagaaactatcaaagggaacaattaacatctatttggtcccagatgaggttcgcttctttgttctgatatctcattaaaatataattcaaatgataaccatatttataataataataatgagaaaaaatttctggggttttcagctgggagttcttttaaattcaatgagaagattgttggatttgagatgcccaaaaatagaaaccttattgaagtcttggagttcttgctttcctgatgatggacaatcagtcataggagaacatctgaacgatgtaaaagttatgctgagagccaaatttagaaattacaggcaggcaattgtagagaaactggcagagaacgtaaggagctagctaatccttttaaatttttagttcattcattttatttttttttttgttttttttttccgacattacttctgaaatgcagacaagagtgcaaaatttaacaaagttgaagaacataattcgagactcgaaagaagaagcagatgtgcaaaatcgaatgcaaccattaaaagatctactgatgaagactcttcatcaccttgatactgttgttgaacctcccgtgttcatacaaatctgccgtgaattctgggaacgaatgggacaggtaaaaactggagcggtatacatatggaaattctggatcaggactttagtttctcatttatttatttttatgcaggatattctgcatattttggaagatgggggagagaagaggtcctggtacaaagggctacgagttgcagtatctgtaagtctcactgagctttctattacacttggtctaggctcatgaaattattgaggtgcttctcataataggacagttaattagttacaatcatggaacatagctttgacatagtacaatgcactaatttgatcccattaagccagctcaagctcaaaactggaaatacatgcaatcttttaagattaagttatcaaaagactttatcatatctgattggaaatgtttttgtttcttaagtagttctaaatttaggatttttttgataaaatgttgtatgttttgttttgggctgcagattatggatgacatattcgtatcagaaatgcagaacttgcgcgggaattctctgcacgggaaagaactggagctaccggcatccataagagaaatccattccatgctccgcaaggatgctttgtaagaaatttagtcccttatttatagtattttcttattttaagtagtcatcacggcctccgtggtgactaatttttgtttctcaacaattcttcttctttttattattacatatttaaaatataattttttttcctattctaacttactagtgaggaaaatgtaaagtcttctgaggtcagaattttgtaacagcatagtatcatggatggttatactcaaaaaaaaaaaaatgttgagtattatgtatgtataaagtttttgctacatacttatctcattcattcttttcatttttttcaaacaccttgtggttagaattcttattgttagttacatgtatatatctacatatacctgtatgtgtatttaatttatgaagacttgtacctattacctattagttattacgtctccactattgccacttgagaacattaataaaagacaaaagagaaaagttcaaaactccaactatataccaggtgtccccaaaaaatgggctataaatcattatttctgtaggttagttttgtcaccatggggcatgggccacacaacataatgcttatactaatcagtgtgccaccaaagcatgatctgccaactcatgatgctagtgcttacttccaagtctttcaccaaacaatgggactaatataaaaggtattggcaagcaataatattacactaggagttggataggtattctcaatttggtttgatgctattcaaataaatgcctatgtattaaacgttagtaggggagggttaccaagtcgttgaatgaattatttggagtttgacccaatgacattatgccaaaaatattaatggcatcatccacatgaaacagaaatacttaattaatcccatcatccactttcattattataactcatagctatagggaacccataaatatgacatagaaaattaaaaaaggaaaaaaaaatctccttttttatgatattttttgtaagggaaagaaaatatccaagttcagtacaaataaaaaacccaagttcagtgaatgcatcaaaacatcaaaccacgtgtatgggtggacctgattcaatcttctgagtcagaatcaaggaggctttatgggagaaaatgtcttttgtcttccatgagatttatgcataatgtaatcaaatgagtaattaaacgataataattaaaattagagtcatgacaatgaagaaaggaatagatccatgagcttcaaataaagccttggcattcggagaaaactgtaataaattagtgcaaaatgagtaataaagccagaaaaaaaaaaaggtcccacgcgcaaattttagctttactataaagaagaagagggcttccaaacgtgttgtatttggaaatgagcatgtgccagatgtcccccagttgtagtcaaatttttgttcctttctttttggtatattattattttagtcattttgtgggtttagttagtataacctaataaatgattatgtttaaaaattctttaccttttctgtcttctttttttcccgcaaagttacattttctgtttgttattgaaaattcgagcatagagttagcactatgttgttgaccatgactgttgtatcaattaagttctccaaatatttaaactggagtacttttcattttaacattacttttgaatgacgatgtgttgtggttgtagtaggtagtatcattcttaatgagatgagaacactataactgataggcacatgatcccgagattgaccgaaaacgtggaagggaatttacaccaacactccacatgatccttctttagtaaccaaacaaaaaacaaattacttttgaatgtattaaatttacaatgactgtctttaggaaagcacttgagaaaattgaatagtgggaatatgtgctgatgaagagggcaattcattgatatatatatatatttaatcccataaagtagaatatgtgcctattataacagccccatattggtagaaaagaatcgttttcttataattattattctttatatcatttgtgcacttccaaccagtcgaggctacatctctcttattgtgtatgcactttggtattaagctattgaagtattgttattcaagtaactacacaatatgctattttgtcaaattcattcatttttttaaagggagccaattaatgcagcccaatgaatgaatattcacacatgtaagaattacctggtttttatttggtaagaaacatctccttgtaatgcccgtttctgaaagtaagtcacataaaaatgagaaatactaaagtactgaagggtgctagtgcttagtgtgacgtgagtgccaagatgcac

SEQ ID NO: 19846 - DNA, 1619 bp, Cannabis sativa
ctatataaatactaattattttcacaaacaaaatatttggaaattatatctaattagtaattaccacatgttcaaacactttatatcaattactagataattacactagtaattacatatacttccaaataaaattcttacttttctataatggttggcatcatactttggtttgaaaatttgaatggttactatatgggagaaacaaaatacatatagtaactattaagtaaaagcagagatgagtagtagtaactattaagtaaaggtgacactgacctggtaagcaaaagcataagcaagagctctttcctttttcataacaggatcatgtctcaatgattgattatctttgactttttctgaacttctatgcctatgatgtcttcccttactttcattcttcttcaaaggacttttaagcttttgtgactctgttactcctgatgatcttcttcccaactcctcttcctcttcctcttcctcttcctccttaatcaccaacttttcatgagtcaactgaagtctacgagctctgactcttgcttggactctaaccaaggcttgcatacatctcattgtcatttgtgcttgttttctcacattgtggcctctcaccaatgcttgaagcctcactaatcccttcaatgctctcaaagcccgtcttgactgcaaatgagttgagttgatcaaaatgtcaaaaataagtcatcagtagtaactagcaccctctgaaaaacagagtaaattaaggagtggtggggtcttactaaatagcctctataatatgattgtataagaattgcagccttttcttcccttgactggcgtccatagccagcaaggcgaactactttagcagcggcttgtgctgctgcgaccgctgcttcagcggccgcagcagtagccacagctacagcaatcgcatggtttcggtcttgcgattgtggagttgaggaaccactctcatcatttgtaccatcatgggaactctcagcaggaaaatgttcaaaggacacaacttctggaacttcatgctctcgtttctccacattgatctccttaaattatgaagtaattagtaataaatattaagatttagaagaaaagtaacatggggttttccaattatggatgattgaaatctagtagaagcagagcacatgagagatgaaaatgaaagactatgatggcttaggtggagtgataacaatgtttcacaagactttgcagcattatatgggtcatgttggagggggaccaagtcaccaatgtcaccttttttatttatggttataaatgggggcctaaagggtagagctcacctttaatatttttacaccagaaacaaaacccatatcatatgatatgatactttcccaatactttttgttttttattattattattattttatatctcttatttcgacaaaaaggaaaaatcaactaacccatataaccatataacattttaagccaaattattgaactatgctcattacacataatctttctttgatatgatcttgtaattaatatattgattaatatgtgattatatttaaaaacgtattcatataattacgccaaattattgatataattacaccaagaaaa

SEQ ID NO: 19847 - DNA, 4177 bp, Cannabis sativa
  modified_base (836)..(838): a, c, t, g, unknown or other
gaagtaattaagtatagtacgtagtattgattcttggttttgatttgtcttgtgattcgaaactagcttaccacaatcattgccgaccaacccaattaattatgacaaaagatcatcgatcccacaattatgctgcaacacaacacaaattaaccaatgattaattatttgtatttatatatataatgatattaattagggtactttcttctattatttgtctcctattcttgggtttcatatcagccatcccatgtgtaatttgcatggttcatcagtcatcacacacacatatatatatttacaatcttttagagttttaacttttatatggacactaatatatttaatgaacaaattatgttaagagattacatttagacaaattaatgttttgtgctatagatgcatgcagatacatgtttaattatatatatatatatagttgaagaggtacatattaattttacatatatgtgtaccaataccatatgtatatatacattaatatatatagtgaaacatttatattgtatatatattcttgaggtggaacccatgattctcaacatgatatcaaattctaacactttgtaaatagtttgtggattaaagattaatacattgctgatttatcaaaaaaaattacttgtgattaaatataatattttgttataagttgttactaatataattttagtcacaacaagtattgtgactaaaaacacattgtaatttttgtgactaatacttttagccacggtcgactttatataagtcacaaagtaagaataacaatttataattagtcacaactttttacttttagtcacaannnttattgtgactaaaagtaaaaaattttgtagtgtataatagttaatcactcctcatatttattaaattaaaatatatgctattgagtttttattttttaataatgtaatttcacatgatatatatcatatgttgttacttatactgttgtcggagaaatttcgacaacacctaatataaaaataaaaatgtaattatctaataaaaatgcgcaagtactcaacctagaatgtcgagtattcaaaggttttggtacacagccaaatgtgaaaactaatatagataatgaacacaagggaattataatggttcagccagatcacggtctgtttagtccactattacaaggattttttctgtccctcattcatattgttggatcactcttttatatacaaagcaagtgtcttttggttacacagaacttgattgattattaaaccgttttacattgaacattgtgcattaaattgtgaaaaacgtaaataaaataaataaggaacagtttaaatccgttttactaaatacaacaacatatgcgactttcatagtgcaagttatctgttaatttgctcgcacaaactcgcaggcttagggtgcgatctatcttaatacgagactaaagattctcgttcttaggtatttgcgttctaatcgagtcatatatgtggatatcttgttagtgtagatgatctaggttgtgcgagtccttatctgatcatcgagcatattaaatcttttagactaactcgctatatatgtaaagaaatggtctttactaagtcgcaggagaagtcttcatagacattacatatatctgggtatatgggagatctgaacatttccttcttggtcctgcacactcgaggcgtaataatgcgactagacttgagggtcacatcatcttggtgagtggtttaggcgaggtttatcctcgagcgatctccttctgatagctcagcaatcctcaaagaaagtgagtccatatgtcgtccttatgggagtttggtctcgagtttctataggtaaaaaattcacaccataacatatactcactacaagaaatgtcaattttgccagtacatttttgtgctggcaaaagtttggtattgcgctggtaaaatggaatttacttctgaaaagttagcgctggcaaaaatgacttttctcagcgcgtaaatgcgctagtaaaagttaaattttagccactgaaaatgtgcgctaactagtaaaactttgaccttttaccaacacagtttacgaaatgcgctagttataaaagtaacttttatagaattttaaaataaatattttttttactaaaataatattgtttattttattgaattacatataatatttttattcttattttcaaaaattaaaatatttaaaaaatcctaaatatataactaaatatacgtgttggaggtaacattggactatatatatatttatatgtataggagggtcctacgtagaggaagagtagaagagatgatgggggattagaatagaagtattggactgctctatctctcactacaatttccaaagccattttcattttcatgggacttcccattctagctctgacaattaatataacttactttgggtgatcaatgacatggtcaccatcatcatatataatatatatatatatatatatacaagatttggtgtacatgcatacataaatatatatatatatatatatttatatatatgtgtctcaactgtgctgtactagtctttagatcacacattcatcacccatatcatcaacacagtatatggcactttctcatatatatatatatatacatatacatatatgtatatcactatattgatctacatgtgtactggtttggttttgttggactttcatcaaatacatgttaaaatgctgagtttaatgctgctacatacaacttcaaacatattttatgtatttaattacatccatatataatatagtttcattataagttcacttatgttagtaattatgaaaaatatgctctcatcatggaagattattttttggctgcaaaagtttgtaatatttaattactttttttttttttttgcagtaaaattaggggaaaaaaatttgatattaagtaagcagatttaatcacactatacaacaaattttatttttataaacactacaaatttaatcacagaaaaaaattatgactaataaatgagaaaaaattatgattatttataaattatcatatttctatatatgttgtcattaattgaagatattagttacaaaaattgtaatttattatgactaattaaatatatttttaataccatacttgactaaaactaaattagtaacaacttgtatatatctaattatcactagataagttttttttttttttttttttgtagtgccactaaaagaataatcaagtacttaagtgctaaaagaataatagtatttttgatgctaataaaataataatttgaatacttaaatactaaaaacataatataatttaaatattattgttgtaaataatattgattataatgattatttagttgttgtttttgttgttgcatgatgttccttccttgtcccttcttttaagttttattattactataaatcaatatataatgatattttattaggagaattttattttattttctaaagcaccatcatcactactctctcacaaatcttttggattatttagatttgatttttaagttcccaaacatcctatgccgtactaaaatttgtaataatgttgtatgagaagatacatatgtttaattttatgatttcttttttattataattattcgttaatatattgaatttaggaaacttaataaaattaaaaccataaattaaatttcagacttatacatatttatttggcttccccatataaaagcttggactctactcttatccatttttcatgtgctgtgattaattaatggagaaaaaaaccaattataatattttatttaagtctaattaggatttttgtcttttaaactttaatatgtattaaatcatctctctaagcttttaaggttgttaaaagaactattgagattgttggatttaatgacttttttctaattttaataaggaaagtctaattaacatggatgaaagttcatgagacttgattgggtacatgaggaacatgtttagtatcaaagtctaaggatcaatataatttagtacatggacaatcacaaaattaataaaattgaataaaattagcacgcaaatattcttgaattcaataattttaatagttcagaaaaaaaatttaacaaaaaaaaa

SEQ ID NO: 19848 - DNA, 2747 bp, Cannabis sativa
  modified_base (50)..(54): a, c, t, g, unknown or other
aatagttcatggagcatttttaacgaccttaaaagttcaggaggcatgannnnntacatgtcaaagttcaagggacaaaaaacctaattagccttttttaaaaaattattaagtgagcatgcattaaataaaatgttaaattttatattttacaattatataatgaatcacagcaataaaagttgaagtaaaaatataacaaatcatcttttgtgctaaatatatagtttaacttttatatctcccaatcaaaagtgtggagtgagttggtctagttggaagaatttgtgtcatcttaagcatcatggagtgattggttttcgtcacttaagggatttcaatttagccaagttagggaaacaagcctagaggttagtcacgaatgaatcttctcttgttagtcgggtttatagagcccaatactattcccaccgtatgttcttgactgcttctattggcccaaatcctagctttatttaaaaagcattcttgaaacacaagacttgatcaagaaaggtgctagacggctagttggtccaggtacgaatattagtgtttagttggacccttggcttgaagatgtctctaattcgtggattacaactactgttgctggtatggagaattggaaggttaacaacgtcatggtgttgggcgaaagagagtgggacttggaaatagttgctgacatttttaatgatagggataaggagctaatatttaaaataaatattagtcaggaggctagtattgatacttggtattggcacttggatgttcatggtgcttatactatgaagaaagcttatagattgatgcaccaagccgatgtcactgatactagtgactttgagatgaagatttggaaaattactaggaagttacatgttctttcaaaagtgcaccaacttatgtggcgtgctttgactggttgtttggctacaaaagttcaactcactaccaagcatatccctcttgaccaaatgtgtcctatgtgtaaccaaatgcctgagaccgttatacatcttttagttcattgcccctttgcaaattcttgctggtagcaatcgatatcaagcattggcaatgggtctacggtggcgttttgggactggtttagccagatgttgctgtagcactcaaccacggcttaagaagagttggtgatggttatttgggcaatttggcatgcccgaaatgagttagtttggcagggaaaatctatgtcagctgatgaggttattctattggcaagagtagtccttaatcaatggaaaaatgctcaacaaaggagaatgaggtctttatttgttccttcggattcaaatacggacttggagcattgggtgaaaccgattatgggaacgattaaggtaaatatcgatggcgcaatctttgcaaatgacaaaaaatatagagcggctggtgtggctcgagaccatcatggttgacttgttgaaggcttcactattttattggtggggcgtgtggacccaactatggcagaggtagtgggggcaaggaggctttgagttggataagtgcaaataatggggttcggttcaggttgagactgattctttggttgttgttcaggcaatctgaggctctcggtgaacataccttctccttttggccaacatgtggttgcttgtcgttcattgttggcctctttacctttagtcaatattaattttgttaaacgttctgtaaataaagctgcacattgtcttgctcgtaattcttatttgtatccagatcatatttttagcgagagtactgctcctgctgattttctttctattgtaatggttgaagtttctatttaaataaagttataatttctcttaaaaaaaaaaaatatatctcccggccaaatgatctaaacttgctacttggattcaatgactaaaaattattccatcgactcaagtattaattaaaattaataattgtaaagccagtggaatgcgtacacaaacaaaacaaaattatttgctccctaactatatattaagacaacttttggtatccttgtgataaattacaactaattaaacagctgtttttgtaaccttgatatcataaatggagatctagctagcttattaataagataagtgaacttgtctttaataaatccagcaaacaaaaattaataataaaaaattataaaacatataaatttaattgtttgagaacaaaaggctgtggggaacaccttggatatatagctttacatatatataattaattatttatttaaaaaattaaagagaaaattaattaaagaagataagtacctttctttaattagcatctgaagtctagttgagcactctaatgatgtattattggatgacaatgatgtcttcctgctatgatcaaattattcattttcttttaatattattcatttcaatataataagacaagtttgcttatgtaattagaggtcattaattagatgtaattacaatttggagaatcgttaagggaatattgttgctctatattattttggtcaacattgtcaattgggacatgcggtgatgtaatacattctcatccaaaatatatattagaatatttttgttcaaaaaaaaaatattagaatattaagaaatcacattttaattttgtattgaaattattagatagaaaatatatattgacattttatttacaaaaatacttccataaggtaaggacaacatttatacatttttatgtaattttaattacca

SEQ ID NO: 19849 - DNA, 3393 bp, Cannabis sativa
  modified_base (2832)..(2834): a, c, t, g, unknown or other
gtatttcgatccttattcatagtgtatatatgtttgattaattccgcacttaatacttaaacatatacatttcagtttatatatataaatgtctaacatttaatagaatttagtttcgaaaacaagtattttgataacaaatactataagaattctacctatgttgacataagggtagtgtcgccctagatgagaattaagaagtataattgtctcaaaaaggccaacgaatggaaagtacacaaggccattaacagtgcaaagtgagacattgaggtcttgggtgaacctagaaaggtgtgtgtatcatcactattatattataaagaaaagttggttcaatgctttttcaatcaaatttttgtcaaaatttatggtgactacactatggtaaagttcaagttgaaagaaactttaccttatgcacttaagcaaagaatctatagaaaatgttgatttattaaataagtatttcaatgagatgtcacaaattttaatctggtggtgaaatattatactatttgttatttaacaaataatataatatacaattaaaagtgacatatgatatattaatgataggttattatattggtgattatattatatgatatataatgtaaccagtgacggacccaaaaattttattttgtgggggcttatttattattaaaaaatatttatacatatattataaatacttgagtagttacaataactcaagtgggtccgtccctgaatgtaactacacatagaattataagatatgagtagttacaaatttaaaaatgggatttgtaactcatggatcatacttgattatatattattaatatgtgagttattacacaataggttatgggattgatagctataagtttatagctgttggaaaatgttcatatctcatttatatcattaaaataaagattgaaacgtttgtggaaaagttgcctcaagaagagttacaaaaaataaaaaagagttggctgaaattgtaccagtcgacatgttatgtcgcctaagggttacattatgagatttttaaggttttgtgatgtttcttgatgaagggtttgaaggtatcactccaagcgacatgtcgcctggaactatttcttttttagaaacattgcaaaacgttcatctctttaataggaatgtttcttactttcatgttaacgttttttattctatttaatccctcttacacacctagtaacaaccaaaataaatgtgggattggatttttaagtttggttctccaaacactataaatagaggcttgtggttcactcttaaaatacacttattttctatctaaaagcactagctagaaaatattataagacttgttcattcccaaaaacatttttatctaaaccctcagtgcagtgcttgattgtaggagaaataaatattttggacaaatgtgtaaaaagtttattcaagctattggtgatctgtgtattctattttttacgttcttattctatactatatattctattattatttcctcttattatataactagggaataggccagggtttcgcgcagttttaaatatctttttaattttatattaaaataaataaattttttattatgaatgtaatttaaaatataatattttctattttttttaattatatataaaaattactattaacgaaaaataatttataatacaaaaaaaatacctcttacattaagttatgcataataattaaataaatcttcactttttcttgttttacacttgaaaaatatatcacaaatatgatttttgtaataagctaaatttaataataaattacttttaaaaaattaaaaatgtcattttataattattaaaaattatattttaccttacaaaattattacattaacaattttatacatcattcacaaatttaatattttttttatataaattaataagataaataattgtatgaaactaattatcaggcaacgaagtgaaccatttcttgtcaactttttgaactaaatcaaaagtttatattctgataatgacataattttctccaaatattaaaaataatataattttatgataatttaaatttatatattttgccttaaaaatattatacattttcaattttaaacattacttaacatatttattatttattttttaaaaacaaatatataaataattaataaaaacaaacatttgaccctagagtggaggcaaaatatagtctttcacatgatattattagatatatcaattgtaaatgattattatattattttttttttaattattgttactttttttaaaatgcttaattttatggattaatgttaaaatagaaagattaaatatttcatgaaaagaaaaaaaaaattaaatgacattccataaaatgaaaggacaccaccactcacagtttaattacaatgtatatgatgcaatttaatttaattttataaatttactattactataattaatgatcttgtattatcaaacaatataatatataataaaattaaaatattaataataatataaaagccttttattattctatattaattaaatgagttagtctatttttattcttaattaagtacttctataacaactttctattgtgcagtagacatttcatattctttctcctaatagcattaattaaaaaatagaatgaatagagttgctatgtatacaaaagagacactccatggtaaactatattctttataataactttcgaaattctataacatatctaaataaatttaaatacttaatccataatatttaaataaatcaagagacataattgtattgnnnacactaaataacaacatgtcttttgaatttcctatgagaactaaaaatattgatgataaaaataacaaaaaatattaaataaataagagaatggagaaaaaattttaaaaaaaatgaataataattcataatcttattatcaaatggaaaaaaaattactattaatattaacaaaagaaacgtaggcataaatgacaataaaatgaattagaaacatgtagcacaaataataatagaataagttaaaaaaaaataatataatgaataaataaaatggagaaaatattaaacttatgatggagtactattattaaacaataaaacaattaaaaaaaataatattaattaaatatcttatataaattattatatcttcttattatgtccactcatttttaagtgaataattattaatactgataattaataattaaaataaaggcataagtaaaataactcaattttaaaaaaatcacaaaaaaaaaaaaaaacaatcctaaaaagataaaatgtcttctcacctcttaattgtatttataaatataattatatcacatat

SEQ ID NO: 19850 - DNA, 4019 bp, Cannabis sativa
tactaaaaataacctaacagcctcaggcattccaactgagaagattcatttttctcgacggggttgcgaagcaacacccgccgtttcattagggagggttgggacaacaacatcatcattctgagtagctcgagccctcttgagcatgctcctaacagagcttccaacttgggcagtttgtttgatgaaaggcattttaacgccgatagtggttgtggtggtggtcatgcttggtttctagataataatgcctctgttaagaggccaggggcagttgaaactggtgggggtggcacttcaggatgggctatgcccttccccttatcagtgtgggtgatcacagaagtgaccatgactggggagggtaagaaggttgagaaagccatattcaatcttggaggggggtacaaacttcaacaggggtagtagtgttgtcttggtcaagtgttgggaccatgaaatcaaagccaatgttcataaatcgatcaactgcttgctgcaagccttgatcagaattgcttccacgacttatgtactcttcaatggggatggagttagagagatcaaagggggtttttcttgacatgagttttggctggagcacgaagggtatccttataaccaagctcagggggactgtaaaactgtcacatctcatgaggtgttttccacatttattgtaagtgtgatcgagcatatcgcaaaaatagtaaaaattttacagacccttgtacttaaagtcaagccatttagtcttggcaatgttacggaatcgaatgttcattcctcacctgagaggcttagtgacatcaataagggcacgaatcctgagaaaagggtcgaaactttcaaacaaagagagagggtaaatttcaatgaggtcctcgagttcatcagtaacgaactacgagttgggaagatttttggccaaaaggggcattgtgagcttggatccaaaaaggaacaaatcagaattgatcaggtgtgaaggtgtctaagctttgaggattggcaaagatcatgaggtttttattgaaatgccagggttggtcctcaaggatcctgagatggtttcctacacattggaaggtggctaaaaataggccagagtgatactcaaaaatgacaattgtgaaacaaagggtccaagcttcactcatcgctttttcgatccaattaggttttgggaatttggaagttaggattttgaagataaggtagtgggtatcagtggcatcttcagagttaagggaaacatgatcgaagacatggacaaggttctcttcatcagtaagattaagggtgttagagggattgagagaagaagatgatgacacgccatgggaagagtttgggggctaagtctaataaaagcagggaaaggctgacgattggaaacaccgatccaaggctttaaatagcaaaagaaaacaaaagtgaaatgtaatgcctggagttgaagggtcatcttgaagagtgggagaatccatcctcctgcctgctcagatctcccctgaactagagtagccatcatttgggttgtaatgatgtccttcaaatgtctcaaatgactaaaaatggcggtagctaaattgggtttagggggtggaggggatatactccattaatttcttgatcacatattaattgtgatataacgtgagccgtcataattaattggagagttgagagagtaattaaggtgagaaggaattgaatctttagtatcgaggttgtaatcatcatggcaagtggagagaaatggggattaagagtaataaatgcggtagaagaaggtattaatcctaagagcccaaaacagtagaaacttcacgaaaaagagttatgtggtacaatgctctatcacttgttctttaggctttcaagttgaatttttgaagaaaaaaatagataaaatataagaaaaacaaaattgtagataataaaaaatatatattaattttttgaaataaaaatttttgttgaataaagtgtttttttatacaattttttttacataccaaatatgataattttttttttattttctattttttttttcgctacaattttcttactattttctttccacaccaaaattcaactttcaaacataacatagtttccatatgtatgggttttgtgggatatgatcacccttagttcaatttacactagagttataagatctatcaaagtcaaaaattactaatgataattataaaagtatatttttatatttttacgttcaaagatttttttacttttatatttttacggtattctatgaaaattacacgaaaataacaagaaaattatataaaagtaacataaaaataatatcaatacaacaacaaaaaataatatacaaataacaaaaaaatcaataataaattaacaagagtacaacataaaaatatattaaaatactgtatttttttaaaataaaatcataaaaattgtagtattagaggggtcatgatctgccttctcttattgtgatcagtctatggtgttttgtttgtctttatagggatgacattcatattggatcaaagacaacaagcttcatcatatctatgagacttcatggtcttgcttatggctgctgcaggccttgcaatgcaaaaggttgctcgacgatgaatctaccattgtagaccaaaagaaattaggttggggaaagaatgaaagttaaagagggtcggttcttttgagccttgagactttatgatcttgctcatggcaatgttgacaggtttacagtagtggttaaacatgttatggaagatttctcttgatagccatgcgttctgccatattataggtcaagttgaaaaagaagagattcaatagaatttctgccctcatgtataaaatgagtagtgatatatgccaaaatcgtgggcataaaactcagtataggatatatgagcttctttaaaaaaataattttgcttttcatatgctattgttttgttaaatgcataaataaaattcacttttcaaattttaaattacatgtcgaaacataatacttttggatgtatttttcaaatacatttgactatactatatacatgcaaatgaattagttcttgaaatttggactttggaggtttattagttatataaatgccaaacagaaaacttgggattaacgtgaaacattattatatatcatacagaaatgaccagttgttttccctaccatataagaattaataatgaacacggtcaactcatcttaacactagtacaaaataaagaattgtttatctaaacacatgaaagaaagaaccaaacaaagactaagacaaaaaatacaaactaatagaaagaatattaatcaatcaattaggtagaaaaagaatatcaatcaacaaggaatctgttcggtgaaccatgtaatgatgttgaaaggaagtttcatcaaagacaccgccagattagccactccaacgcaacatatgcaacatgggcacaagcaacttaatatagtcctgccaaatttcaatttaaaaatgcataattaatacatatataatgtaggattgtatatacatttggttacctaactacatctatataatttcatcacatcaaaaaaaaaaaaaaaaaatttaaaagcttacataaatgtggtaacactcattaaatcacataaagaaatgttatcagataatgcatgtttatattttctatcattcagaggattaatttggtctcttaactctatttgactccaataaaaggaatgcttatatatagtctcaaacctaattcataaaaggggaaaatatctgttccacaaatagatcataattctaagttgaaaaaaaattatatttatgatcttcttacgatcatagctcttgataaagaaacgaaagcaataagtaatttaaatgagaatcatgataatctaaaggctgtttcctaatgtatatattgaaagactataagtagccaaaatttatgaattaaacatttgaattacgaagtagagaacataccca

SEQ ID NO: 19851 - DNA, 1887 bp, Cannabis sativa
agagagagagagagagagagagagagagagagagagagagagagagagaagcccatacttgctcatcgaaagagtcgcacaccactgacgaaccccacatatgttgcgtaaaatataaaaatataaatgtgcaagtgtacacaatcgacaaataagtaataaagtgataagagagtatcgtctccataaggattgatcataaataaattgtgtaacaatcaaatactaaaaaatttagaacaaaacaaataataatgattttatcaagcctaagacctaaataaaaagaaataaaataacaaggaatgaaaacaaaataacaaggaataaagaatatgacaatgagctagaattattatatcctcttaatatgcaaatttgatgctaatgttgtggaagactgtgcattattaatctagaattctaatttaagtcataggcttcagtcaaagtcattatgttttcgattctttaattaaattaacatatgtctaggccaatttagtttcaagaatacatttcaaacaccaattccaaagtaattatgcaaggtaatgataatgtttatactactacaatattaaaatcaaaagatttaagcatgtaccagtattgtgttcattaactctaactctttcagcattaaaagttaactcaactactcacaatcgatggccaaacaaaaataaaagcaggtaataaacataaaaatatcttaagaaacctacagaacttaatgtcacaaccttctgtgatactgattgggcaagtgatcctgatcacaggaggtcaacctcaagtttttcaattttctttggttctaatcttgtagcatggaagtgccaaaggcaacacattgtcgctcaatcaagcacaaaaaaatgaatatcaaagtttagctcaagttgtctaagaaatcacttggatgcattctctatttacaaaattttatgttcaacttcctagatcacctgttatatggtgtgataatttcagtacccctcttaactgcaaatcctatcttacatgcccatagtaaatacattgaattggacttgtattttattcgtgaaaagttgtcacagaaactggttcaaattcaacatgttcctacaactaatcaaatagctgatgattttaccaaagctacttccaatacaaggtttgctcaatttaagatcaaacttagtattggaaccaagaccaattctaagtttgagggaagtggaaagacggttagttgttaagttgttagagctagttgtggctgatagaattcggttacacttgattgagttatgtatataaattgttttgtactcatttgttaactaaataagaccattctttctagtcttcatcttcttcaacctttcacctctttctatgtctttctctatctttgttcctctgttttgatctctcttcttcttgttctggaacaatggtagacatgttggacaccacaacacgtgaaaaatgtaattactttaattattaaaaaagtaattacaccaagacttgaacactttttactagaccacaatacaccaaatacttactcttttattttatcactagacacatttactacatacttgtgtatgactcacacttttaggacactttgtctttagacacttattaagaactcacacacttatatatagataacttagcacacactaagacttcacttgtttttatgtacctacatccatgagaccaagggtctatttatagtgcctcatggttggttgttgaagccacttcaatttgcttaagaattctagcattgggcttgacccaaaaactagaaatatctagtgactattgtttctaaaaaattattttctagtcatttcttacatttatctagacttttct

SEQ ID NO: 19852 - DNA, 2615 bp, Cannabis sativa
aaggatttcacttgtgattgtagaaactttgatactagtcatttgtggaatcatttcaacaatggttgtgagtttagtccagctgaggagggtcttgacaaaaaacaaaaggtttcgaggttcgaactcgtgaagggaaggaatgaaggggaaacaagtttagcgaatgggacgtataacaaagaagcttgtagcgttgccctcgagaagtatatcgtgttggatgagttatcaagtaaacatgtcgagggagaaggtttcaaacaatttgtgaggacgttacaacctaggtttgaaatcccttctaagacggtcgtggctaaaagtattttgaagctatatgaagaggagaaggcgaagttgaaggatattttgaaacatgagagtgtttctatagctgttgatacatggacttcaattcaaaatttgagttacatggtgataaccgcgcattggattgattgtgattataagtttcaaaagagaattattaatttcagtcaattggtggatcatactgagaaaaagatgaagcttgggatttgggactgtttgaatgattggggtattactaagttggttggtgttacattaaatgattcttcctttaatgatgcaatcattaagtatctcattaggtggtttaaagacaaggataagagtcttgttttagatggaaagttcttacatgtgaggtgtagcgcttacattatgaacttgattgttagtgaaggattagcggagaattacgattcaattgctgccattaggaatgctgtgagatttgttaggtcttctcaatctaggcttgatgattttaaggaaaatgtgaagctcgaaagaattgaatgcaatagtcttctttgtttagatgtcgaaacaaattggtactcaacacttcaaatgcttacttgtgcattgaaatttcgaaaagtatttgaaagaatgaaatctgatgaaaattacttgggatattttaatgaggttgacaaagatgggaagcctatgaagggacctcctagtgaaattgattgggagaatggtttggtgtttgtgaaatttttggatgccttttatagagtaatagtaaagcttagtgagtcaaatgatattacttctaataagtacttcattcaaatatctggtttacaatattggttatatgggttatcacttgatgaagatgaagatcagttaaagaacatgaaaatgaagtacgataagtattggggaagtattgataaatgtaacgaggcacttctgattgcattagttcttgatccaagatacaagcttcggtatcttaagcattgttttagttactttcatgattcgaatacaaccaatgaaatggtgaaaagagtggaacaaattgtacaagctatgtatgatcattatggtggagtaacaacaagttttgatcaatttcaaagtcaagctattgttgttagacctcctaaaatcatgtttgggcgacctatgtcgcgtagtttgcatgatgagttcgtggaacaaagaaaagcgagagaaagcggttggtttaagaatgaggtcgatagatatttttctgaggatgttgaatgtataattaagggtcaaactttcgatgttttgaaatggtgggcgggaaatgcaggcaaatacaagatattgtcactcattgctcgtgatgtgttagctataccagttactacagttgctactgaggccgcattttcaattgggggtcaaattttagatcctcttaagagctctctaaatccgaaaatagtggaagctttattttgtttgaaaaattggtggaacgaatcacatcaaccaattattgttcgagaatatatagatgaagcggaagtgttggagacttcaaaatatcttgagcctggtaatttataaaaaaaaaaaattaatttattaatatttataagtacagtgtgaatgttatataatctaatattaatgtttatattaatgatattgtagatgatgcttcaagtaattctcaatcttcatcctcatcttcaatctacagagaagaaccttggtactgaattcacatgactacttgttagatttcctcaaagtgtctttaaatgatatttgttatggtttgtaactttctaatttagaattttatgtttgacaaatgtgtttatggtttgtatttggatttttttggatatttttatgagttttttatggtttatattggactttatgaacatctgaaaaaaagagcccaaaaagtttatatttggacttttgtggatataagttaacaaattatagacaatttttaaagagtaattgtatttaagtttaatcttcggtaatagataaataaagtttaattttttgcagtaattatatttaagttatattttcgtaacttctgtaggtacctaatcgttaagtattaaattaatagtcacgtggtaattcctgattagttcatgtcattaatttaaatatatcaataagaaaatgacatatagataatgacttacacttaacggtcagatacttgcgaaagttttaaaaatataatttaagtattattattatcaaaaattaaacttaaatatttatttacaaccgaaaattaaatttaagta

SEQ ID NO: 19853 - DNA, 4698 bp, Cannabis sativa
ccactagaccaaatgcccacttgatattgatcgtttataattataattttatacaattttattagtttggtttttcacttcgacggcgtaaaaaaatggggcattccgagaatcgaactcgggacctctcgcacccgaagcgagaatcataccactagaccaaatgcccttttaatatattgtaataaagattaattactccaatgtttcaacctaacaccacagggtttttttttagtagtttggttctgcattttttattgggtaaatgcatgttagtttggatctattttgttttgtcgtgttacatattattatattatatcatgcattgagttctgtacataattgactttatgattatttttctccttgagctggatccgaaaaccaaagtttatgttatccaatgttggtatccgtatactaagattccgtgctctttttcaacaatagtgtctattaatatatactatatagccttattataggttaattttatgagcagcataattgcaggagatctagagctaacatttaattattacttgcctaccaaaaatggttcacgtgtctttctcatctcaccaactaaaataataatacaccttttttttaaaccctttaaaagttgaaggtctaaaaactacattgcacgatcttttgatccataacatattatcaatgaaaaagaaaaattatgaaaaactcttgtttattgtgttctgaaagactttcaaaccaatattttcattcagaacatattgtttgaacatttttaatcaaaaggaaaggacttaagaaaaaaaacaaaaagattctagtgggggcattccgagaatcgaactcgggacctctcgcacccaaagcgagaatcataccactagaccaaatgccctcattgataacagtttaatatcatttatagttaaatattttgtttttgttgagttttcttttaaaactatttcgccagttggaatgggatggaatgaagtctattgctttcaaaggatgcaaagtttggtgttatgtaatatgtactctacttagttggcttacttttaaataatatataccatttcaatttcccttacatatatgatgatgatgatgataatggtttttgaaagtttcacataggagttggttttccttaggttgataaaataatctgtctttgaactttcttcttattttttttctcattttctgggggccatcttgtcatagcactgatgttgtgccaactcattgcacacctcaatagttaataataggcatcaataatatcttaaatatatatatcaacaattacatataataaatgagcaaaaaattgaagatccaaagtaataattaaagtgtttaaattaaaaaataagtttgaaaagctcagccaagcagtccttatatgatgaataggttgatcaagcaagagacctataacatgaatacagctagaagctaggtcctccatgatgaaaatttggtaccaaagaacgggccatattattacctttcaaaaagaaaaagcaactttatcaacaaagtagaatgtaacatataattcactcaactattgtgacaagttatttgcttaaagggaagaaaaaaaaaagaagattatcatgataaaaaaaaaaaatggtgtagagtcgctttagattcggacaaaataattaattggcaaatagtcataacaatttactttatttacaaattatctatcattgtcgttggaaagacagtgcaacccgcatatttctgtgtcagatattttttaatcttaatttttggtgttttttttttttttactttctcacaaataaaaagggtaaaagagagagatgggagaagatcagtgggatataataaggtgtgtgttggttgtggttggggttgggattggataggaagcaatatataataaatggccacattatttgcaggaacaacccagaaatgtactgcttgtaacaagactgtgtacctggttgataagttaactgctgataccaggatttaccacaaggcctgcttccgatgccatcactgcaggaacacccttaaggtaattattgttttaaccatgcccacatagtatagagttatatatgtgatttccattatttaagaaaggataacattttggttttgattaattttgcagcttagcaactattgttcgtttgaaggggtcctctactgcaggcctcactatgatcaactcttcaagagaactggcagcctagacaagagttttgaaggtaacacacataattaataggagtttaattaatataagtcttgagctactcaactcaatacactgttttctgatacttatttcttatatattagggactcctaagatcttgaaaccagaaagaccaactagtgaggtaagttataataattaataagagtaagaatgattgaaacaacacttgaattggaattggattttacagaatgcaaagacagtctcgaatatgtttgggggcaccaaagataagtgtgtgggatgtaacaagactgcttatccgattgagaaggtaataagcctgtttcaattcaaatcatattatttccttttcatgttggaaaaccaacttaattttggtttgctaaggtgacggttaatggaactccttaccacaagagttgtttcaaatgcactcatggaggttgcaccataagcccatctaactatattgcacatgagggaaagctctactgcaagcatcaccacattcaactcttcaaggagaaaggaaattacagccagctcgagggcgataatgaagacaattccttgaatgagaaagtcgccgctgttgaaattgctgctgaattgtagtactacatttacaaatcagattcttgctcattgtgtaatctacatctccttatatatttgggttttgtttgattttccatcgttcaaatgttttagagtggtactctgttgttgaggtttcaagtgagttaatatgcatccattgttgatttgtgtcagcatctgtttacaagtcgaaaggtttttctatcgtcatgagaccatgtttttgtaccaatttcatatttccactggttttcatttgcttttaatcaccaatccagttgatactatagaactgcatcttacaggtaccgtacaacgtcgagatcgaacaatcactttgaaaacagagaccaaattttagttactagaaacatatataaatttatatagaatattgataatattgatttgtgacgcatgtctagatagattcatctgttgtggtgaattggtgatacactgcactctagactagatacatcatcactgtacataccactttgtatgtgcaacaaaccaattttcaggatacttttctactgaaatataatcataatacaaagattgtagaagtgttaactatagacaagacaatgtaaatgaaatccacctgtattacagtgctcttgtaaattgacctcttccgtttcacacagcgcttaacgggtcatggttgtggaattttaggcaccataatcattgccaaatgaaacagattacaagatccatcagcactcagcatccaaagtcgctttcatggtgttgtccttcaagatctgagaagcaagtatcaagagctccaccatctcaaatcctgcagcagcaacaaaatctatcttttcattcctggagctcccggaaatgtcaccttgctctttgccaagtccttcaccatccaaccccaaatctgcctctgcagaccagctaattggtaaagagctgccaagagcagtcttcacaagttttgcctcgtagattatctcatctagagattctggcattaaagcaactgtacctgtggaagtctctgactctttggcctgaacaatatgttacagcagaaactacaagtgataagattcaaaagaaaacaaaataacagaattgattgtaatcaacaaaccaagcaaaagaacgaaaaaaaaaactaatccacaaaccaagaacgcaaaataacagaattagagagccatcagtttaaaataaatagaagtttacagattttacctttacaagaagagagagacgaagcctatgaattgaagaaatcagatgctccatactttccatgctctctttaagtgttgcattttcaattttcatccttatgcattaacagcaacaacaaaataaaaaagtaaattagattaagaaaatccacaattctatgggaacattaatttctagttttgcacaacaaaaaccaactgcagatactcatttttctcaactcaagtatcttaattttttcacaaacctggcaaagtccatgctttcagattttctgccaaagaagttcccttcattgttgagatgaaattccccctcgcgtcctctaaagtctagtgaaccaacccagcgtttcaaatttgttttcttcagcaagtttgttaatcttcctcctgtttcaggagcaacaacacttctacccccaacatcagccaacattttttctgcattaacgttaccagaaattttcctgcataaatggatcacactattagctcgaactaatattaatatgttatgagaaccaaactactatagcaaaaggttataataacaataacagaacaaagtaacacacagcaccaatctatccctgattgatgtgagtgataaactgaaaa

SEQ ID NO: 19854 - DNA, 3274 bp, Cannabis sativa
agaatagtattttaatatgaatgaatacttttttaagaacaaatcatgatcaataaacagtgctttgattgtttcatcactcttcatatttaaaaggatatcaaatatttatagattgtatattatatagatatatgtaatgaatgcaggtgtacttaattaacctaaaatttaattaatatatcatgatttaattatttttgcatggatcatgattcatgacaaaaacataaattatacacgtatgatgatgaagacactttaatttctagtcacttattaagaagaaaatatcaaaaatagacaaaattccaatatttaaaagagcttaatatttacattttatatatttttggagatattgtttgatatttttatggactataaatatgtttggttggcaattgaagaaggcaacagtgacattaaatttgtgtttctcgtgacaaaaaaagaattttattaaatgcaataataaaaatagatttttttttgggaaggtataaaaattaatagatattttagtatacgcacatatatagctaactaatcaattttactaaatgtaaaatatagtttacattattaaaagtatactctaatggtgtgttaaatgataatgtaaaaatttcacacaatcaaaagtcatctaaatttatatatcaatataaatatagcatgatgcaaaatttgcatcacaataaatgctatgcatgcttttatatttatttcatttttaatattttattattttagctaacatactcatttgcattaaatgacttgtattattattattattttattaaattttacatttaactttatattattattattttatattttttaataaattatcaagtgattaaatagcatattaaattttacatcaagatttataattatgtattagagcacaatagtaaaaattgatgtaaaaatatcacaaaactattttttttttacaaaatatggctcaacttttacatctttcattggagataatcttagtaattaagtgttgtttttattgtggtcataaacataaacataatttaatagttctatatttttttttcataaagagaaagtaataagttcaaatcgccctctccaaatatataataaaaaagaatacaattcctattattattttagtgtggtgtacatttttatttaaaaaggatcattttattaaaaataatcaatatgtataatacatcaaagtaaactagtattatactctaataaacacccgaattcaatacaaataaatgatcttaagataacacagaaattaaaattaaaacttaaaaaaagtccaaattagaataaatggtaaaataaatattaaattactcttttatcatttttaatataattatatgttatgttttaatgggtagaagagatattttattgttgttattttattttttgtctttttcttaaattcttcctacttatgaagggattaaaatttgtatacttgggagtcttcctccatctcacaatggattttgtttatttaatcaatcaatttatccttatcccttcacccttccatctttctatttcctctaccaaacatagtgtaagaaatcaatccatactattattacaattacaatttttcgcttaaatataacctctctacaagggtacataactccactcaacttttaataaattaatttttttttatattatatatattcatatttgtctccacaaaataattttttttatatttactattatatatttttatttttgtctttgtaaaattttaattttatatattttcatatttattctataaaaaaattatttttattctcatatatttatttatgctcttaagaaatctatattttttcttttctaaatatatatatttttttattaacaagctatttttatagaaaagaaatttttttgctcccctaatatttactgctcttccactgtttgggatgatcacatgtttgaaataataaagaaagttgtgattaaattgtggagttgtttgataatattgagacttaaatattgaaaattaatgataatattgtgatattaattgttttgggcaccaaatgaaaggaacgcgtatatattgaatgaatggattcttatgccaaatgagtggagaactccattttcttctctatattttgactttgaacctatttatgataatatatatgatttttcttttcttttcttttctttataattattattattattattattattattatatgattatttcaaaaaaaataagatgtgcttttcaactaatcccaaccacacaactaagaaagaaaaaagctctagaagggtagactcaaaaactattgttatagttttgtttagtagttattgtcactatttgattggtcatgaagatccatttaactaaagcttatattatatcattttggcatatcctgtttttcctttttaacttaaaaccacttttgtttagggcatgtctttgtcacataataacctttattaattttatgcttaagggatttaaaacccctttaattagttcatgattctacactacacaccaccaaaaattccaaattttgggttcaatgaaacataattgtggtgctacctactatttccttgaaaaatatatatatgaaaaataaaataaaataaagtgaggtctataatataaggataagaacatttttttccccaatttgaaatgaaagttgggtattttctttatttatttttaaaaaatattgaaagtgggttttgggaaagggagagattgagaagaaaaaaatggcataatagtattactacttgtacaaagataaagacaatgatatatatgctattgaataataatatttcattgccacttgcaaaaatagttgttattatattcgcatttttagtaaacttgttgctagaatctaaaatatatatttaggtgtagttaacatcgtcaaatctaaaatataagttgactacaaaaaatcttacttttagtcacaataaaacttgtgattaaaagtactgtgaaaaagttgtgtataaattattatttttatgttgtgaataaaatgtcagtgacaaaaagtattagtcacaaaaattattatttgttgtgcataaatgtatttttagtcataatacttgttgtgactaaaattaaattagtgacaacttgtatccaaagactatgttttagtcacaagtagtattttgttgtaacaaaagtcacatttagtcacaa

SEQ ID NO: 19855 - DNA, 7282 bp, Cannabis sativa
agaaataacaaatgcgtacatattgtaaagttgaaagcagggcgcgcaagttcccttctttcccgcttgaccacctcttgacatcagcatccaaagtttctgctaatctctgcaaacacaattagatcagtctcattaaacccgaaaagagaagaaaatctgaatcctaagaagttctatcaacaaagtttttacatttctttctgcttgctctctctgggcaagaagatcgcgcatattcttctctgcaagagctttcgcctgaaatggacaagcttgatgttaaataagttaaatataaaacaaaagctgtttcattaactataaatacttgaattatcataccgcacgttcggctgttctacgatgcctttccaacctagctttacatctttgagctgattcaacttcagctccttcaaatctctctgtaaaacaaaaaaaaaaatcaagttcaaaacaaattgggcagaatgtaaagaaaatattaaaagccagctagtaaatatcaaaatttgattacataccaccataaactgaggaatattgatgtctaaggtgtgagccgtcgagaagatcctgcacaataccattggattcagattgttatgaaaaattgaagttaactgaaggaacaataaatcagcagaaaagagattactcacagaggatgatgagctttgtctcaacacattatttcttgtggaagctgcaaatttatcagaaacagatctttgtactcgttctctggcctcacaagcagctctttcagccattgccttttcagcagcacgctcacgagcctcagcagttgctctctctactgcagaacgctcagcccggatcctagcctccatagctgccttacctgataatgacttctccctggcctctgcacatgctttctccaatctttcacgagcttctgacattgctctttgacgagcttcagctgttaacctctccacagcaaccctttctgatctgtcacgagaatcagcaaatgctctctcacgagcatcaagtgttgctaggtcaacagccattctatccttttctctttctctttccctctccctctcctcctctatttttcggagtctttcattttctatctctctttctcttttcatcctttcagtttctatctctccagatgtcttctcttttctctctgcagctgcattaacctgctgaaatgatttctggttctttagcttctcttcaggcctaggcagttggactgcttctgtttttctcttatcttcggtgttgttttctttcaccatatgagttggcattgtttttctcttctcttcctgattcatggtagcttgggcctgggtgcaatcttctctctccttccactgacgagcaaattctttctcttgattttcagaaacagatcccatctgagaggaactcttgattttattggcattggcttgtccaataactgaggctgattgccccaccttcttcgctcgattatctagatgaggcagctcaaaggcatcttcccctttacattggttctttccatgttctaagtttccttgtgactggccaactgctttcaattttccttcaccacagcttggcttaatttctatttcaaatgcttctaattctgtttcactaactttcggtttaatctttatttctccacttgttttcttcacagtgttatcgaaattaaagtcctttcctgcgccttccgttctgaagtacttttcagctatgctaggtgctttgatagtattatcaatgaatttatttttccttccaactgccccaggttgcatttcactagtccttacatcaccactttcttcatgggcaaagctaaagctgccctgagttgttttcacttttccactgtttttatcaatgtcgctagtggactggcttgattgactgttctcctcactacaatccagcttatgctccacatcaaattgcggtagatcatcttcctccacaagcaactgagctcctttggccaattttacttccttactactttcaatcttctccttcacttcatctgccttgtctagatccttctcagcttctccaccaacagcatctttaagcacctgcttagtcttttcctgctcaataatctcacttggcatgttctgagtatccaacagctcaaaatcgtctgacagttttgtttctatatcttctttgtctagaccctctgtgaatcttttctcattaatttcttgctgataggccttcatgtttttcctagtctctttctccccattaaccgatttaagtacattcttgtttgcttctcttttatgagccttttcacgttttttctcttcttccagcttaagagcttgtttctgtgtcttcttgtaaatttcctgttgaagggactgtttcaatcccgttccattctcatgatgcttggcagctactttaggtctcctctcactctctactttctcaaaaatatggtttgaccccttctgattttcttcctgttcaagatccttctgcacttttttctcattttcttcttggtcaaatgccccttcaaaacttatattctgttcaaaagcctctgtttgcttctcttcgttgtctacactttcatggaaaagcttgcatttttcttcaatttcaatcattttgtcagcgtccgatattttatcattctcctttagctttataggctgctcaactttagaatcttcaaaccatctttttctctctctagtggatttattaccaccgcttcttttgttggatcccagaagctgcttggctattgtaaagctgttatcgacttccccccattcacaaacttcattggttacttttaccttatcctcaccatcttttggctcacatacctcctcctttaatattgactgtacatggttttcctcgtacccaaaagactcatttgtgccttgtttcagctcagaattttccaacccatgatcttccgtggcagcattttgtttcccgccattttctgagtgcttatcaaatgattccacagttgccttctcaagctgtccatgctcgtgactcgtattctgcacagcagtattcttgttatctacctgttcaacaaccttcttagattcatctgttgttattaattcaaaaaattcggttgcctctttccattcactagcttcatcaatggtataatctcctctatttgaccatatttccttctcagacatgtcttttgcatatttttgagcagcagcatgaggtttttcccgttctacatattcaggaacttcagggcctgccgtagtcaccttctgcttctcctccatcacgaacagagttgatccgctggctttttcgcaaggtcccttcacaatctcgtcttttattctattggatccatcaataatcttacctctcttcccttccttccctttcacatcctttttcaaacctgatttatggctggtttgaagtccatctttaatcttctctcttaattctcttgcacttttaatctttgcctgagcattctccattgcttcttttatagcagcagcagagactgcagcagacgaactggcatctacctctacatcaaagaaaggcggcgaatcatctcccgagaatccttctgaagtaaaacaattatgatatggggccagtttactagaacctcccttctcaccatctactataggaggtggccgacaaggtggaggcaattctgatggctgagttcgaaggttgatttcagatatacctacaaacgcttctctatggaaaaatccattattatcacttcctttctgagttctaagatcattttcaaatgcatgtccaccggcactaccattaggagggtgcgataatgtttttctaagatgcttcgcctttagcttatcaacaatcaaatctatattgacattgctagcttcatcctcctgcaagggtgatgaatcaaccatgacagagaatcccgaaaccccgtgaagttgagttacatgtgtagtcccgtttgaaaaatcgtcgttgctcatttgattagttttatggtaagatatattaaactctgtactaccatcaagcgagtgatgaggacttccatttgaaaaggaacgatctttgccagaaatatctgactcttccgatagagattcaaactctgctggagacctatcaatatgaaacaagaacaataaataccatcacttatgccacagccatttaaaacagaacacaccatacaacagtaaagttctgatctttcttaaagataatcccaaactaaatcaagtgaagggattaaatttaacattgaatgtgggatttgaactgtgaagtacagctcaaaactaactgcactagctaaagccattttttcattctacttatatatacactgaaacaaaaatatggtatttttatcaatcaataacctaatttcacaagcttaatttagacagtaaaacctgtcattttccacaaacaatttaagccccccaccccaaaaaaagaaagacaaaaaaaaaatctagctcagtcaagctgtttgcttatgtaattataatctacaaagccagactccccaagtgttgacttcaaaaattcataatattgaccacatatgttccctaaaaatgctcgaaaacatacagcattttttcccgcaagctcacatggaggagcttccgaaagcaatattatcatacccaaattaagacaagccaaaaaaaaaaaaaattgtttttttctgaaggaagaaaacaaaaaacttaaaaatatttttcagacattttgacaaaaaatatttctcacaatttaacaaaatgagggaaaaagtgaaagctaagaagtttaagaaaaggaatatgaatacgtgatcataccaaggttcgtcggaagaatcaccatccatacccttagattgatcgaccaactcctcataagagacagcgaaatctagaccattaaacccaccaaaaacctcggaatagtcaaaactagaactcctaacatcgaaataaacctccgcttcatcgaccgccggaagatccaacaccggaatcgacgaagctcgagaagcctgaaaacttccaaaaatctcaccgtagtcttccattcgaggagatagagtggaaacaccgaacttcggtggacctccgtatacatcatcgtaaagggactttgaaggcgcaaagccaccggcggcattgccacaaattttcttggaaaacgccgccgtagccctgtttggatgccgggaatgtgagaaattttccatgaaaacgagaagattttagggtttcttgacttttggaaacgtcacaagtgtatttttttttttttgatttattagtttctctctctgcagaggttgggttgcatagtcagaacaaagtctgaggagaacgacgacgacgacgaaaggacctgaaaaggaaatttgtgaaattaccaaataagactccttttattcacaatctcaaattcttcccttttttttctttctttttgtgttattacatttttaccctttctattcttttttggttttgtttttaacttattcttttttttttttaatgaaaattatttgttaggttcgtttggaaagctattatacaattggaataagtataatgaagtctaattataagatttggtctatttgttggattaagtaattacacgataattatgtaattagaaataattgagagatttagattacattatttaaaaatgaaatattattattttttagataattattattattaaactatataattactaattcatttgtcaaatataaaaaaaattattatatacatttttttatattaattacacgattagtcgattacttctaaaggcactcttaaagaaacattaaaactaaaaattgtaagcaaataaaatgtaataaatgtaaaatgtaatttataaaatactgactatgataaactcaaattatacttattttttatggtacaattaaaaatgatgtaattcctactttaaattatatatggtaaagttttgataagtattctgtgtaaaattatgtatctctataaactttttattacatatttgtggtaaaaaaagaaggaaaattattctatatattttttttttaattttttttttaaatttacggttttaatttctaaagtgattgcagcgctagttgcaatagaagtttttatacgattttttgttacaatttaagttgtagcactagttacaatagggatttctatgtaaaatttcgtaaaaataagaaaaaaaaactgttttaaagtataaaaataaaaaagctcgaaaaaaaaatgtatttttcttttgctaaaagaaattaaattaaataaaaatcgttataagtaagggaattttttttttttttgacgcggtgatcaaaatcacacatgattaataacgtgacaatccataatcagcagctgcatctcctcgaactaggatagctcatcgtctaaccgaagggcatgctttgccaaactatgagctgcagaatttcttattgcaagctacataggacaaaactgcccccggaaatttagacaaaaaagctataacatcctcaaacaacacccccagctcattaaaacacccataagtaagggaatttaagtaaccattggaaactgatattttaagattatgtctattaaaaacaagtttacagctccacacattttttttttgacaagattttccttttttttctcaacacaaagtattgaagttaattaattaaattaataaatattgaccaaataaaataaatatatttatggaaggagatgataaatctataaaagcaacccaaattcaaaattaataaatgcaaccttttaaaaaaaaaataataagatgtatatcaaaatattacacataacatttaaacagtaggttttatataaaataaaatataaattgttaaaaaattgtcaagttaaattgttggtgtatatgatattggaaatttctgtagaagattctattgtttaggtagattttctatttattttgttagctggaaaatttttttagcttatttttatgatgattatgtgttagaatcacttgaatttttgaaaattttaaatagtttataatactgaaaaataacgtttaaacaattacttaccatgtatatatataaaaaaaatcacacacataataaattatataaaaaaattataatattgaaattttctaaaaaaatttacaaataattttaaataattataaaaaaattagactaaaa

SEQ ID NO: 19856 - DNA, 5409 bp, Cannabis sativa
aaaaaaaaaaaaaaaaagtgtcttaccaaaaaggctacagtttttccggtgcctgttttagccttggcaagaacatccttacctagaaaacagaataaaatagaagataatcactttcagaacctggacatcaacaacaatacagatacataaagttagatgaaatgaagacactgatacacctatcattcacaagttactaagtgtagaacaaagatgatcaatgcaataacatgttggcaaggcattcaatatttaaatgtgcaagctggtatcctcgatgcttgatcatgaacgaaacttatactaacaattatcgtaactagaaacaaacctttgagtataagtggaagagttgcctcttgtaccacagtcatcttttcatatccaacgtccttgattgcttttagggataagggagagactggaaatttgtcaaagctgcagaaatatatgcagagaaatattaatgagaatgacaagagtattttcaaccttcttcctaaagaactcctaaacctaagaagataaggaagccattagagaagagaaactgtaatgcctacctagtttcactcaagtaagaagagtctgattttacagttgaagacgctgctgaacccttggcactagcttccttcttcaaaccaaacaaagaaccggaactttccttatcctcatcatcttcatcaatatcactgtcttcttcactaagcaaagccccaatgcccaacctttttccctcttcatcctcatcatcgtcctcatccattaaaagaacttgttttctcgaatccttaccatctttccttaaacccttactcccttcattcctattatacccaaattccatatctcttccacctctcttcccggcaaatgaattggagctcactttcccttcctgaaacgatgaagaccttttccgttggaaagcttcctcactgccaccgccccctcttatatccaatcgcctattcatctgtgaatccctagaacgagacccaattggggttcgtgttcttcccctattagaattgttagcatcatccgaatcactctcctctcttctctttttcacagcaaaagaatctctactacctatatctctatttctatccctacgacccctatcaccaccatcgaattggcctctactacttacatctctacttctacccctgcgacccctatcaccaccatccgtttcctcttcgctattcaaccgaccacggaacgagtcgtccttcaactcgctcacccagtcactgagctcagcctcatcctcaatcaaactcttcgaggcacgaacgtctcctcttccgcgactgaactcggagcctgaagctgaggcccttgatcgaatcgggcgagtcgagaatttccgcataccgagctggtggtttaatggaacgcgataagacccaagacaacggtacttgagcttgaatgggaatatacgagaaaaacttgagatagtctgagaagaagaaatagaagttccaagcttcatggaagagaagcaggtaacgggaagagcagggttgagaagacgaaattggtgaaagagcttaacgggcatggccggacctgtaaaccaaaatctgaaaatggtgccttggtgaaatttatatgttagccttggaggtaggcatgaggaacgaagaaggaagataagggtttagggttttagataaagggactggtgtaaatggttacacgagggggacaaagataagggtttagggtttaagcatctctactgttgggaccaattaaccattttgcccccaatttttcactcttactcgttcaatttacaattataccacatattatcttaccaaaccaaaacaaaagaaaaaaaaattgcattccagtcctagctacttcggttttctttaaacattttatattgtctgctaggtttctttttccaaatccttatccaagtgaggttgttttatctccaactagacccgtcaatcctcactgggcttaggtgtatgtggtttttctactgcgactagttttatttcagtaacatagttttgagtgtctttttattaagttactgcgattagtcttgtctttgtggcattattttgtttattttatttcgttgttgggtcgtcttttttttctttaatgcttcgccatcaaagttctgttagtagatgggaataataagttctctttcggttgaaggggttgaatgaacctgttgcaataaatctactattgtaacttttaagcagtagagtaaactaaatgtatgtgttcttaaggttaactctagtgctgcaatccttttcatctgaatttattttagtttcttttgtaaaacgatttgggaatcaaactacctattagttggcttgttattctaattttaattctagttgtgtttccaacaaagaagatattctgattgagttgcaaattgctattaataaaattgtttggtttattcttacaaaaaaatcgtttaattttaaatataacatataggataatcgtttaatttaatcaaagtgtgaagtcattctattgttgagagtttattattataaaaattttatcgataaatttaattttaaatataatattagagagttcttttcttctaaatattgaaaattttctcgatttcattataatattaacattattatgggactaacttatttttcactattttttttattttgcatatattttatagactattcataatatgttagatatgcaaactattgttcttataattgtttgggacagttttgtgttcacaatcttttgtttgtggcaattgatttgactagatatattgtttagttagacaattaattatcatggctcaaagaaatctatatcccatcaattcattaatgattctaatcactttatatatatatataaaaaaaattgagttttttcttataaaaaaaatagaaatgaggatttaattactttttaggtgattctattatacacgatctctaaaggaatattttgttcactctctaaaggagctatttagctacacctcgttttcatctgctttgatccaaattgagattggtctctttgtcccaactcagttttccggggaggtgttaattaagtgttagttagacttattgtacatgttagttaggattatgttattacatgtacagatgtatttatcaacaatttttatctttctaactatattgtactctgtatatatatcgaactattactccttcatgaaatcacacttttgctcattctctttcttcactcttaacattattgacttaatttttagtcaacgatgcggagtcaaaaatacgacaatatgtttatgaactagtaaaataactgaaagcaagaagttacaccattgatttataaaggttcgaccccagattgtttggtaatgacctactttccttttttagtattacatgtggaataaccaagatcaattgaaccagactcttagaattacagtaaagtatttcggcagcgtttattgtatttaagaagttagaaatcggatccccaaaacagtgacaatgagccactttttatagggttacaagtaaataaatgatacttattacaaaatattcatcaaaatctaactattctctcaataccataattttaggcacccataatgacctggtcttcaggaattgtggagctaattttgcgaatctataatagatccatgtatactggtcagatggtccatccaggatgtcattttttgatgtttttgggaaaagtcagatcaatcctcgctaatcgactacattgattggttagtttactaattgcttggatgcttggttgacatcaatattgagttatcctagctgattcaacaattctaacataatacgttgtacttccttgtcttccaatcactccatccagcttccaaccttcatgatatgacatacaccgactagttatccgtttctatggcacgtgttattctgcctcataccacatcaccaacgtaatttttgggataatatgtgtggtaagcaactatttgaattttatattcagcacggtaaactattcaattttttttaaatatttatagatgattttaaataactacaacgaacaagatcataaaaaaaaaattacaataaaaagttttactgaatggctaaagaattaagagtctactcaaacacccttttctagacaccattgtgtctctttttttttttttttaataaatgataaaacctcattaattcaaattgttcaccaatacaaaaatgagctttgaggaagcattgttcgctttagctcgaataatacattcaaaaatagaacaagcaaactttggaagataatgagctatattgtaaaattaagaaatatacccttagtagccaaagtcttgaaaagacacttgcactcttcaataatactgctaaagtatgaaagcttagcagttgagcttctaatctcttgaaccacgacgagacaaccacaacataagccaactaactgaactcacatgcaacaacaattaaaaattgaaacagccagtagaggtgaaaatagcggcaacagtatttactttaatcatattctcatttggagtacaatgctcattaccatcttcaaagtgtcaacaaactcgaagatgtgtccaaagaccgttcttgagcagtcaaccactgattaagatgagctaattaaatacaaaaaccatattcacatttgaccctttctgattactcaactctgattaagatgagatttagatgtctccaacactttttaggtgtatggttcaagtatacattttttgatgtgtgcaatattttagtatatgttttgggtaaatatctcatactaacagaaacaaaataaaaactatgcacgtaactagagtatcaaagaacaaatgcacgtaggtaatttgtaatgtcctcgcttcaagctttcattagatccttacccttacggaatgatggcccttatacactagtacgtcactctggctgctttgtcctcacttgcccgctttctgggaaaacttcccaggaggtcactcatcttgaaattactccaagtcaagcacgcttaactgtggagttctttcatgatgggctaccagaaaaaaagatgcatcttgttgatataagtagtactaatcaatcaatttaaacctacttcaactatatcccacttgaccttccccaggtaatgtgggattaaacaactcccgaactttccccttaggatcacggggctctgactgtcacaatcatcctccctttcgggtccgacgtcctcgttgatcacaaggcgcttatactatttgtaatgttcccgcttcaagcctccattgggcatctatacccacagaatgatggctcttat
